United States Patent Application Publication US 2007/0237770 A1 - sequence listing, part 4

SEQ ID NO: 305 - DNA, 358847 bp, Mus musculus
  misc_feature (1)...(358847): n = A,T,C or G
tccctctaccttctctgtttctttctttctttgttgctttctctctttgtttcattgtttctttgtttgtttgtttctttctttctctcttttttctctttcttttattttgttaaagatataatgtttatacaattttatgagatacattatagtacataattgagattattatgagataatttagtacatgtatagaatgtgtaataagtatgacaagtattctcatctcctgcttaattatttttatttattgggaacttcatattctactcctgattttaaaatcgatcatagattattgtaactgataggtactctactatgctgaggacccagaaggaatttctctattctgtgtttcagagtatgttatgagatttcattctgtctccattcccctctgaactgcatagtgtctagtgaccactatctcgcctgctctttgagactagtatatttgtctctgcacatgagtgagaacacataggattttgtttttctttgtctggcttatttcaatgaacaccgtgacctccagttccacccatgtgtgtgcaagtgacagaatgccattcttttaaatggctgaataacatctcactgtttacatatgccactcgaactttctctacttgtttaatgaacgtcatctgcgttgtttccatatttcagtgattgtgagttgggtttaaataaacagggacataggtctgtgtttgatgtgtttcatctcttttttgatgttatactcagtagtgcatctcctagattccacaacagttttaatttcaatcttagaggagttgctactgctttccatgtggctatattgatgacatcatcccagtagtctataggagttcttcgttctctatattcctgccaaattgtgttagcttttgccattctcttggagtaaggtagtatcccagggtcttgacttacatttccctgatgcttggttagatcaatcatttattggccatttatatgcctctttttgagaagtgtttactttgtccttagtagactggccttatttttccttcttaagaaaaatagttgggtttctcttttttaaaatttccatgttaagaaatccaaagattgggagaaagctcattcagtaaacttgccacagaagcatgaacgcctgtgtccagacccctcacacacacacacacacaattcatcaagtgctgccaactttggacgcactcctgagcttcaaagtcgattgtctttccttggggcttcagagtagaggcagccaggtaaaagtactaatgctgtgttcacagggctggttgatccgtcagccaccaggctccattcccagtccttctgattacttaggaaaccccatggagttagggggttcctcttaggagctgggacaaagaccagacctcatttgggtactattaactcctccaggcaccgccccttgtctatctgcagagatgcctcggttcaccagttccaaaatacttgaaagaaaaggcatgtttcttctgtgctccctgaattactggcttagtatttagcttttgtaagttataaaagccatgtattgcttctttatgtaatttgtagctttcaaaacattgtttttccctctgatttttgatgtttccttaccagaaatgccttttgggggggggggtagtgattgtaggcatttaggagagagcaaaattaggtagctgtattcagtgggctgtctacctagataattccttagcaacctctatagaaacttgttagtatctgaggatgtacacagagtcaccaaacactgcattaatacaggtgactaaggaattttggaattcaggatgttcaaagattactctgctgtcgtggttcatcttccttctcactttgcataatgatgaaggatatgaatagagagactcatcacttgtcaggaggtaagaacatggagacagagagaatcttttaacctcggtgcttccatcttgacaatgtttgatttaatatgtattactgtgaaatgaatttgaaagaaattttagaacaagaaaaaagtcaaatgattatatgaaatggtatttaaaagttttccacttcaaatctgtgatatgattgtgagccagcgctaatggagaactaaaaatggagacctctttttatatttaatggagcaggtaggacagaacgcaaagtccccttaatcactctgatataaagtcggtctcctccctctctccgtccctctctgcctccctccttcctccactctttcttgctgtactacaggcagttttaaggttatattctgcattgattaagatttgcctagaaaaaggagtcttaattctctgaatttttatttttcatttccctttcttgatatataagcttccacgtgtcgcttattgtctcatttctccactttctctttttaagccatcttttcagattctgcagccccgtgagattcattccaagcctcatgtatagagtgttcaaagctatcggaatgtggctgtggtttctcctgtgcccctactcctgggccacactgaattctcagttctctcaacagttacctgctgacttttcctacttcatggtgtaggagtgtttttgttaacccacttcccctgcctagaatcccatcaacgtcctctcaaatatcacctttcccagcaaatggtgctttttatgtttctgtcaaaggatgaatgccattcttttagtttgcatgtgtgtatttgcctacttcttgcctatgtagtatgtagaagtgctggggtaggagagacagagattgtccctatacaattgtaattcctgaggctaaacgcagtgcatcatataaacataagatgttttacacatagttgcttctcagaagcgtcagctgatttgcaatgaatcttaattcactttattcacattaatagctgtggctaagtaacaatactggtactttactttgtatatttcagacaaggtttgtatgtagtcctgttggcagccctggctggaccagagctctgcctgtcactatgtctatcttaagatgagtgttttacaaatccagtctttctcaagacatttttctcaaataagagaaaagtggctgcctactacttaaaggtgactttgtcagcttggggtgggagcaaaagtgatgagcatccatctcgtcgtgacccacatacacactgatgatggggcgggctttgtggccgactgcctcacatagccaagtgaatctcggtgacaaggacttatttctgtcctggaagaaagaaaacacgagactagcctagccaggttggctatctgttcttcagaaaatctgggagaaggggccgagggagaatcgtgatttatgaagcacagtattgcgatggaagatgccatcgcaacactgatgcgtggctgaggggaaaagcataatttccacacaggctatctgagtgaggggcgggtgtaatcagccatgtgtctgtgggaggacattaaaacacagaaaggggccgttagctccagggcgagcctttaaactgtgtcggtctgtcccagcctgcttgtcaacatgtccccttcccaggtgcgcttgatgttctctttacctaagatgacccatgacagaacagtgtcactcccaggagtcccagaaaacatagggtcggtgggtgagaaggcacaggaagaggcgcaggtcgtggctctggagatttcgcttggagcctcagccactgtctcttccatccctcagttcaatgtatactaccaagtcgccagcagcaattagacttaaaattgttcatttcctatctgtggaccctgtaagatccagggaggcaggaaggcatcctgatgcaaagccagatgagttagaacctcatccctctaggtaggtggggcgtttaattaagcagattactaacattcgtcttgtgctttctttgcagagaccattctactatcctagactcaggtataaggtgtacttcttgagtttgtttgttttccttaatgcaatcaaattatgagacaaaaattgaaatagtctagaagatgcgtttttcctttctaaatgtcgatatgaatgggctctgtgacaagtggttatcagaatagaagagaaggaaatgaaagggaaggagaaaaaaaggaccgtttgttaggtcagaattgatgggatcacgcctaacacaatcgcctctacctctgttttgtaagatgcgacatgtagcacgcagacgtgttaatgtgactaaattagccccgtggagcaagcagggagtggaaggctgcgttcaagcttacggtgggttcatgcaatcacgagactgattctcacatcatggaatacagacatgagaggaacagtttcttgaggaaagagggaacacacaagcccatttagtcagacagctttgacagctagcacaccgtgacccttactctatctggcctcagacatgcttggtttgtggggagtaccgtcctggttctgagcggtggctgactgtcttctgtccacagagcacttgtttccttaggcgtccgtgttttggcaactatctcctttgcccagttcacactcggcactgcctgtttacaaaagccctgcctgtgactgcagcctgtgacatatacaatggcttccaaatagggactgggtagcagccctcacttgggagttaggtcaccgagcacctaagctgctgcacagccctgccagcttggagcagctgacactggcctttatcttgtttggctacaagcggaaagccagggtggggagcggaggaggaggagccagaggcttaatcctgaagggaccttaggaaccaagcaagcatttacagtgagtacagttggtaggttcccacttttctgcttcttatttaagagagggaaattacaggagaaaggagatgggcaatctgagggctggacagctcgggtctttgcgttttgattttccctaagaaggccgccctcatctaaacatatgcaaatgcatcctgggaacctcaaaagtgtttggactgctagagagataccagaaccagtccttattaagcaatccgtggtgcattgtcttctgtcttcacgggatagtaagtagagtaaggtagggaaaactctcacacaaattaataaggaaagacttaaggttgccacttctttctgcctttgtgcttcatatactgcctctcctttagttgcacggaaaagggaggatttgatggatgctatttttaacaggagccgggataaaaggaggtattatctctaatgctgggaaggaaggtgaccacagacaaacatttggtgatgggagggagggagaggcccttgggtttcaaatgctgattgatcagtcttctgtcttcttggagtcagttgcagctcggtggatacctgtatgctcttgggctgatgctctcacttgtactgttgtgacctgttgtctagtggcgttttcttttctaacatctctgtgactagaaggcctcttttcctttatgaagtgactcatgaaggaaaagcatagaacttgcagcacctagaagtagaaaatcgtgccccactgtttgtgttgaagtggaatatgtttcaaaagtaaccaggataagggcaggaagctccacccgaggatcactaccgtggtctctgcgtgtcgaagctgttgccttggattacatacgtttatcttttccatcggatgtgatttttacgaaaaccagggagcgtagccatggctgctgctctgctgcaatgtgaactgtcagaattgaaaatcaaacgttcatattaattgcttcccacgagccatgtgattgattcacttatagcacgtccctcgcttgctaagcgtttgacacatgcactcatttctcagtggcaaaagtattcgtaaggaaaagtacacaacagaaactcaagtgtgagctcagcaaagctcgcttcatctacatgcccgggctacacgggaaagttccttcctttcagttggattagttgaacatttgtcacgggagaatcttgctttgaagtttgcctttcagggcttcctagccctctccggagtaatgcacatttggtcctccccagacacctttctgtctagtgttcctattgttttgggccccacacaagaaccatgtctatgtcactagtctcgaggggacggttcctagaggggagcccttgtcatgttcattctcctgagaaaaattatcaacgccaactatgctttagaaattatctttcttagtaataatttttttcctatgaactatgagaagccagttgattctatttgtgtgctttagtgtaacggagagccactatgtcgtagttacacatgataagaatagaaaagaaagagtaatggctgtgaaatccctggatctctcactatgagcagtctcacattcttctctagttcggtcccttcattctgcagctgaggaaactaagtctgagaggcactgagtgcttgccctgtacttacttgtgtgtagcctgacagcacatatggaaatgtgggataagacagttctgtgatcgggtgagctgagtcattgataaatctgtagtttaaggtaggatatgaatcacttgctttaggaatctgacgaaactgcccgtcagtaagtgccatacagggtcttgggcatgtaggtgactctatgcatctgaggcagctcagggcacagcagcccgactcctagttgacctttggcacagtcaagtttttgagacaatcattgttacatcagtgcattctccatttgtaaccagttttaccaccttgaacaagaaggcttcgttaacctttgttatcggatttctttttctgagacttgatatttgtcccttagaaagcagtgaactgattaataattcagatgtgttcggggaagtcagagtcagcacctgtgtgatactggggtatggcttgggaagcaccgaggtaactcagaagggattggatgccttctgttaaagtttgttatacttgagatttttattagttaaggctagtattgttatcatttaataaaatttaaacacaagatggttgaaaatctgagggatgtatttctccctcctgcctgtcaccaggggacttcctaaggcaggcagcaaagggggccagccaacttaatgagatgcgctttgccttttgcaaaccaccttgcttctgaagggtcactgataaactttacttagctcaatacactccaggtgtcccagcacttggacgctagaagcaagatgatcagaactttaaagtcagttttgaatacataagcctgacatgagtgtgtgctacatgggtccttgtgagggtgggggaggagagtgcgggagagggagtggggaggggatcagaagagcagagagcagagagcagagggagaaacaaggaagtcaggagaggggttgtagagcagtacctgaagagtacttaagaaatgccgaggacccaccccactcttaagcattttgtcagttccgtagatctagttgtttcccatgctcattaggtgtggatggttacaggttggtcatgctgggagctgtcttgatttttttcccccttctatattgatagataagaataactttatttttgttacagtgttggctgattttatttatttatttatttatttatttatttatttatttatttatttaacttgaaacaagttagagtcatctgggaagacagaacctcaattgagaaaatgctttgatcagattgttctgtgggcaagtctctctctcttcttccttcctttctttctttctttctttctttctttctttctttctttctttctctctctctctctctctctctctctctctctctctctctctctctctctttctgccatgtgttattgtacagtttctattttaaaaaaatgattattttatttatttacatgtcaaatgttgtcccccagtctcccctctgcagacctccgtctctctgtctcccttttgcctctaagatggtgttcccccacccacccactcacccactcctgcctcacccctctagattctcccttctctggggcgttaagcctccagaggacccagtgcctcccctcccactcatgccagagaaggcagtcctctgctacataaatattggagccatggacccacccgtgtataccctttggttggttgtagtctttttcttgaataatgattaatgttgggagggctcagtgccctatgggtggtgccacccctaggctggcgatcctgggctgcgtaagagagcagggggatatgaagcaagcctgtaagcggtactcttccatggcctctgcttcagttcagatcctgcctccaggtgcctggactgagtttctgccctgacttcctgtcatggtagactatgacctctgaggtgaaataggtctttcctgcagtttctgccccagactgctttggtaatggcctttgttatagcaaaacggaagcaaaggcagctgctaagtgaatattaagaatctgacaaaatgtgtgagctgctttctgataatcacattaactttctgaacttttgatcagttacttgtcagtaatggaagtataacttgaatgtactaaacaaacagacaaacaaaaacaccaccacaaccttgtaaaatacagagaaatccattagccttgaatacaagctgttcccagggctgaaatagcacccatttattataaaacataagagccaaagggtattttatgctagaccactttcagaagagcatgatcgttgttagtaactaacctttatcctcaaaagtaaacttagttcaccatgatatgcagctgttaatctcacctttttactggtaactatgtatcagaacagcttattactcttaaaattccaaattcctcagaaaatttcaacataactgggtattatattaatgtaacctgggcgtgatgttaattaatcagtattaattagagctttatggtagaatctctttttcaagaaactaacattttggaattgctacatgttatttatatctatcatctctgtcgtctgtctgtctgcttgtgtatctatcatctatgtagctctgtcatctattcaaatcttcaaaatagacaatatctgatactaacacagtgtgtttggtaattagaacaccctcactttttacttcatgtattgaatatgttggttttagtcaaaatgacgtttggatgcatacattaggaaatcacctttaatcattgtttcgacacagtagaaattcgttctttcctttcacatgtcagcagtactggcagagaggctccttggtaccttatgacctacactcatagctctgtgcttcaccatcctcacctaagagcatcccagagcatctcctggcctgatgtggagctagagccccagccatgaagtccaccatagagactggagtaacggtggagagcagatgggccggcaggcaggtggcttattctagttcagcggtcccttgaaacagctatcagaatttctgcatagctattccacttctcattggctgaaacttggctaccgggctacagctagctgtaaaggaaatgggggactctagttctaaattcaggacaggaacattcacagttaaatatcagtttttgttactaaggaagtgggaaaatggatatttggagagacagtatcaccatgctcttgtgttacttactgggtcttttgactacaatgtataaaatcaaaacccctctttctgtttttgttatgagcaatggtttcttaatttagaacctggctttatttagaaaccccgtttcttctgcgaagtatcgttgctttatttggcaaactagtctgactttgctttcctatttccttttgcctttcagctgttttggaaagaagtaaggcttagatttctccatgttaaccatgagtgtgaccctttccccactgcggtcccaggacccagaccccatggcgactgatgcctcgcccatggccatcaacatgacacctaccgtggagcaggaggaaggagagggagaagaggccgtgaaggacgtgggtgctgagcagcagtatggaaagccacctccactccacacagcagccgactggaagattgtcctgcacttacctgagattgagacctggctccggatgacctcagagagggtccgtgacctaacctactcggtccagcaggatgcagacagcaagcatgtggatgtgcatctagttcagctaaaggtaaggccggctttctggaaagacgtctaaaattgcctctggtatcttgagccagtctcagttttatgactgtcaatgaggaagagtctgaggtggaactatagtaacatttggaaacattactcataacggtagccagatcgttgttcttctaattttactacattgccaattacctagcgtaaaactggcctttgagaatagaatggaaatacaagaaacagggtgggtatttttgtcccatgccatagaaatcagttgcagagaatgaaaggatctacaaacgattccgaaaggcttaacaaaagacatcaagccaggatggagagcaggtcatgtgattagtaccttctgcagaagctgaggctgcctgcctttgaagcaattggtggtttctaccctggtgggaagggcaatgttctccttgtagagagtctttcatccgaagacaatgcattatgcagaagaaaggagctttttataaccactgatcgaatgtcagactttttcaaacatctgtggcttctggagaccttttgaaggtgtcacagcacagagaaatgggggtgctggtgagcatacagttaaatgagggctccagaaatatacactgtgacttcgaccctgccatagtctcttctctctcccaggtccttaaggggaaaatatatattacatgtaggctttgtctaaacttcaagttagatgataccctaaggaagattgttttacctaagctggttcataaaataaaataaaataaaataaaataaagcctaagcagatttgtagatcttaacactgaagtgacttatggcctatagctaccatggaagcgtggtgagccgccaagagagagcttgtttctaaatgctttgagtggatctggcttagcctgttatctggcttcacctttcacgtttagtgcgacagatcatctgccagatgtcttggttacattcccactgttgtgataaagcactgtgaccaaacacaacctggagaggaaatagtttactcagcttacacctgtcaggtctcagtccatcactgaaagaagtcaggacaagaccttaaggcaggagcctggaggcagagctgatgcagaagccagagaggaatgcagcttacttgcttgctccagatggcgtgttcagcctgctttcttatagcacccaggatctccagctcagggatagtaccatccacaaaggtctgggcccgtcctcatcagtccataattaagaaaatgccctgcagacttgcctatagcctgatcttatgagacatttttcttaagtgtgattccttcttttcagataattctagcttgtgtcaaagtggcaaaaccttactaggacactaggttactacgtcaatgtttaagacagggagggaaagaagattcagaggagagaagggaggagggaaggggtaagaaagggagagagaggggagcacatgagaaaaggatcagtgtaagtcagagagccccatgccaccgatagttgctcttgggaagatctcagcatgatggcagagctatggctggaggcagccccagcagaatgtcagcccccaatagtgccctcctacggccggccttagggagcattgtgactaggatccagagataatttattcagaggaatcttggggtgagagtaaactagaagttagaggacactcctttgtactgctctctccagtgctgatctagtgtgtggcttccctaagttgatgcaggattgagcttgtaaggcaaatcagctgttattccacaaatccttcgcatgtacacaggaagttagttaaatgctagaagtgaggggggtaacacacctaccgttagaagacacagctaaaaacactgttaaaaattcaaatggttggacacgcaaactgtatatgccccagtacaggggaacgccagggccaaaaaaaaaaaaaaaaaaatgggaataagtgggtagggaagtggggggaagggtatgggggacttttgggatagcattggaaatgtaattgaggaaaatatgtaataaaaataaataaataaataaaaattcaaatggtcttaaaaatactaacttgtcattaacttcacttaattagactaatagggctggcaagatggctcagtggataagagcactgactgctcttctgaaggtcctgagttcaaatcccagcaaccacatggtgattcacaaccacccgtaatgagatctgataccctcttctggtgctgtctgaagatagctacagtgtatttatttataataataataaataaatctttgggctggaatgagcagggactgagcaagcagggttgaccatagtgagcagaggtcctaaaattcaattcccaacaaccacatgaagactcacaaccatctgtacagctacagtgtactcatatacattaaataaataaataaataaataaataaataaatcataagtcttttaaaaagaaaataaaataaaaaacaagcaaacaaaagacaaggaaaaaataattatttaaattaattatttagatgtaattatttaattatctaatgaccaataaagtacatatggaaacttaaattttaacacaataggaatgtaaattttttcgtgccattaatgtatagtttatttagtgtttgaaacattatctctggggagatctgctttctcactgtagctgtctttgtacttttagaaaggcttcttgtatctgtcattgctctatttcaggtgtgagctatcttcccccactgagaaaggagctgcaggagatgtaaagtcaggacagtggtcctatgatcccagacaatgactgttcagtgctgaattggaactgtctaccttcattttactttacggcttctgtcagcaccgtcctgtttgttgtttcatcaagttacttagctaaattctctgtgatgttctcaaatgtgtgtaacaatggagcccttctctactgagcccaaagtcagcaaactccagtgtgtgtggccgctactgtggtctgcacgaaaggcttagttttgaatcctgatatgcttatataagtttctccttcgttatataatatttctttgttcagtggaattttggtacatttaaatttttgaatatgtcactgtggtaccaggttcagcctcccttctcagggtgtgcaggtgccaccagcaaactgggggtccacagtctgcataagtcagatactgttccaggagggggtgaagtggagtgggacgggaagaaaagagagtatgaagcagctctctgagacaatcctggcttgttcatatttctctattggggatatggtggtgggtttgaattaaacaaaaggttatatagtttctggggaagggcgtgagaatatccagggagggaaagggcactcattgcctgaaggattctgctactgagatgcctcgttagttcggcgaggtatcctaggtgctgagtggtcactgattaagtgggacaagctggttgggagtcgcctagttgaatgctctgaggcaggtatggaaccagggaggggttagccctccccctgcaggtcccacgatgaggttctaatctcagtttttcagatttctcaggctcaaccttgcctgttccatgccacttcctctggtgtcgttgtacacgtgtcctccatgtcaccctttcgtcgcactctacatacattcaaaatgataaagcacgtagcccagggtgtcagtggagatttaccaggacacccttgtaaagcagctcctagatgagactgtggcaaagcagggggcagatccaccttgggttcatggtctcagcttcatattactgcttcggtccattagttgatttattaatttacagtggaacgtaatcgtcaggacaggggtgcccatgaccttgaagaccatctgtgtacagaaaaatgccagttttgtgcatctattccaatgtttccctaatggtccaaacccaagtttcttacctggttactctgctcatgtcttagtaggagtctcaagctggggatgtccgttcgatcgctctgagtgctcccctacttgctctgagtgctcccctacttgtcccagttacggtagagggaccactctttgcctaggcatacatacatctctatcaacaggaaacacatcccccagttgtgccttcaattcattcactgctgtgtaacactactgagccagcctggcccttgcctgcctgggtacttaatgcctgggtacttaatgcctggactaatcttgctttcttttaccttttatcttccccactcttgcagcctatttcccattcagtagctatttttaaaaactgtctatcagagtatgccattcttctgttttggatctcttcctttgactctttactgcctaagtctctggtgtggctcctcccattcaccctgatcgttaaagccccagagaatgtcaagctagttcttgccctgtagctttccttgttccttttgcccagagactatgtttccctgtgtatattgcacagccgactctagatcctcactgttagccagaggcacagtcaggttccaacatccactcacagaggcctggaggggatcaggcaggggttgggaagaagcaggtggggcttattctgtttttgatgaagggaacacacacacacacacacacacacacacacacacacacacacactacagttgtctacacacctcacactgcctttacagtgcttgctttaagtcattttgacactgtcttctcgggaaaatatattaatgtacattttttaaaaacttcattgaaaaaatggttttggaaaatgctcacagtggctttcaccagtggtcatatattaaatttttagatcatcaatttctgatgcctactcttaaaacacctactcataatctcatagacattagtcattctaatttacttttataaaaaaatcttatacagttacagcatttgtttgcttcttgtgtcagatatctattctcccttatccttcttgctcaggacagaatagggtactgagtgtgggatcagttcatacacaagcctagatagttaaacccaagtctttatgtccattgcctcctctccccacaggcaggattgtttttaaaaacatatgggaagtgtgcttgctccgttaagactgatttcagacaaaaacattggaggaattaagacacaaatatgtttggggtattgttctcacactgttggagaatctgagagtgtatctgaagtcttggatatacacgttgccttgggaacctgcccagagattctatatatttcatagatggatacgcttgcccaaacccttgcaatccttttttttcctttggttcattaattggcagttattttgatcagtaaatgtgctttcaggggcctagtggtcactcagtcagtaaagtgcttgctgtgaaaacaggaggacctgagttcagtcaccacgagtcacgtaaatcttagcacagacttatgcacttgcaatcccagtgctaggacacaggacacccacagaagcatcccatggtcgtgctggtcagactgtgcagcctaatccctgagctccaggtctcagttagagaccctgcctctaaaaacaaggtgggaagcttctgaggaacccaagatgtacatgtgcacatatatgaacatgaccacacatatgtgcacatacaaacacacaaagtatatgttcagacatttcacccagatgctcatttccttccacctgcccctgccccttgtgacatcagatcaaacaccaagactttgcatccccagcctttttctctaaaggtgacttttggtcatggtgttggtcttaaagtttctctctcatacactacttgtcttattctgttgctgtgaagaggaccagggcgctaattgtgggatcagttcatacacagggccagatagttgagcccaagtttgagtccaaggagaccatgaccgtggcacctctgataaggaaagacatttatatggggctggcttacaggtcagaggtttagtccattgtcattatgacaaggaacgtgggggcatgcaggcagacatggcactggagaggtagctgagagctctacatatagatccacaggcagcaggaggggagtctgaggctgacttgaacacctgaaaccccaaagcccagtaacatacttcctccagcaaggccacacctcctaatcctgtcaattagtactcactaatgtccaagcctttcttgagcgctccggactggccagcagtaacgacgctgcaacaggatccttctgcacacatttattgggagagcttgattacagaggcgaagagaccccaagcccagaactggtgctgcttatataggcctaggagaggcgtgtctcacacccggattggttatgcactaagcctcatttgcatgttcctcatctgattggctactctctctctctgtacctcacagagcctcattatcatacctcatttgcatgtctcacatctgattggttatactcccaaagcctcattatcatgtctgggccaggcagtgtctttgcaaaaaactttactgcatatgtacacattggttgtttgtctgaacttatgcatgatggccagcagtagtcagcgccactctgcaacggcacatgtggcttcccacaagcctttaaatatatgagcctatgggaaccaatcgtattcaaaccaacacaccactctcctatctctcttagttccaagttctcaggaggaaatttcactataacctccagattgagttaatcattattacaaagttttcacagggaagtgattgctactgaaagcagaaaaaaaaaaatctaaccttaaaaaaaaaagtcacaggaaaactgacttatactaaatcctttctccattgttttcaaactgaacacacagtctgcctattttacttgctactttccagacgtgcccggttagaggtgtgagaaacaccggaaacagttacacgcccatctgcacgagtacccacacgcccaggtctggaagttgtgctgcacaagacgatctgtccaagaaccttaaacattgcagtcttagctgagacctcagctgcatgaccgtgttaggtgctaagcaggcactttctcagggagaatgctgcctgtatccctgaagacaggacagcaaagaggtggcaaggcatagactaagaaatgtagcctgtaaataaacagaagcctggaagtgacttaattgaaatcagttcccaactttaaattctactttcaaactcccaccatgtaagacttgtgcctgaatctttgatataggcctgattttcaaaggtagaacactggattaaaatctgtttataggaccttctgactcagatgcctaagacatctgggagttaatccagacacccactaactcacatgggggctagagggcctgttgggaaagggctgtgtcctcttcacagctgggaatttgcacatcaggtatgcctgatgatctaaagatggtggaaatctagagacaaggggctgctaggagaggattcatgctcatcgtgggtccaagaggctgtgccaatataacacaaagagagaacagtgatgggctgtggcacagtgatccagccctggaacagacctgtgggtaacaactagggagaagagaaggctgagcacatggtgccagtggcttcctgactggctgaggtagacttgcccctgatttgggaggttcagagggagaaacattctcttctttctgttatagaagaacaacaagtgagttttgaccaagatgatggtggttttcccagaggacagctatggagtccagggtccactgcctatgatcgtgagcagcagccaaggttgactactgagggcttctatccagggctccaaattcttggcatacacatctgagaactactaacgtcaacatttgggggtctggaggactctgatcttagcatctgtgtgacccacaccatagtctgaagcatccaattcctaacacctctgagtaaatacagcatatcttaaatgagattgaagagaatattttttttctgggaaaaatacacattttcctttttgtcttttcaaccattattttttccagagcaaaataatctcagtccatttagcaggttgtgaaatggatttagtcagataactgaaacaatgcagctggacagaattgtagagataaaatattttgtaaagtttgattatagatgtattcatgaatacataattggtcatggtgtacatttattcttttactgagccaatattagagtggtttaatagtcactgatttagaccattctcaattttcctcaatatctttgatatatactcaaattttagaagatatactgcacacaaacttagtcaggtactgttttgtgcactatgaccattgttctttattctgggctcaaacttagatggaacattcattaaatcaccaccatcaaaggtatatcccacatctcaggagtttaaaatagggattgattggcagaaatgaagactaattttaaaatttttctcctcaaccttagattttcccaacctagaatctctttttgattgatgtgtaacatggtctaaatatatctccccaaaatttttgtgtagcatttcttaagaagtatagctttaaaggaccccaccctcctgagtgagatggctaaccttagaggctgggctgtttcttttgccatgtaaggacacagtgagaagctacctactccagagcaggaagtcctcaccaggtacgaattttgatgatgtctcctcatgagcttcccagcctccaacagtgaaaaatgtccttctttataaattactaaacaaagctgaaatccgtccacgtggtgatcgcttaggagtgagctttcttttctgttttcatttcattcctttttgaattttagaaaagcactctaaagtctaggtattttgcttcttcttgtacatggagccatgaattggtaggaaatgggctccagccactcaggccccttttcattagttcccaccgagtgtttctctgggtaccatgggctgctgcttcaggtgaatcccagtgactttctctctgcttcctttgtcttctgatcattttccttcgccctttgcaggatgctgtcttggttcctcaagcactccctgtgatcagtatgtacattcattcttttggcaaagatctcgccccaaacttgcctgtttacaatgatgtcagtgtctttctgagtgttggagactcttccagtgtagctgagatgacggttttagggcattcctctgtgaacggtgcccattcacttgatgcctacaggaccatccttcctgtgtatttgatgaatgtggttgaaggaacaagtttttgtttcctaaaaggccaagagaacacatagcgtggacccctcctcttctgtgtttgccattttggcagattactggaagatggctactttctttcctttttaatttttctttcggagatagagtctcatgtggctcaggcgggtttcaacctcaccagcctgaggatggctttgagttccacccgcctcgtgtacttcagtttcaggcacagaccatcatgccagcaggactgtgattccattacatcaaatcagtaggaagttttcacaatatctagtgtatagctcatgtgataatatgtgatattattgaccaataaacctgtgcagtacagtaagtttgtagatactttgtacaacttagcgggcttcatcaaagtaatttatatttttaaaggaaaagaaatggaaagaaagggaccagagactcaaggggagttgctggcccaggacacacaaaccactgggttcaactgctagtgtgcagaaggcagagttgaggactgctgatgcttaaaaggcccagccttatggaaaactccatctggttgagtaattatctcctccatcctcacttcatgaccaatgctggaagacattgatgaactgattggtgaaagtattttcggtatgatttggaaatatatcgtaagtcgtagacatagcacatttttttttttcaaactatgtgtaaaattcttcgtaaagacttgggcaaggtggggctggagagatggctagatggttgagagaacttgctgctcatgcagaggactgtggttccctttctaccatccacatggcaactcacaagtgtctgtaatcccaatgccagaagatccaatgccctctgctggcctctctgggaaccaggtatgtacatggtacacatgcatacattcaggcaaaactttcatacctataaaataaagatacataaatctttagtaaattcttgggccaggcaacatggaagacaaccctgttgggtttggatgcacgttgttgtggagatgtttgtgtataaaccttagccacatggactgatgcagttagactcagaatgagaatgttaaatatcaggtggttccagaaacctaccagatggttgagctgtgtacctttaaatagcaaaaggaatattgaaaaatgaatagtatcacagactataaaacttaaaagaaatcattaaaacacattaaagaaaaatattatcatagagacatttgaaactgagaccaaggaggcaagcctgaaactggcattggtttaactagggactgattctggggattgttcctttcaaatgttggcttaattataattgaagaacaacagccatttatttatgtggtctaaagagggaaatgctggttagaatagaaatggcccctacagactcatgtgtttgaatgcttggtccatagggagcggcaccattaggaagtgtggccttgctggagcaggtgggaccttgttggaggaagtgtgtcactgtgtgagtgagctttgaggtcttatgtgaccactgtggctcacagtcacttcagctgcctgggggtcctgatgtagaaactctcagcttttcctctagcaccattctgcctggatgctgccatacttctgactatgataatagccaaacctctgcaactgcaagccagccccactttcatgtttttctttgtttgtaagagttgccatggcttatggtgtcttatcacagcaatagaaaccataactaagacaggcggccattagaaatgggatatgaattaaccctttctttgcctggagagctttttgttcagtagtattcgctgaattcttaatatatgtcaggactttttttttaaattttaattctaattcttcacaacaacctgctcttacagatgaaaataaacctcaaaagtgccttcatcacttcgacagtcttaccatgctttttgtgcatgaagcccaacattccttctatcttactgcattggcctcctacccctcacatgctgaggtctaagaaagagaagagctgtgacttcgagagcctggctctcttatactaaacacttaccatgaatggatatgatggggaggggtctctgttttcaaattaaaaaggtaaaatcaatgtgtgttttaatttatcatagataggaggatgaacagcttgcagtaggggtgcaaatgaagtctagagcctccctgactacgcatctcatgactgccttgagtcaagaaggaactggctgccctctgctcagctcaccatttgccacaactctgaccattctacgctctttacaagttcatatcctaaaggaagggggcatctggtcgaattaaactacaattctgctagcttgtgatttcctgatccctcgaggtggctggaactggagatgagaacattaatgagaaacactaacagtcccattggcttccagggacagtacatgacagcctttggttcttgcctttggctgcatagcagaatatttcaggaagctttgaaagttattgtcctggatatgctggggatcagctgcctcagaacttggttgttagtcaccctgacacccatcctcatagaggtgtagggctccagtatacacccagagctgatgatcctaggaaatgtttgaggagatagtttatgtatctcttgctttttttggtactttctctttcccaagcaacacagctgggaaaagttacagctgtggatttaaagtcactgtttctaggagaaatggctcccatatgactcatttattaatttttttaggtttttttttgtgacctgactagtcttatgtcaacttgacacaaactatagtcgtctgaaagaagggaacctcaattgagaaaatgcttctataagacaaagatttagagccgggcgtggtggcacacgcctttaatcccagcactcgggaggcagagatgggcggatttctgactttgaggccagcctggtctacaaagtgagttccaggacagccagggctatacagagaaaccctgtctcgaaaaaaaaaaaaaaaaaaaaaaaagatttaggacattttcttaaatagtgattgatggggaagacctatcctatcatgggtgctatccattcctgggctagcagtcctgggttctataagaaagtaggctgagcaaaccatgaggaacaagccagtaagtagtacccttcccatggcctttgaatcagctcctgcctccaggttcttgctcttgtttgagtttctgtcccgacttcctttgatggtggactatggtatggaagtacaagccaaataaactccctttcctccccacttgcttttggttgtggtgctgttttatcacagtggtaataactaactacgacagaagtttgtaccaggagtgggtattgctgtgacagatatgaccatgcatttgggaagagtgtggaaggacttttgaaactttggggtagaaaagccattgagcattgagagctcaggtggactgttctgtaggaacttggaagataagaattctaaaagcagctgggaggtggtggcacacacctttaatcccagcacttgggaggcagaggcaagcggatttctgagttcgaggccagcctggtctacaaagtgagttccaggacagccagggctatacagagaaaccctgtcttgaaaaacaaaacaaaacaaacaaacaaacaaacaaacaaaaagaattctgagagcagatgatggaggcctgactcttgaagtttcgggggtgggggtggggcaaagactctactgggccatttgagttaagaatctgttgtatctggttacctggagctgaagagtcagtcgtgattaacaagagactggcaacactgaaatgaaacttttgagttctatgattgatagaagagggccctttctattgtgggtggtgttatccttgggctggtggtcctggttgttataagaacacaagctgagcaagccatgaggagcaagcaagtaagcagcatcccttcatggtctcagcatcagctcctgcctccaggttccagctctgtttgagtttctatccttagttctttaatgatggatcgtgatgtgaaaatataagtcaaataaacttttctttccaacttgttttggtcatgctctttcatgacagtggtagtatcttttactagggcaccccataaagtcaggagaaacaaaagtagagatgtcagaaacatgcaggcattacccttttttggttagaatatacaattctatgttatttatattatatatttttaactttttaaagagaaaaggagaaagcttgcatttcgctctcatttattggtgtggaaatcatcttacacatgggtccagacaagaggcatctttcctgtagccatacacgttacttatgaacggctcattttgaagctatgaatttgtgacgtgtaccacacacagagtcttatggagccatttcgttcaagagatggagatggtctgaaaaaagagcgctgcatctgaaggaggggcattttctacactgtaaagaggatgctacatgactgggcttgggcttgggtgggggggggcacactgggaagacaacgaaaactaaacagtctcaatgaagtgtgggcttgatagaaccatgacaaaagtatctacaaagggaagcatagattaaaattcttttaaaaacccagccctcgttcttagcctgactttacaggtgtacagggtgattcgggtaggagagagatatgagctgcttacaaggctgttaagtgacaccctggctggacttgggctgaaagggtagaaagaaaaacaaaacacaaaacccatcaaacaaaaagcccatcacacggaataacaacctgggctgagcagggaattggaggtaacgaacttttgccgcccccaccagtttcttgttgttaggggctgagtaatgtgcacaaggctgttagcagcagagtctggtgtacactgcttctgtgattcgaggacgagaaatggacctgcctccccagcggcctttgcccaaactggagcttcttacgatttcctctttgattcatcaacggaatttctgtcgcagctcgcgcagtgatcatcaaacactggtgttaccaacggcctccttgcaaccctttactgctacagagggaatggctactgcccctgctgaaggaatccatctccaaaataatgagagccaggcctcagtggctcaataaaaagacagcttttccctgtctctagttcttcaaacacctgtgaaggtggtgtcctttctgcacctgtctgtgcgtcttcctcaaagcaactcagagcaaagcgttgttttaagaaatattttaactacagatcttacctctcccagcttccaatgttgctctcacgtaaagtcaaggtgcatgaatacactctctgaaatgtcttcaaagtttacactcagctggcctggtgttccttctaacttttctctttggtacctctgagaagccagggaccttcagaaacgcacgcctcagaagagtttccctctccctatagaactaccacggtctttaggctgcacatcctttctgtgacagatgaagtgcctactcatgaaaccatcttgcaggccaagcagctgagactctgtgggagtctcctgagttgtctgctgttgcaaggtcatgaacagtactccctgccgtgtcttcaggggggtctccttcctctccgtagctatattcttcccttgatacttatgtctttgaaataggattggggaaaacaatcagctttcagatcatttcctctgattattttcttgatggaaagcaaaccgatactcttttccgtgtgatggctgagaggactcccggagtggagttattttcactcttggacatgtgagtgttagtatcccttcagtttcttccagacccagtcctggaacacattgcacttaagggaagtgacttggagaagtactgaccataaaggctctgtctgcagttttaaaattgtgaatatttagaggtaaatcattttgttatcattgagaatagtttaccttaggagatatgaaaatgtggtgagacattgaaactgggattccctttgccctgcttcgtacagacaaatgcaaggtttctttactcacacgcccagcagagcttcgtctcaaagctggtggacatctgcttggtcattttctgtggcagtggaggagggagctggtttcaaaagcattggtttagcttttcctacagttctctgggcagctgtatatttttgtctgtcataagaccacaaataggaataaatatttcataaccatttagtgtggttttccgaaaattcaataagtcttctaaaatgcaagtccatggatgtctttcaggttgctaggacaaatctattaaagctcagaacataaaaatttataaagactgagcatttactgtgtgcttatgtaacagaattttatggcttctgcctttattttaaaaaagccaatgtggtgcgttttagtattcatccaccctaattttttttatttgatatgtcatttccttaacactattatagatggcccaaaggactcctcccttcaaacagaagcatgtgtaagatgctcatattcttttccttacataatgacagaaagcagacactgcagaatggatcatgtaggcatggagacaggcctcgcatccatctctaacccggcagttacacagaggtggcagctcccggaaatcccccctgcctctgtccaaactgttcattgcctctacctgtgtctgaggacccggtgaccttatttgctttttcctacaccattttctaaccttcccatgcaactcttaaagctttttagggtcaagtaagtactcttatttctttgtaaaaaaaaaatgcaaatgcttttttcccccgtactctaaatgactgagttcccatatggtcatcttaaaatttttcttcttaagtcaggcagtggtggcacatgcctttaatcccagcacttgggagacagaggcaggtggatttctgagttcgaggccagtttggtctacagagtgagttcctccaggacagccagggctacacagagaaaccctatctcgaaaaaaaacaaaaacaaaacaaagcgaaacaaaaattccttcttctcttcctataagtgacattagcataccatggaaaccataacttctaaatcatatttcagaaaaatactaaaatatattcataagcactattaaattagcaaataattcacagaaactcaagagttaggagttggccaatgtaaactgaattttggtggtttgaacttggatcaaaatttgacattttcaaaacagtgcagtgttgctattttagttaaattccatcatagacaacggactccagagtttctccttattgtttgtggtttcggttaaatagcatttttgcggtctaggattcaaacctagggcctcaaacatagcaggtaagaattctaccacagggctatgcccccaggcctagatcccagttaatataactcaaaggttgtgcccaattaagtcttaaagctctctaaaagtccctattatttcagttcatgaacggagaccatgctattggaaaggaagtgggtttctgactctaacactgccttaaaccagtcagcagcctaacgttcacatatccattctctgtaaaccaaggcagtgtgagaggatgctaacgcacactgtttcccagcatccgcacagtggcttcaaaggttacagcaggtaccacgagacacttactgtgcacactgtgcccactgtagaatagagagctctgaggagaagcaggaaagaaatgcaagagcactgtcagtttgattaatgaagtccaggaccaacgatcatctttcaagggagaaaaatgtctacagatcagctgacgttaaggggctagccaacagtagtactatgagctggttcttcctcctcctactcctcctcctttttctgccttctccactttctccttcacctcctctttcttctcattctccttttcttccttctcctccttcattattattatcatcaacttactcttattccttctccttctctgttccttcttttttctctcttctttccaatctccttccccnnnnnnnnnnnnnnnnnnnncctcctcctcttcctccttctcctcttcctcctcctcctcttcttctagatgcctggactggaaccaaaatctggagtccaacttttgccactgacttgatgttgtggcatagccaccatctcctcggcctcagcatggctgttcaaagcctgaggaaaatgcttggtgctctccatgagggtatctgtggagacagctaagcccatcctgggcagacatccattttggagattttgtaaccttggtttgtcctcttctttctatgtctgtttgaggaccttcctctcaaggctcctcacattcttttgccattcaagtaatggtgtaatcggctattgaccttgtttactttcgttgccacaaagcacttttcagttatgaattttaaaaagtctgtataaataatacttagttctctgatgagagaactgaggagcagagaggattagcgacttccctaaaatcacacagcaggaaggtggcagagttaggattagaaagcaggttgtttaagaaacattttaattaattatttgataatttcatacactgtatcttgaatatattcacccccttcccaccctccaatcccttcccacccaactttgagatttttctttttaaccccagtttatgttggctagctagtcttgagagtgggacctgatgtagcatgtggttgatttacgattattaaattgtatttacagttaatttgattttaaattattaaattattattaaagaaatggactccccctcctagaagctcttgaatgccaatcgcttcttctgccaatgttggtatctgccaggatttggtgtggctggagctttggtggggtttatgcaggttgtcgctgttgctgtgagtttatatctatagctgccctgttgtatctggaaaacaccatttcctttatgtcatctaccaccatggctcttacaggctttctgccccctcttctgcaaagatccctcagccctggctggtgtgtgtgtgtgtgtgtgtgtgtgtgtgtgtgtgtgtgtgtaataggaatctcatttagggcttagcacgccagtgtcttgttctcagcatgttgaccagttgagggtctgtgttctatctactgcaaggagaaacttctttgatgagagatgagaaatgctgtgatctatatatataataaaaagttattaggagccattttaacactatatccatttagccaaataataatattcagttctacccaagggccctggcctatatttagccacaggaattaagtctttctaatcctcatccagattaatctttttcatattagtggtatttttgataatgtgatgaaagctataaaccatttcatatacatactcataatattttgtgttctatatcaagagacgctctcccacccccaccccaagacagtttctttgtgtatccctggttgtcctggaacttgctctgtggaccaggctggcttcaaactcacagagatctgcctctgctaaaatgaaaggtgttcacctcccagcttcacaattctcttaaccccatttgcagaggacttcgagttaaccccagtatgtcatatcattctactttttcaggtccctgatttcaaaatgggaagagctagaggggcggggagaacacagctgattgcattgtgctgtgtttagtagtatatagacatgtgggcctttccgttatatttcttcttctacttgagcatcaggggctttgagaaagccttcattcctagctgcaaagtgagattaccagagagcctcaccttacaagaagaacttcttaccctggggactgggcaggagggaatgtgaggccagccaggctgacaagagaggccccctcgagaaacaaaatgcttaattaatactgccctctacaagactttctttctctacttagagacggaggattaatggtgaatgaagaaggctagtcatgcattggcttgcattcacactgagaacagacaccagggcttttacttgttcatctattttatgtgcatgtgtgtatagaagtcaggggaccgtgtgtgggagtaggtcctcttcttctagcatgtggatgacagggctggaactcagcctgtcatacttggtgacaagagcctctaccaggtgagctatcttactgcccacccctttagtggaaagcagaactctagcttagaaaatggagctggaagaaaacagcttagcagcttctgaaagaacctttacctaaacaccatggtataaaatgtgtgtcttccttgctttttttcttctttttgtttatgtcttgtttggtttgggtctttaggacaaggtctcaatgcatcctcagctggctttgaatttattatttagctttggatgaccctgaacttctgatcctactgcccccaccctctccccaagtgttaggattaacacaggccctgctacctccaatgtatgcaaagctgtggatggagcacagaaggctgtgactactaggcaaccatattaccagctgagccatgcccccaaccctaaaggtcaggtcccaaccatgagggctgtgactaccatggcaatgaagggtattctgaactctagtagttgtcttgtcgagtgttcagtgtatactgggatgtcccagcctgcttcctagatgatggctcatttagtacaagctgccttagagatttcaaaagcaccctgagagaatgagactcagctgtcagtctcaacagctcacaatggggattcttcagtctcccaaagggttgtgattcctggtttcctgtcatcccgagtgtcagggtgaccaagagcaaggctgagtggaactgcttgcgtatgctgatgcaggcctggttcttatggtctggtctctattacttactaggaattagacaccaaacagtacgataacttctgtgagtcttaatatctttagttgtaaatatcttacttggaaggctgttgttaaaaccaagaaggaccattgtgtaaaactctgaaatttctcaaagatcacataaatcttagtaaatataactgtgacagtttcccagccaaaacactgctgccactcctgtgactttagttaataagtgaatacatggatacatgtgctagattagtggcaagtatatacgctaccaatcatagttagactcctatataatttactgatagatactaaaacacaacaaaattatccttagccatgcttaaaagaagcaggctatttattgttcgaaattgtggtcaatagaatatgataaaaataaacctgatttcccatcaagataaaaacaaaacccacagaacactgtgttcctacatcagcgtgtgttcacaccaagatccctgtacacagtactggttgtctctaagtcttcctcagcattaatgataatgcagtttttaatgttagcacctaaaacatcatttccatataacaaagtgcattggtaccaaatgtttcctctttccttaactctccatgaaagtttttggtttcccactaaaaagtgacattgagaaattcctttatggctttcttgtcttgttttgttttattttagtaggaatgatatagtttgaggtagggagatcgctcagcaggtgagagagcttagctatacaagtgttgaggacctaagttcagattgccagaactgtgtaaaaagctaactatgctcacacatgaacacctgtcacctcagcagtctatatggcggtcgggggtcattagggcttgctggcccagcctagctccaggtccattgggagaccccacctcgagggaataaggcagaacatcacagagcaccagatatccttccctggttgtgctcatgtaacttcgaatgcacatgagcatacacacacacacacacacacacacacacacacacacacactcaaaatggaatgataaatttggaccaatgtagtcaactgggctgataaagctccttgtggtgtgtttggggagggtgtgaaggcatgcgtgtgtgctgcacgcctgcatgggcttgtgggaggctaatctcaggtgtccttactcagttgctgcacaccttcagacaggtctttccattggcttcagtcagtacagcctcctcaattctgggatcactagcatgtactgccacacccgccacacccgtgattttctgtaggctctggggatcgaactcaagacctcccgcttccaaggcaaatgttatactgactgagccatctctccagcttatttttcccttccttttcctcttgcctctttcttttccttccttccctcacccctctataccatcctgccccctttcttactttttccctagatactgaggtttgaatttggagccttgttcatgccagacaagcgctgaattaactgagcgatgtgcccagcaccaggaagcttctctgattccggaatctctaatgaagtattactatgtttcatttctaataacccaagctgagaaaaccacaaatgaaaaaaaagagagagcttgattattatcttttttctcagctgtctaacaatctggcaatgaaaacctcatttgacggagaaaggcttcctatctgcaaacagatcagacttgggaaacactgcaacagacaacccagcccccaccccatgctttgtgtaggtcaaaaattacgttaactgttagctggtttgcacgattctcaagactctcttttaggctggctgctacatgagaaaatacggtgtgttgttgagttctccattttgatatactcaaagctggtaagtagaaaacacaagcttcctacttcccacaaatccattctgggagctgaataatttattaccctctcaggaaaaaggaccctgctgtcagggttccagcttctactttctgctccctcccatgatcctcctctcttcttcatctcctggggagctgcaacagaggacgctgctttcttggcatgctcttgtttatttgtgggcgtgtggactggtatctaggaaactttccaaggagcacagtcatgcacggtatggaaaccacatgcatacaccacaccctgctccccgcacagcagcgtctctggagaagtttctgttgactaaatctcttctgtatctcctggctgtcctctagatgtggtcccgattgctttttgttgttcgtggtgtttgtgttgatttttacatacttttctgtttataaagtaacacgtgaaatatctatgtctatctcaccatcctgtccagtagggtagcgtctggtcacatgcgattatttaaatttaaattaattaaaatgaacttaaactaacaaaaactcagttacatgctcaaacacagtaagggtagagcgtgtcggtctggactggaaagcccagagaccggcttctgcccaggggaggagccacactgtagagcaggctaacttaccttctctccatagttctactgtatcatacagggtcctttgctcttactataagtgctccattgtgttctactgcttggatggtccttaattcacttatctacggataaatatatagattgcttctattttccctgttttgaaaacaatttgactcttttttttgcatatttgccttcgtatacttatctaaatgttgaaaattggaattggtctacattgtccaattttggttcatatttccaagctaccctttagcaactgtatcaaatgactgtaattcctttggcctgctgtgagtcactgaactttgccatttaaactagagccattagaatacttaccctgtcccttactgggtaatcacgagatacaagtaatataaacatactaatactttaaaaataaaacatcaaggccatgtatggtatttatattaatttgtatgatagttgtaaggacaggggtgggaaccacgaatatgttgttatctagtttaacacaaaagaaagaatagttgtggagatcggggtaagattgcggcccaggagatttccttatggggtagagcctgtggctccagaatcattgtgattgtaggcataggcatttgctaataggaaggcagaactctccaaggacactgagagaagtgaggtgactttggttttggtgttagaatggagagaatgagatgacagaccatccaactattctgttctttctatacacaacacaagactccagagacatgaaatgaactagtggggctcattcctagcaggtggtggaacccaataccccgacttcttactgtctagtcggggtctcctttagggtccccctcccaccaccccacccccattttgaagggtacagtcaggagatgattttactgtcttgaacgtgaaagtcatgctggtgttgggtaactgacatttacttagtctattcttgaaacgaatacttaatgaaggctagcgaggcacgtggaagtcggacctcacaatgctgcttaccagtcacttgaaacggcagcaggaatcctagaactgtccatgctgactctggggccaaacgacaaatcgcatctgctccttacaaatggcagccacgccatgtcaccttccttaggaagacgctctgtttttagttcacctcgaattttagttccctttaaaaataggaaatcaaatgactaggcagccttaagttatgcaggagattaggagtagcctgtaaaaccagccagatgtccaggacctccaggctctgtctgaaatggcctcagaatcccttccagggaggctgtaactgctagacttcttcacggtccctcttttcattggaatgttcaactttaaaattactttctatttgttctgtaagaatttcacatatacacataacatatttgatattttcatttcctactcttccctttacctccctccagatagatctgtcctcactcctccccccaccccagcttgtgtctttttttttttaaataactttggtctaatttgtgctgctcatatactcatgcatgtggggccttccactgatgtgtggttgaccagtcaggcaccatagccttaaagaaaactgagtctcttacccacagaagccctcatctgtcaacagtacctcagctagaggtggggaccacactctgtacatctccaggggttgacttaactggaggggcaaaggatgaagaaatcacaaacacacagacacgtaggcagagaaaacctgggatggggtggtctgcgctctctgatggagaagctgcagcatcatgggggctcagcatgattatttatataagggaggcaggcattaagtagagaggcagggtgattgcacatggctgaataaggaggcaagtttggctaatcttggtaggaacagtttctgtagtagagcagtcgtaggtcataatcatgggagtggggaagctacaggtgggcattgtctgtatatattatcaacaaccacactgagaccagagggatgttctgctatctggctgagccttgcccagggaaggcttcgacacttccaaggttcctttgaggctccttgacacggctgtggccacgtcaacaatgtcagatgggggactgtgagtcctcccgactctgtgctggactggcttgatcttgtgcaggtcttatgcaggcagtctttgctacagtgagttcatgagtgcaacagtctggtcatgttccgaagacatgatttcactgcagtcttccttgaccgctggctcttttctacgtcctttccacggttggtccctgagccttgagggaagttggagtatgatacagatgtcccacatgtgactgagcgtgacacagacatctgttctttacacctttactagccgtgaattgttttacaggtccactagctgctagaaattgatcttccaatctcatttattcatttatttagcatccatatgtcctaaattatagctgagctcttaaccccggagctgtcagaacccctccagggaatcctgtgctgaaatcaaagagagagtgcctggcttttgcaggaaaccaaaggcctctgaggtttctggatggagagcagcttctatgactcctgcagaggaaggctttgcatgcacagcagtacttggtcttaaacttgctaatattttcaactataaagcagtagaaaacgaggtaacagaatgctttgttccaccagaccaaggtgaaaatatgtcaccgtggaatattaatttttatataaaattaaaaagttaaaaaaatttgggggcatttaatttgataaattgctcattatttcagatttatcttttttaaatatcttttcagttttagaaacacatacttagagttggtttgatggctcagtgagcaaagacagtgactgccaagcctgatgtgggagaaggagagagggtttccacagggtttcctctgccataggtgtgtgggacaatcacacacacacacacacacacacacacacacacacacacacgcaagggagggagtttgaaaacccgaatagttataatattttcccaatatcagtgcttcctttgtgttcaattgttttcttctgttcattttaaaatttagaatgttttctagaacattcatccgttcattttatagtttgatggtttggagggaaggctgcatggagataccgtctgtgcttttatccaatagccatcagcatagcttgtccccaacccctgaaactcccccttgaaattaattagaaaattagttcacctgccttctccatcacttctctctctcttaagcaaaactaattcacttcaaaatgtttttcatttgtgatattgagccaggatggggatacagtaaaaccttattgtctttgctccttttatctcctttggtctgctctgatttattgcttctgctctattttcaagttgtctagcacttgcaacctgtcccaagctcacttttaaaatatatacaagcaaaccctaaacagatggctctgttgatcttctgtctgctgatagcaaatgggtttgtgtggaaggccactgacttcagagaacctccctggtgagagagggtgacgaaagaagggatttgctgtggtccttacatttacttagggtttttttttttctgattttatttttgttttatgggatagatatacatggagaagggcagatctatgtgcatttcaggatcatagaaatcactaagatttgataaatgcatgtgtgtatttagtacagcttgctatcagtagtccatggcgatctgcctgaatatgattctggtgccttcnnnnnnnnnnnnnnnnnnnnnnnnnnnnnnnnnnnnnnnnnnnnnnnnnnnnnnnnnnnnnnnnnnnnnnnnnnnnnnnnnnnnnnnnnnnnnnnnnnnnnnnnnnnnnnnnnnnnnnnnnnnnnnnnnnnnnnnnnnnnnnnnnnnnnnnnnnnnnnnnnnnnnnnnnnnnnnnnnnnnnnnnnnnnnnnnnnnnnnnnnnnnnnnnnnnnnnnnnnnnnnnnnnnnnnnnnnnnnnnnnnnnnnnnnnnnnnnnnnnnnnnnnnnnnnnnnnnnnnnnnnnnnnnnnnnnnnnnnnnnnnnnnnnnnnnnnnnnnnnnnnnnnnnnnnnnnnnnnnnnnnnnnnnnnnnnnnnnnnnnnnnnnnnnnnnnnnnnnnnnnnnnnnnnnnnnnnnnnnnnnnnnnnnnnnnnnnnnnnnnnnnnnnnnnnnnnnnnnnnnnnnnnnnnnnnnnnnnnnnnnnnnnnnnnnnnnnnnnnnnnnnnnnnnnnnnnnnnnnnnnnnnnnnnnnnncaccaccaccaccataatcatcatcatcatcatcatcatcatcatcatcatcatctgatttccagcaaaggtgacagaaacatgttggagaaaagaggatctttgccgcaggggatgctgggaaccctggaaattcacaggagaaaccaaactcatgccccacttcacaccctgggaaaaataactcaatagaagccggagtccttgataaggcataacttttcacgttagagaaaacccttgatgatacagctgcaagcaagacctttctgatagctcaggagatagtggagaactgacaagcaggattgcatcaagcttcagccattgaagaaaacagcaaagagaagggcaggctaccaagagactattcattcgatgagataagcttccagactatctcactgggtatgacatcatgggctctactactctctggaactgtgagccccaaattaaatgctttcttttataagttcccttggacatggggtctcttcacagcagaaatgtaagatagatgggtgacgtcctgtgagactcatgtcagctaaagtaatatttcaaaaacgtttttttgtctgatggctggaacaaaatgcctatttcaactaggtgctttaatttatctgtgggtggaaaacaggactggtcttgaccagtgctggagaattggatcatgtccatagacctcaaaaataactcttaatggactctcaacttctttgatgctaataattataaacattttaatcaaataattatcttacccaagagagggaaataacatgtactaataaaaataattgaatgtaaaaataatgaatgatcttcaatttgagatactcaaataaataatagctatcaaactacttttagaacttttaaatgcctaatgaaaactgcttatttatccttgatatggcttcacaggttgactttttcttgtttcctggatctatatcatggtagaagtaattaacacttcttatgttggttgtggaactctgagctgcattatatttttcatagattaaatggaaaaatagaatagttttcaaattaatttagtttactcatcaggcacagtcttctaaaccaattgtttcattagaggaaaaggttggccataatgagaaagctagccaacgacgtttctccacgaacaccagattggagaaccactgggacagtgtagttaacggaacattttcacccaagcgtggctcaggaagtgctgtctagaaagggtgggcctcaatacagaagcactggggctagatggagctctggtggcaatgccattttttactagtgtccaggtagaccgtggggacttcaactcctaccatagctattccactgaataacctaggtggctctgccatggaggggtagctcacaatcaactctttttgagtagctggaagttcttaatacggtaaatctgatagaagcatttccctgggggagtgtagtcttcaaggcactgcaataggtagagcttagacaaccctcgagctttctgtgaatttaggaccagccttaggacttccacacagcatgggagaggaagtcactcacactgacaaatgcctgtgtggtgagcttcagggctaacagacacctgctgacactgaacacacaggggctgtggtctctgcaccacatgcctttcatgtgttgtaacgatgacatttctggagtgtttgtgtccacattttcatttttgttcagaggtcacacactctaatgatacaactaggatttaactctcatcatcccaaacagagaacataagcatctcttcatttgctgccggagacctcttgagacctccttcccaacctagcaagtctgaactggtcatcgcagcagcttggttgcttacttatttgtcatttcgggatgctgtcagctttcctatggttatcttctagtggccaaaagtcacatttcactttatctgtctggttgagaattcactgttgtgaatgaaaatcatggaaaattaactataactttttaaaattaacttgctcagaatgacatttttttccattttttattaggtatttagctcatttacatttccaatgctataccaaaagtcccccatgcccacccacccccactcccgtacccacccactccccctttttgaccctggcgttcccctgtactggggcatataaagtttgcgtgtccaatgggcctctctttccagcgatggcggactaggccatcttttgatacatatgcagctagagtcaagagctactggttagttcataatgttgttccacctatagggttacacatccctttagctccttgggttctttctctagctcctccattgggagccctgtgatccatccattagctgactgtgagcatccacttctgtgtttgctaggccccggcatagtctcacaagagacagctacatctgggtcctttcgataaaatcttgctagtgtatgcaatggtgtcagcgtttggatgctgattatggggtggatccatggatatggcagtctctacatggtccatcctttcatctcagctccaaactttgnnnnnnnnnnnnnnnnnnnnnnnnnnnnnnnnnnnnnnnnnnnnnnnnnnnnnnnnnnnnnnnnnnnnnnnnnnnnnnnnnnnnnnnnnnnnnnnnnnnnnnnnnnnnnnnnnnnnnnnnnnnnnnnnnnnnnnnnnaatctgctgataagcctggtaatctgaatttgagtcccgagtaccatatagtgaaagaaagacttgcctcccacaagctgtcctctgacttctaaacatactgcaatgtgcaaatggacacagacatgcacgcacgagagtgcacgaatacaccccctaaaaaaataaataaaactaaatgtagagggaaaaaataatttaaaaaagacggtgcctcaggttaagacgtgatctgtgggtgctcacaggaactcagagctgtaacgctgccttgctgtaaacgtaaagaaatttaagttttggtgcattggtttctttttcagaaaacaaagataaatctgactgtaaaattctcagacaggaaaaatgtcactactgtctacagaagacatcaacatggactgctgctgctatactttcttcatgtattcttttctagagaacttatttctatcatttaaactatgtgtaggtgtgcaggggcggggggaagcatgacaaaggcatagtatagatgtgcacagaggccagagccatccagtccttgagagcgttacaggcagttgtgagctgcctgacatgggtgctaggaaccaaacttgggtcctctggaagagcaacacatgattttagctattaacctacctttcaagccccttccaggttattttttgaggaaagcttttaaaaatattatttgtaattgcaaatgcttttaaaagtgttattagtatctacagtaattgtaaagaaaatgggcaagagaagatattaattaccaaacaaaattatattttaaaaagagacgcaacatactaatgtatttgcagataaagaaggtataccagaaagatatgcccacatccatggaaatgatatgaaattctcctgatgaagccaaaagctactaagaaaatggtttaaattatgaaatgcaaacaggagtaagacttggaaacactcaggctaagaagatagctcaatgggtaaactgcttgctgggtaaagtgtgaggacccaatttcagatccttagcatctgaagaaagccaagcacaggcctgtaatcccagcacataaaccagaggctgaataaccccaggggcctcactggtcagctagagtagacgatcagtgaaccacgggttcaatgaaagagcctcagaaaataaggtagaaaatgatagagggaggatacccagggccagctttggcatcagtgagtttattcacaaacatgtacatgcacacatatgtacacacatacttgaatttggacaactcaagtttccttattaaagagaaggaagatctttaaaatcaggcggaaaaaaaaaaaaaaaaaaaaaaaaaacctctgaaaattagaagtaagctcggtgtggcgggtgtgtgcctttaattccagcaccccaaaggnnnnnnnnnnnnnnnnnnnnnnnnnnnnnnnnnnntttctaaattcaatgttcgctaggtctacacaacaagttccagaccagctggggctgtataatcagacagtatctgaaaaagaaaaagaagaaaaaataaaagaaagaagggaagagaaaggaatgaaggaaggtagcgagggagaaagattgaaatttttaggaaaggagcctaagctagaaggaaagaacaaatgcacacgagcacagcaggggataacttagggatgctggactcgtaacagctccaacctggagacaacccagatacccatccactggtaaacacacacacacacacacacacacacacacacacacaaatacacagagaggggtgaaagggaaagagagggagagggggagaaggagagagaggaaaatgtctcccatatagaggacaagaggacctactgagaacataacaaattaactacttttgtgtacagtcacattgatacatcccaaagcattatgttgcatgaattacataaagcacaataaaaactgcgtgctgtgtgactccatttaaatgacattctaaaaatggcaaatatctaggggctgaaaactgtggtatgtatctcggtcttgctgctgtttatcttcaataacagttgccaaactctacacttaagaagataaattatattgcatgtaaatcatgtcttagttaaaaaaaaaagataagaggatttgagaaaaagtgatcaccacaggcgtacggccaggaagtttgaacttgtgcatctcaggcaccttggagaagaagctgcggcagtgtggtcccgagcaggaagtcgcccaggctcacgaaagttcctcaaataaggctgtaggtgactgaaaggcaagccagtgattcagctgttctggagtggagaccacagtcacacttgaaggaaattagggtatgttgttcctgtgagtggttctggtgggatcttttgtaatcagaatgactacagagatccccacatccatggagcatgaagctcgcagtgaattcttctcgctaataaaatcacgaacgggaagacatcatatgcaaccctcttgccaaaaccacacaccaccgtatatcaatcattctgagaagggtggggagagaggaatgaagaaaaagaagcctaaccacaagcaagcctccagatctgccagttttcaggagaggggattgtgctaaacaattcgagtacagtaagcaaaaaaaaaaaaaaaaaaaaaaaaaaaaaattggagtctgggaaactttgcagggcatacaagcctgttccttcagcagaactccaggaaagagaattcagggatagagcaaatgtgacaatagaggtaagaagaaacgcattaccactcagtggctgtacccctttttgggtaatgattaaaaatataaggcataagaacacgacagttgagagagtgcaggcagtaatttatattttaacactaaggagttaactttaaatggaatctacagtggcattgtggttatagttacaaagcaggcagggctcttgtgttttagctgtctgtactgcaatcccactgtgtacccgctttgcttaccagaaggcttaattataattgggggaactcagataaagtgggactggctgaagaccccatctgatttgctcagtgatggattcatggaagcttatgattctttcttaccctgcttttatatctttgacattttccagaatgaaaactttttttttaaaaatagcattcatataagacttctcacaaacctgtaacaaaaacgttatcgtccacatagacaggaagtgttattgcagaggtgatcattggcctcaaacgtggaggcccatcctcagacaccctgtcttaccgctgcttgtttgaccgtgttatcttcaaatcagagatgggcatatcatgggttggctttctcttcccagtgctctgacagccagctgtgagccctgaggtagtgacactcctttcaaccggagccctccgctcccttgactcacattgctcaactctccatccatcaccacagatgaaaatgccctgcttttatttgcttctgtttccccctctcatttttgactttcttctttctgtcccgctgccgtgtctccctgaaccccttccttcacttcgccaagtgacttgtcgcctgctggctgtgctctggacaccatctctctgcccctcccacactagtgatggcctctctacctctccaagcactggattcggcaaaggaacctttcactgggcatgtgcagagctggaacctgataagaacgctcataattacacgcttattgttggggaagatgctggcatcttgaatgccaaggacattgagaagaaatgacatcagaaaggctagttttataccccaaatattccatactctatactcctggaggagtgccaatcttcgtccctatatgccttgcttcctacccaggaaatgagtacactgaagccttcagcaacaacacatagatctttcaaggcacacggcattaaagtggaagatccttgtgggctgggactttgctgatttgggtttaggcctctgtgtgtagatatgctgtggctgcaagcttctacaggatgttaaacacttttgctgaggtccagtggatgaagatctttgctggctcacccagctgcagtgccacatgagaaagtgtggtttgaagcagtgggtttttcacttttggtgtactttgctgtcttcctgcttctgaacattgtctttctcaagtacctcctgtagacactcacgtttcttcctccttatcaaagtcctaccatcaacatgacaaccttcaaagactcaccagttccccagtgccctgcacggcagttgggcaaaatcctttgctgaaaaattttcacattgttttcatcaacattaatatttctagatatccatcgcagaccatcagtagtaaatagctcttcataaaataggaatgggggtcctcttgctcctgctcttgccttcctgttcctgctctctcgcttttcctttcccccctctctccatgtgtgcatggccagcctctacttctctctctgcctttctctgcctctacaagcctttcaactcccctacccatgccctgaataaactctattctatccaaaaaaaaaaaaaaaaaaaaggagggctggagggaaggcgcacataaataaaaataataagtcttttaaaagagagaaaatgaagggactaggggaaagggagatggattgtcttgcaacccttatgaccagagttccattcccagaacccaagtcagaaaaggtgggtatggtgctgtgcctctgtaataccagagtgctatggcaagaagggaagtaggggcaggaagaacgtgtaagaactcacgtatcaagaaagaccctgattcaaaacccaaaaaaactcacgacagcagaggaacaagattgagtgagagaactaaacctctgtgacatgtatttacatgaatacacacacacacacacacacacacacacacacgtgtaacgattgctttcaaccctgtagtgatgttactggtaggcttattaagcaggcattccactagcatgcttgctgatccctcctctattctgttaatcctccctgactcatgggttttactgcgagaactaatgcaacttcgtgaaattgctttactctgacacgagattttgtgccaggaaatcatttctaggcattgtctgatcaagttcatcaacttgctacaaagtagcccctgaaagcaagagagggctttgagttgctcccaatcgccaacactgagttttagaacctcctttgtatgactgcactgaacggtctttgtgacccataatattatccaagtaatttatgaagaattaaaaagcatacacgtacacattaaaaacactaatagattgtgcaatgtttaaattcccaatagattaatggcattctgcagtaaaaaagcctttaaaacatgtccaaaggtctaatataaacccaagatcatttggatttctatctgtaaaagtgtggcaagatttagtgactcccagaaaggaagcccctggacaattggcattcacttgttctgcagcgccatctagtgttcatggagaaatgcgcttttaagcctcatcttcctcagccttgccttgctgctaagattatctatgcagatttctacctctacctggcagccaatgatgcttagagatgcttccaacttacataaccttatattaatttccacggtgaaggatcattgatcggtgaaggatcaatcaactaatgagaagaattggtgtatgtatcagtatgcatatgtgatgtattttatttcaagactactatctttatttcccaataaaatagcccatagatgctgggatttactggtttactttaaatttaattgcccttacaaaaaacatcttaaatggcaaaacattaatttcccaattattattatagcatttactatataatataacatataccacagtacaaatgtcctattaggtccggggactgtcttacataatattgctccctttatgcaacttccaaaaaattctttattgctagaaaaagctacaaagcatcatctggactctaacattcagagctttgctgccctaagtgtggttcctgcactggacgcttaggcagccccttggcagatgttagcgttgcaaaatgtctgtaccccactttgcctcccaaaccacacttctcacttatgatatcccagagtttcagatgtacataaaatttgagaggaacctgttttagaaatgtcttcccctcatgtgctcattggacagtagtcaaccaaaactggagacttccattacaatttcagatttacgatattttattcttggagaaagttacataacttccctgtctgactcgtggcttatttcagtgtatcatggttgttgctgagactcacacagcggctgaacaaagagagtacattcctcccctgtccaatctgtcatcttcatctctgcagaaccagaagctgagaggaactgccgactgtgaaatttagggcacgcattcactaccaaaaatatttaagtctgctgtgacagagtcatgatttgaacccacagtaggaggcgaggcttaaatcttcacagctgaagctcaaaggaacacttagaagtaaaaggagaggttttaaatcatggctttccttgggccttaattctctctctctctctctctctctctctctctctctctctctctctcacacacacacacacacacacacacgcacacacacacacctttaaacctagcaagcttcctatgaaaatcagagtatttacagccatccattcgcttctttttggctaatgttcagttggttcataatctaatactattccaaattcactcaaattccccgagacacttatctaaccatttcagataacagaatagacttcaaagtgcaagaaaatctctttacaggctgaggctagtttggaaagtattttaagtgcacaattatgataagccaggttcttacatattacaaaattttccccttttctaaaatctgggctaatagctattaaacatttcaaattaaaactcaaagtaatatattgttggttcatttaaaaatttcagaatttaaaagtaataaatggattggtccatagtcatgaaaattatcattgcaattaacgcatagttccacaagctaggctaaatcccattatctctgtggttctaattatcgaagggcttaaagaaagcagaagttatttgacccgtgactggccctgcagtctgctggtgagggtatacggtaacacatgctgcagcagaactcagatgtcctaaactgcagattatcatgcagaacctttcttgggttgtcttagacgtcaacagagaattccaaggtcacggccacgagctaggacggattcacatccccgtgcctctcgactgctgaatatattctaccttcctttgcttttcctgtaaatcctttcagcatccactggcttaattggggtgaatggagtctgtgcctcccactagggcaaatgtcttgattgaataattagtgttaattgacacaggcacctttgtccaaggtatgaagtgtcttcctagtttatttcattatctgtgtctttcttctccattttacgggatcctgctgacattgctacctgactggattggctaaagttaaagctgggcatgctgttgcaggactctgtttggaaacacagatattgcagagtgttaggaatcctggggtatgacctgggctaacaaattatgagctctaacttgaaaaatgagccttcaaagcataaagcttagaaacctttgttcttacaagaaatgtgacgtttgacgtttgtcacaggtccctaggcagtccatcctggacctggggttctgaattctgcattctgaaggtttgttgaggatgagaaaatgtcagaggaatctgaaaccagatcaagctgaccgattagccaaattatcctcgagcatctaccgtagaggcgagggcttttaatcaggagccctgaggtgtctccctccagctttggatcctctccagagagcagccaggaaaagctttcccagtgtggaaagctcccaggggagatgtggccatggtgggacaatacccaggaagggctcatctgagagccccagagtagcagcttggggagtaagagcctgagcagacaagcaggccaggccacaaggaggagagatacactagcattttcctacaagtgnnnnnnnnnnnnnnnnnnnntcatttacatttccaatgctataccaaagtcccccatgcccacccacccccactcccgtacccacccactccccctttttgaccctggcgttcccctgtactggggcatataaagtttgcgtgtccaatgggcctctctttccagcgatggcggactaggccatcttttgatacatatgcagctagagtcaagagctactggttagttcataatgttgttccacctatagggttacacatccctttagctccttgggttctttctctagctcctccattgggagccctgtgatccatccattagctgactgtgagcatccacttctgtgtttgctaggccccggcatagtctcacaagagacagctacatctgggtcctttcgataaaatcttgctagtgtatgcaatggtgtcagcgtttggatgctgattatggggtggatccatggatatggcagtctctacatggtccatcctttcatctcagctccaaactttgtctctgtaactccttccatgggtgttttgttcccaattctaaggaggggcatagtgtccacacttcagtcttcattcttcttgagtttcatgtgtttagcaaattgtatcttatatcttgggaatcctaggtttggggctaatatccacttatcagtgagtacatattgtgtgagttcctttgtgaatgtgttacctcacccaggatgatgccctccaggtccatccatttggctaggaatttcataaattcattctttttaatagctgaatagtactccattgtgtagatgtaccacattttctatatccattcctctgttgaggggcatctgggttcaagccactaaagtagtattattgctcagaaatgttcctcctctttcccactctcttcctggtggtgcgatcaatcccagtgcttgtacgctttaggcaagcactctaccactggactatattcccatcccaagtatgaatccttctctccctctctcctcccctctctccctccctccattcttcctcccccctctgtttttcttccttccctccctcctttccttcttcttcttcctttcccctgcaccctcaaaaaaaaacccaaaaacaaacaaacaaacaaacaaagaaccaagagccagacatgatggcctatcttgtaattccagcaccaagggagcaggaacaggtgaacttttatgagttcaagaccaacctggtttgtatagcaaggggattccatgctagaacatgctacacagtgagacaagatagagatagagatagagatagagatagatagatagatagatggatggatggatggatggatggatggatagatagatagatagatagatagatagatagatagatagatagatagattaaataaaagtaattaaggctgggagatggctcagggatcaagataatctgctgataagcctggtaatctgaatttgagtcccaagtaccatatagtgaaagaaagacttgcctcccacaagctgtcctctgacttctaaacatactgcaatgtgcaaatggacacagacatgcacgcacgagagtgcacgaatacaccccctaaaaaaataaataaaactaaatgtagagggaaaaaataatttaaaaaagacggtgcctcaggttaagacgtgatctgtgggtgctcacaggaactcagagctgtaacgctgccttgctgtaaacgtaaagaaatttaagttttggtgcattggtttctttttcagaaaacaaagataaatctgactgtaaaattctcagacaggaaaaatgtcactactgtctacagaagacatcaacatggactgctgctgctatactttcttcatgtattcttttctagagaacttatttctatcatttaaactatgtgtaggtgtgcaggggcggggggaagcatgacaaaggcatagtatagatgnnnnnnnnnnnnnnnnnnnnctctttcttcctgccttttatgtaggctgccagcagaatggtgtggcccagattaaagatgaatctttctacctcaaaatatgtagattaaaagttgtagcttcccacctcaaagatccagattagaagtgggcctttccatctcaagtgatctaattaagaaaaaaagcctcataagtatgccgaagtatttaggtttcagttaaatccacatgtagtcaagttgttgattaagaatagccatcccagggttcaactctctgcatccgaattccagatcttcttcttatgtgctgtacagagcggctttctatgccttgtttttctcactgtaaaatgatggttacaatgatagcttagctctcctaggactgtaaggaccattagattgactaatatctgtgaaatgcttagaaaaatgcctggaatggaaagcactatgtaaatgtagctaatatgatgggggagtcttggagtcttctacaaatgggtattaccatcgcagggcttagcctttaaaatgaatcttttacccagcttgacagacctagcagtcacccccactaaacatcaaaaaccaaccacagacttagcatgtaggcatatgctgagtattgtcatgtatggagtcttaaatttcctttttactttcttcttttatcttcttttgataatcaaaaagatgtggttttgccagtaatgatgagacatactatattctcagcactaaagagaggatcagtagtttgaggtcatcttcagccacatagcaagtttgaggctatcctggaatacataagacactgtctcaaaaatcaaatgcaatcaaaaaaatatgaggtctcagtattatcggggacagccacagtagactcaaatcatccccctgcatcagcctcatagttggagttatagcttcttaaattttgtcagttattaagagccagcattagtgaatgttgttgccaagaaatatcacatacatgttagtcaaggcaagctactgtgtgattgccatacaatctttcaggaagatattcccctcatatctacaagaccgttagtcattgtcaggaagatgagtgtcctttcaccaacagatgtttggacgattggataatttagtgagtgctgaggcaagaagtttccaagctccgtttggagtcaannnnnnnnnnnnnnnnnnnnnnnnnnnnnnnnnnnnnnnnnnnnnnnnnnnnnnnnnnnnnnnnnnnnnnnnnnnnnnnnnnnnnnnnnnnnnnnnnnnnnnnnnnnnnnctcaaggtgccagcggagaaggtagttgacatccatggggagaatatggaaagcgcacatgacacagacgctccactgagttggccagataggaagagaaatgactacggcatttcacagtgggaaacctgagggatagatggaggctggccacacagatacatggaggataatgggatggattaaaatagaagatgaaagaatttccttagtgcaatggccaggactttctgatttctcctgagctatcctatttggtacaggataaaattagtatgtaagagggaggagctacactcaggtcataaagaactaagaaaactagcctgaggggaggggagcgggatgcccatttttatttccatgaaaacttgctgtgttaaaaaattccctaacaatatggggtaaatgctttctgaaaaagaattctattgactcagttttagacctaagaacatgtggcttttactaagcaaatagcaacttcttacttggatacattttcagtattgcaagtagttgattttaaaagtcgtgtgtgggccatcaaggttactcagcagatgagaactcttgatctctggaactcttgtggtaggaggagagaactgacttcagcagggaagctctcttctctgtgtgtgctgtagcaacccgttcccatccatccatagtaaaaagacaaataaataaatggttcatttgttttaaagataattgtatttgttacgaagatggctcagtcagtaagatgcctgccactcaattatgaggaccaggatctctagcacccattatgctgtggtgggcacagtgtctgtaaccccagagctggagacacaggctcgtaggtcactaaagctcactggtcaacctgaattggtgaactccaagttcactgagagactgcctcaacaaataagatggaaaatggatgagaacagcagtcattgtcaacttatggcctacacacagacacacacaaaagagaggggaaggagagacaaagtttctagtattgcttcctcctgataataaaaataatacatatttttacaaacattttctatgacccactggtactattgctattttgatgaatttcctttttctaattctcatttatatgcattaagtctgacttaatcaaaattttagacattatttctttcttatttatttatttatttatttattttaaactccagattttactccccttctggtctaccctctaactgttccacatcccatacctcctctccaccccacccctgtctccacgtggatgtctccaccctccaccccaccccaccagacctctaaactccctggggcctccagtctcttgagggttaggtgcatcatctatgaatgagcacagatccagaagtcctctgctgtatgtgtgttggtggcctcatatcagtggtnnnnnnnnnnnnnnnnnnnnnnnnnnnnnnnnnnnnnnnnnnnnnnnnnnnnnnnnnnnnnnnnnnnnnnnnnnnnnnnnnnnnnnnnnnnnnnnnnnnnnnnnnnnnnnnnnnnnnnnnnnnnnnnnnnnnnnnnnnnnnnnnnnnnnnnnnnnnnnnnnnnnnnnnnnnnnnnnnnnnnnnnnnnnnnnnnnnnnnnnnnnnnnnnnnnnnnnnnnnnnnnnnnnnnnnnnnnnnnnnnnnnnnnnnnnnnnnnnnnnnnnnnnnnnnnnnnnnnnnnnnnnnnnnnnnnnnnnnnnnnnnnnnnnnnnnnnnnnnnnnnnnnnnnnnnnnnnnnnnnnnnnnnnnnnnnnnnnnnnnnnnnnnnnnnnnnnnnnnnnnnnnnnnnnnnnnnnnnnnnnnnnnnnnnnnnnnnnnnnnnnnnnnnnnnnnnnnnnnnnnnnnnnnnnnnnnnnnnnnnnnnnnnnnnnnnnnnnnnnnnnnnnnnnnnnnnnnnnnnnnnnnnnnnnnnnnnnnnnnnnnnnnnnnnnnnnnnnnnnnnnnnnnnnnnnnnnnnnnnnnnnnnnnnnnnnnnnnnnnnnnnnnnnnnnnnnnnnnnnnnnnnnnnnnnnnnnnnnnnnnnnnnnnnnnnnnnnnnnnnnnnnnnnnnnnnnnnnnnnnnnnnnnnnnnnnnnnnnnnnnnnnnnnnnnnnnnnnnnnnnnnnnnnnnnnnnnnnnnnnnnnnnnnnnnnnnnnnnnnnnnnnnnnnnnnnnnnnnnnnnnnnnnnnnnnnnnnnnnnnnnnnnnnnnnnnnnnnnnnnnnnnnnnnnnnnnnnnnnnnnnnnnnnnnnnnnnnnnnnnnnnnnnnnnnnnnnnnnnnnnnnnnnnnnnnnnnnnnnnnnnnnnnnnnnnnnnnnnnnnnnnnnnnnnnnnnnnnnnnnnnnnnnnnnnnnnnnnnnnnnnnnnnnnnnnnnnnnnnnnnnnnnnnnnnnnnnnnnnnnnnnnnnnnnnnnnnnnnnnnnnnnnnnnnnnnnnnnnnnnnnnnnnnnnnnnnnnnnnnnnnnnnnnnnnnnnnnnnnnnnnnnnnnnnnnnnnnnnnnnnnnnnnnnnnnnnnnnnnnnnnnnnnnnnnnnnnnnnnnnnnnnnnnnnnnnnnnnnnnnnnnnnnnnnnnnnnnnnnnnnnnnnnnnnnnnnnnnnnnnnnnnnnnnnnnnnnnnnnnnnnnnnnnnnnnnnnnnnnnnnnnnnnnnnnnnnnnnnnnnnnnnnnnnnnnnnnnnnnnnnnnnnnnnnnnnnnnnnnnnnnnnnnnnnnnnnnnnnnnnnnnnnnnnnnnnnnnnnnnnnnnnnnnnnnnnnnnnnnnnnnnnnnnnnnnnnnnnnnnnnnnnnnnnnnnnnnnnnnnnnnnnnnnnnnnnnnnnnnnnnnnnnnnnnnnnnnnnnnnnnnnnnnnnnnnnnnnnnnnnnnnnnnnnnnnnnnnnnnnnnnnnnnnnnnnnnnnnnnnnnnnnnnnnnnnnnnnnnnnnnnnnnnnnnnnnnnnnnnnnnnnnnnnnnnnnnnnnnnnnnnnnnnnnnnnnnnnnnnnnnnnnnnnnnnnnnnnnnnnnnnnnnnnnnnnnnnnnnnnnnnnnnnnnnnnnnnnnnnnnnnnnnnnnnnnnnnnnnnnnnnnnnnnnnnnnnnnnnnnnnnnnnnnnnnnnnnnnnnnnnnnnnnnnnnnnnnnnnnnnnnnnnnnnnnnnnnnnnnnnnnnnnnnnnnnnnnnnnnnnnnnnnnnnnnnnnnnnnnnnnnnnnnnnnnnnnnnnnnnnnnnnnnnnnnnnnnnnnnnnnnnnnnnnnnnnnnnnnnnnnnnnnnnnnnnnnnnnnnnnnnnnnnnnnnnnnnnnnnnnnnnnnnnnnnnnnnnnnnnnnnnnnnnnnnnnnnnnnnnnnnnnnnnnnnnnnnnnnnnnnnnnnnnnnnnnnnnnnnnnnnnnnnnnnnnnnnnnnnnnnnnnnnnnnnnnnnnnnnnnnnnnnnnnnnnnnnnnnnnnnnnnnnnnnnnnnnnnnnnnnnnnnnnnnnnnnnnnnnnnnnnnnnnnnnnnnnnnnnnnnnnnnnnnnnnnnnnnnnnnnnnnnnnnnnnnnnnnnnnnnnnnnnnnnnnnnnnnnnnnnnnnnnnnnnnnnnnnnnnnnnnnnnnnnnnnnnnnnnnnnnnnnnnnnnnnnnnnnnnnnnnnnnnnnnnnnnnnnnnnnnnnnnnnnnnnnnnnnnnnnnnnnnnnnnnnnnnnnnnnnnnnnnnnnnnnnnnnnnnnnnnnnnnnnnnnnnnnnnnnnnnnnnnnnnnnnnnnnnnnnnnnnnnnnnnnnnnnnnnnnnnnnnnnnnnnnnnnnnnnnnnnnnnnnnnnnnnnnnnnnnnnnnnnnnnnnnnnnnnnnnnnnnnnnnnnnnnnnnnnnnnnnnnnnnnnnnnnnnnnnnnnnnnnnnnnnnnnnnnnnnnnnnnnnnnnnnnnnnnnnnnnnnnnnnnnnnnnnnnnnnnnnnnnnnnnnnnnnnnnnnnnnnnnnnnnnnnnnnnnnnnnnnnnnnnnnnnnnnnnnnnnnnnnnnnnnnnnnnnnnnnnnnnnnnnnnnnnnnnnnnnnnnnnnnnnnnnnnnnnnnnnnnnnnnnnnnnnnnnnnnnnnnnnnnnnnnnnnnnnnnnnnnnnnnnnnnnnnnnnnnnnnnnnnnnnnnnnnnnnnnnnnnnnnnnnnnnnnnnnnnnnnnnnnnnnnnnnnnnnnnnnnnnnnnnnnnnnnnnnnnnnnnnnnnnnnnnnnnnnnnnngaagaaggacttgttggctatcagtggaaagaaaggcccattggttgtgcagaccttatatgcctcagtacaggggaacgccagggccaaggtgtgggaaagggtggttgggggagtgggtgtggaagggtgtgtgtggggcttttgggataggattggaaatgtaaatgaaataaatacctaataatatatatatatatatatatatatatatatatatatatatatatatataaagaaagtgtgaataatgaaagcagagccttctaaactacacaggaagagcctgcttagtaagatgctggtacagggaactgatttaaagatggagttatttaaaaaaagggaagtataacttaaaaagttaaattgggaaatagtaagaagatctgtttgtgagtggccaagggtggtgatgtagctctttgatgaggacaagggagatggacataagctatctaacccaggatctgtggcctccaaaactgcgagaaacacatttctatcactcacaagctacttagtgatgatgctttgttatagcagccccacccagactaagagtttctgaagtcttcatcttcctcacactggagttacgatgacttaggtctttgaggacagttaaggatttgtaatgcaccctgagttgtgagaagatgaaacagtatttctgcaaatttgagggagctggaccttagaattcgggttgctgttcttaataattttgctttcggtgtgtctgataaacactttagtctcttcttttttatttctagagcttatttatttttattttatgggtatgagtgttttacctgtgtgtgtacacatgtatgtgtgtgtgcgtgtatgtattcatgtgtgttcatgtgtgtacctggtgctcctagagaccattagaacacactcaatccatcccctgaagctggacttacagactactaagccatcatgtggtgctaggaattcaacccaagtcctccagagacaggcagtgagagtgctctcaacaaccgagccctatttccggctaaactttttaggttttttttttttttaaagttatacataataagggaatttttggtcttaggagaactataggtgctatgtcagatatctaaagagaaagcaaattatccttcagtggagactgagcatcattgctccaaataagagagggttttggttgtagttgaagaggaaaaagcctgtgaatgatgtaaatagtgaactctcctccatggggtcctgcactaatgaaaggtctatgcccatccccagacacttatgcctgaaataacaccaccatagggggactcgcaggctttattttcttcagtatccatgcctagtcaccgagaggtacccattcacagtcacactgtctggtgtttcctttcgtggtttgatgacagtcgtataaattgactcatccagctattctgagggaagaaagcagttgtgtagagccagaagatctgtgatgccaaatacacacatttaaaaaaatggctttagctcaccattggtttgaatttagattttactgtgctagacacagtttagtattcaacagaggacacacactcaggaactgagctcagtgcactctacctctgtcagcttatgttgatgtttcttactgcctcatctctcagtaccattgtgcaagcctgaaagtgtttcttgccaggaagttgtctatgtgggttttccagttgtttcagcacaaagaattagtggatataaagtttcatctatgataaaagtaccttaaaatatactatatttctttctgatataaagatggttgtacccttggcaatgggcaaagagacaccttgtcggtagtgttttccttatattagggacagagcagaaggcagccattttctttttttttgatcctaggttgatacctggcttggtggcccaagctgtcttatgcgtaggactcacaaaattnnnnnnnnnnnnnnnnnnnnnnnnnnnnnnnnnnnnnnnnnnnnnnnnnnnnnnnnnnnnnnnnnnnnnnnnnnnnnnnnnnnnnnnnnnnnnnnnnnnnnnnnnnnnnnnnnnnnnnnnnnnnnnnnnnnnnnnnnnnnnnnnnnnnnnnnnnnnnnnnnnnnnnnnnnnnnnnnnnnnnnnnnnnnnnnnnnnnnnnnnnnnnnnnnnnnnnnnnnnnnnnnnnnnnnnnnnnnnnnnnnnnnnnnnnnnnnnnnnnnnnnnnnnnnnnnnnnnnnnnnnnnnnnnnnnnnnnnnnnnnnnnnnnnnnnnnnnnnnnnnnnnnnnnnnnnnnnnnnnnnnnnnnnnnnnnnnnnnnnnnnnnnnnnnnnnnnnnnnnnnnnnnnnnnnnnnnnnnnnnnnnnnnnnnnnnnnnnnnnnnnnnnnnnnnnnnnnnnnnnnnnnnnnnnnnnnnnnnnnnnnnnnnnnnnnnnnnnnnnnnnnnnnnnnnnnnnnnnnnnnnnnnnnnnnnnnnnnnnnnnnnnnnnnnnnnnnnnnnnnnnnnnnnnnnnnnnnnnnnnnnnnnnnnnnnnnnnnnnnnnnnnnnnnnnnnnnnnnnnnnnnnnnnnnnnnnnnnnnnnnnnnnnnnnnnnnnnnnnnnnnnnnnnnnnnnnnnnnnnnnnnnnnnnnnnnnnnnnnnnnnnnnnnnnnnnnnnnnnnnnnnnnnnnnnnnnnnnnnnnnnnnnnnnnnnnnnnnnnnnnnnnnnnnnnnnnnnnnnnnnnnnnnnnnnnnnnnnnnnnnnnnnnnnnnnnnnnnnnnnnnnnnnnnnnnnnnnnnnnnnnnnnnnnnnnnnnnnnnnnnnnnnnnnnnnnnnnnnnnnnnnnnnnnnnnnnnnnnnnnnnnnnnnnnnnnnnnnnnnnnnnnnnnnnnnnnnnnnnnnnnnnnnnnnnnnnnnnnnnnnnnnnnnnnnnnnnnnnnnnnnnnnnnnnnnnnnnnnnnnnnnnnnnnnnnnnnnnnnnnnnnnnnnnnnnnnnnnnnnnnnnnnnnnnnnnnnnnnnnnnnnnnnnnnnnnnnnnnnnnnnnnnnnnnnnnnnnnnnnnnnnnnnnnnnnnnnnnnnnnnnnnnnnnnnnnnnnnnnnnnnnnnnnnnnnnnnnnnnnnnnnnnnnnnnnnnnnnnnnnnnnnnnnnnnnnnnnnnnnnnnnnnnnnnnnnnnnnnnnnnnnnnnnnnnnnnnnnnnnnnnnnnnnnnnnnnnnnnnnnnnnnnnnnnnnnnnnnnnnnnnnnnnnnnnnnnnnnnnnnnnnnnnnnnnnnnnnnnnnnnngagcatacaatactgatggtatcacagaaaccaggatctcagaccagactgacaacaatcattgcaatgatcatttacaagtaaagatgtgtgggaaaagggatagactgtgggacacactgcgacacactacagcttccataaagagatgtttttatgctttattttgttgttgtttgtttatctgtgttagtttgattaggggtaggttgcaagggtggatacgaggggacggggagatgagccggactagggtgcgtgatgggaaactcacaaggaatcaataaaaagttaaaaaaactgttgtacaaaatcaagtcaaatgacattctcccacaacccccccccccgcccgtgttctgtagtgagaacgtctactgaccatgtagtgtttagtcatttagacttctaatctgtgttcacattctttttttttttccttttttttttaaaaattagatacagcctttattgactactatatgtgaccagttatcttacctcacagaatattttggagttaatatataaagatttagtttttatattcagtttttttttttttggttgattgatgattcaataatgcattcaaggagtcaaaattcttaaggtggtaagcaggatggcttcccatgggaaggtgccttgcctgttactcctaacacacagtcttctctctgggggcaactgctgccagttaccttctagacggaatgcatctagccatgcacctcagcacagaagcgagctatatatagcatcactgagcctgtaggaggaggagatcccagttacccagtctctgtcctcttacaacaacgaccccagcaaaggagcctctagctagtgactctgtgtctactccaaactgagagattcatcatcctagaggagtatatcatacctaagtctgcccgttttggtgcnnnnnnnnnnnnnnnnnnnnnnnnnnnnnnnnnnnnnnnnnnnnnnnnnnnnnnnnnnnnnnnnnnnnnnnnnnnnnnnnnnnnnnnnnnnnnnnnnnnnnnnnnnnnnnnnnnnnnnnnnnnnnnnnnnnnnnnnnnnnnnnnnnnnnnnnnnnnnnnnnnnnnnnnnnnnnnnnnnnnnnnnnnnnnnnnnnnnnnnnnnnnnnnnnnatcccaccttcgtggcgggctctgagcttgtttatttttctccctctagctttggagtctactttaattttgtctcagcctccccacctctcagttgtgcttatgaatctgtatgagaagatggtgacagtaccttccctctgcgttccgttctgggtgggatcctaaattctggattcccctctgccctggaagcggctctctgatgccttcagactgcttggttttctagctctctagtttcccttagtgtggtagctggtgttcataagctagtctgtcctaaccagaaataaaaataacatggaaatggaaagctagtcttctgtcagagcaccatggtcttctcagaggataataagtccacactaagcccatgtctctgggaggagcaaaggaccttgaatcctcaaagtcctcttgctgggatgccactagaaagcgtccttcctcaattgctttgtgccttaggccagatccttccttctggggtacccagtcactcgtgacaggaaatgaggaactctgttcacagcttctctgcctgttctcacattagagcccatcggtcactgaatcacgccttttgtagttccctgtggtttcgttctgttttgtttcaataaatttgttcactttgtctcagtcccaccgccttaccgtgggcccaactgtggtagctgtttgtgttattgaaaagactccactcccactccctgtgaaaacaaggaaaggtctttcaaaactgtgaacaggacccaagccttcagcattgtgtttaaatccaagagcagctctctgtggccctctgtctagcactgcctatattgtacacatggccttgcagcatctactgcagccaggctttttgtgctatgggtactgagagatctctctgcctctgctcaggggctgtccccttctggcctgtgactagaacaaaggatgaccttctaggtttgtttcctccacattaagaggaaattaggtttgtttcctccacattaagaggaagttgagttagaagatttccagttcagaggactttgtgattctgagccattggcttaaactgtagtatgtatcattgtaagaaccaggcttatgtctacagcaatctctgtactggtcgtaagcattgcatagcgtgagctgctctggtttgacttttgttgctgtgacaagaacaactctgaccaaaagtagctcagggatttacttacactcacagttcagattagggtccattccgtgggaagtccaggcaggaacttcacagcgagtgttttggtagcccatagagctttatctccaactgagaaattcatttcacaggcaaagaagcagacagaatgaagccagctcccaccccgctagcttcctacccatgtcaggatggcctcctgggatgggcttctcnnnnnnnnnnnnnnnnnnnnnnnnnnnnnnnnnnnnnnnnnnnnnnnnnnnnnnnnnnnnnnnnnnnnnnnnnnnnnnnnnnnnnnnnnnnnnnnnnnnnnnnnnnnnnnnnnnnnnnnnnnnnnnnnnnnnnnnnnnnnnnnnnnnnnnnnnnnnnnnnnnnnnnnnnnnnnnnnnnnnnnnnnnnnnnnnnnnnnnnnnnnnnnnnnnnnnnnnnnnnnnnnnnnnnnnnnnnnnnnnnnnnnnnnnnnnnnnnnnnnnnnnnnnnnnnnnnnnnnnnnnnnnnnnnnnnnnnnnnnnnnnnnnnnnnnnnnnnnnnnnnnnnnnnnnnnnnnnnnnnnnnnnnnnnnnnnnnnnnnnnnnnnnnnnnnnnnnnnnnnnnnnnnnnnnnnnnnnnnnnnnnnnnnnnnnnnnnnnnnnnnnnnnnnnnnnnnnnnnnnnnnnnnnnnnnnnnnnnnnnnnnnnnnnnnnnnnnnnnnnnnnnnnnnnnnnnnnnnnnnnnnnnnnnnnnnnnnnnnnnnnnnnnnnnnnnnnnnnnnnnnnnnnnnnnnnnnnnnnnnnnnnnnnnnnnnnnnnnnnnnnnnnnnnnnnnnnnnnnnnnnnnnnnnnnnnnnnnnnnnnnnnnnnnnnnnnnnnnnnnnnnnnnnnnnnnnnnnnnnnnnnnnnnnnnnnnnnnnnnnnnnnnnnnnnnnnnnnnnnnnnnnnnnnnnnnnnnnnnnnnnnnnnnnnnnnnnnnnnnnnnnnnnnnnnnnnnnnnnnnnnnnnnnnnnnnnnnnnnnnnnnnnnnnnnnnnnnnnnnnnnnnnnnnnnnnnnnnnnnnnnnnnnnnnnnnnnnnnnnnnnnnnnnnnnnnnnnnnnnnnnnnnnnnnnnnnnnnnnnnnnnnnnnnnnnnnnnnnnnnnnnnnnnnnnnnnnnnnnnnnnnnnnnnnnaaaatatgcttattgtgcacatataaatattctaaaattcaaatgaatctacagaccaagatacctctagtctaatgcagtttagatcatgaaaactcaatctacataaatatttggggtatggctgactaacaaaaattatatttacacgtttcttagattccataaggaatatgtaacttctcaactatgcatagctttatccagactgatgccagtacttggttctggttagaaaatcctgtcttgattttgccatctttcttcttttgagctagcaagagctgacagctatttaaataaaaattaaaaatagtacatgtcctgtttgttcctgccagaatgttaagtgaccatgaccacagaactgaaattgtgctctgtctctccctctgtccctccatccctccctcccattgttagtttgaatttaggttgccctgtgatagacagagtgtagtacttagcagacagaggacacactctcaggagctgagctcagtgcactctccctccatcagctcaggttgatcgtccttactctccttcatctcccaataccatctgcacaagcctggatgtgcttctggccaggaatgtgcctatgtgtttttccagttgtttctatacagagaattaatgcttagaaacattcgtctatgacaaatgtatcttaaaatgtgttatttttttctgatgtaacaaccaacagtcaagtaacattttttaatattctgtagtgagaacttcaattgcctactatatacaggtagggggtaaagagaccattgagatgacatggcatatctctgccctatatctatatcatctacatctatctaatatgctgtcaaatagaggaaagtgacaataaagaaattaagggatgtcctagatttctagatgtcaccacttctgtagcaaatatgcttttcttttcattacttgggaaagattttcaaataattcagaagttaaagtgtcaccagggtacatcattcacgtgtgagaatactccttatgaggtggctttgaccctatctacctttctgtgtggtcatcaccaatggaagaatttcagctcatggaaaatgactcaggaagagaataaagtgagaggcctcaggctgggtcactcaagtcttatcatcgggcctgacagactagaaatgctctggactgatgacctgggaatcggctttaagtgagccacatttgtacctaagcttggccatgcatgtggcttaccatgtataatgtacatggcatctgtttgccacctcagaactactcgtcaccacaactaatagcaggctaagtagaatttgctttgaacctcagtgtagccttctttcccagaaattctgtagcactctagagctcctctactcagcaaacctttattatcacccacgaaggacacagtgccactttaaagcagccctgcagaaacaaactggacacagcaagggtcaactagagttgcttgttccgagtgttggctatggggtgaagagactattgagatgtcagcagaagcagagatggggctcacagaagactaagtattcttcaggcaaggaggggtgactgttggagtgcttgagagagccagagtgagggaaagaaagtcccctctttaggggaatacggggatgagtcacttctagcttttatttaagcttctttgacaatgaagctgactggttctcagcagatctctagtcagaaaattctaacttctgcttactcctctggaatattcaccctctctcctggagcccggtgtttgtggaagccatgagtggggtgtttatgaaaaagctggaagctttgtgagcacatgccacatgtctaggagcaagaatgttcagcactgccaaggacaggcactggtaagggggcaccatgcccttcccttccacggtctcttggttatttctttcctaagacccacatttatagaacagtcatgttagccagtaggtgggtcagtttgtagtttatgacaaatggcatgctttgtggatatctgtcaaaatctagcagcaaactttcataattgtgaaacatatttacagtatattgtatttctagctgtctctggagggtctgaacaatctacataggcttctgggcagtttccttgtgcagcagagcactgtgtgatgtgtactgccagcaagaatcaaaccatttctccacacagctgtccaagacactcacatgctcttcttggcttccgtgttctgacagtccaggcagttagcaaatctgtaactgtggtctgcctcatgggctgagctccccgtcggtacttagagatgtgggtaatcctggtgtttcttctgagctgaaaatgcagtgttgtgcagaagaaacaccacaccaacagaccatacaaacagtaagcttcgcacacaagcttctagtgtaaccaagcaactgacacattagacagactttgccatcggcgtgcattctcggggaacttaggtcagtgcctaaaataaccctgctaattgtgaggggcacatgtgggatgaaattccagttagcagtctgggagctgagtgactgagcatttgaaaccttactgtcattacagttcactgcaagcctctaaagcagttaggcccacagctcttggcctgtccaggtacggaaagaaagtcatgtgtgtatattatattctctgtttgtaaagctggttaaccggtgacagccggttgaaaaccaaatcgacttgagtcacccgatctgggctttctctctgctgctttttgcttgttgtatggtggagtaattgcagagtggatggcttggccaaaggacaggaaactgcagcaacctgtttagggcactgccacacaccggacttcttcattcaggtaggctggggggtggtggggaactctttaaatggacagaagtcattgaaccattcattgaaccagagtcccaagtgtctctcccacacacagcataactgttttgatgggctctgtgttacactcccctagctaggcaatatgcttttttttaaaaaaaaaagtctccatagtgttgtcaagaacctacatctacatcctaggaggtaagggaggctgaggaatttgttcagcttgtaaaaaaatagtcttttgaagactggccttcctctcttgtgttttatttcccttattccagttgcaaaagaaaggcttggaatctgtgggagacgatggggaaaaggttaatgcccttcatttcagagcaagtggtgtttacacattaagaacagggcccagactgatgaaagtaattactgtgctttccatacacccccaccctgctgttggtcccatcagtgtaacatgcacactgctctgcttaccctaactgtgctgacctggcttatacattcaggttcgctttaactctcaagtgtctggcatgaaaacaggtatataaatactgtcaaagatacttcgaaacttttgatcaatgtgtgtgtgtatatatatcacattacatatatcgttttgtaactggtgtaatttagcatgtacttggacagctgatcacttttctagaatccactcaaagtgaatagcagtcaacacttagcttgatggaactttgttttgagaatttcatgcagtccaagcgggcttcaaactgtgtctgaagatgatggtgactttcaactacttgatccacttgtgtgtctccacnnnnnnnnnnnnnnnnnnnnnnnnnnnnnnnnnnnnnnnnnnnnnnnnnnnnnnnnnnnnnnnnnnnnnnnnnnnnnnnnnnnnnnnnnnnnnnnnnnnnnnnnnnnnnnnnnnnnnnnnnnnnnnnnnnnnnnnnnnnnnnnnnnnnnnnnnnnnnnnnnnnnnnnnnnnnnnnnnnnnnnnnnnnnnnnnnnnnnnnnnnnnnnnnnnnnnnnnnnnnnnnnnnnnnnnnnnnnnnnnnnnnnnnnnnnnnnnnnnnnnnnnnnnnnnnnnnnnnnnnnnnnnnnnnnnnnnnnnnnnnnnnnnnnnnnnnnnnnnnnnnnnnnnnnnnnnnnnnnnnnnnnnnnnnnnnnnnnnnnnnnnnnnnnnnnnnnnnnnnnnnnnnnnnnnnnnnnnnnnnnnnnnnnnnnnnnnnnnnnnnnnnnnnnnnnnnnnnnnnnnnnnnnnnnnnnnnnnnnnnnnnnnnnnnnnnnnnnnnnnnnnnnnnnnnnnnnnnnnnnnnnnnnnnnnnnnnnnnnnnnnnnnnnnnnnnnnnnnnnnnnnnnnnnnnnnnnnnnnnnnnnnnnnnnnnnnnnnnnnnnnnnnnnnnnnnnnnnnnnnnnnnnnnnnnnnnnnnnnnnnnnnnnnnnnnnnnnnnnnnnnnnnnnnnnnnnnnnnnnnnnnnnnnnnnnnnnnnnnnnnnnnnnnnnnnnnnnnnnnnnnnnnnnnnnnnnnnnnnnnnnnnnnnnnnnnnnnnnnnnnnnnnnnnnnnnnnnnnnnnnnnnnnnnnnnnnnnnnnnnnnnnnnnnnnnnnnnnnnnnnnnnnnnnnnnnnnnnnnnnnnnnnnnnnnnnnnnnnnnnnnnnnnnnnnnnnnnnnnnnnnnnnnnnnnnnnnnnnnnnnnnnnnnnnnnnnnnnnnnnnnnnnnnnnnnnnnnnnnnnnnnnnnnnnnnnnnnnnnnnnnnnnnnnnnnnnnnnnnnnnnnnnnnnnnnnnnnnnnnnnnnnnnnnnnnnnnnnnnnnnnnnnnnnnnnnnnnnnnnnnnnnnnnnnnnnnnnnnnnnnnnnnnnnnnnnnnnnnnnnnnnnnnnnnnnnnnnnnnnnnnnnnnnnnnnnnnnnnnnnnnnnnnnnnnnnnnnnnnnnnnnnnnnnnnnnnnnnnnnnnnnnnnnnnnnnnnnnnnnnnnnnnnnnnnnnnnnnnnnnnnnnnnnnnnnnnnnnnnnnnnnnnnnnnnnnnnnnnnnnnnnnnnnnnnnnnnnnnnnnnnnnnnnnnnnnnnnnnnnnnnnnnnnnnnnnnnnnnnnnnnnnnnnnnnnnnnnnnnnnnnnnnnnnnnnnnnnnnnnnnnnnnnnnnnnnnnnnnnnnnnnnnnnnnnnnnnnnnnnnnnnnnnnnnnnnnnnnnnnnnnnnnnnnnnnnnnnnnnnnnnnnnnnnnnnnnnnnnnnnnnnnnnnnnnnnnnnnnnnnnnnnnnnnnnnnnnnnnnnnnnnnnnnnnnnnnnnnnnnnnnnnnnnnnnnnnnnnnnnnnnnnnnnnnnnnnnnnnnnnnnnnnnnnnnnnnnnnnnnnnnnnnnnnnnnnnnnnnnnnnnnnnnnnnnnnnnnnnnnnnnnnnnnnnnnnnnnnnnnnnnnnnnnnnnnnnnnnnnnnnnnnnnnnnnnnnnnnnnnnnnnnnnnnnnnnnnnnnnnnnnnnnnnnnnnnnnnnnnnnnnnnnnnnnnnnnnnnnnnnnnnnnnnnnnnnnnnnnnnnnnnnnnnnnnnnnnnnnnnnnnnnnnnnnnnnnnnnnnnnnnnnnnnnnnnnnnnnnnnnnnnnnnnnnnnnnnnnnnnnnnnnnnnnnnnnnnnnnnnnnnnnnnnnnnnnnnnnnnnnnnnnnnnnnnnnnnnnnnnnnnnnnnnnnnnnnnnnnnnnnnnnnnnnnnnnnnnnnnnnnnnnnnnnnnnnnnnnnnnnnnnnnnnnnnnnnnnnnnnnnnnnnnnnnnnnnnnnnnnnnnnnnnnnnnnnnnnnnnnnnnnnnnnnnnnnnnnnnnnnnnnnnnnnnnnnnnnnnnnnnnnnnnnnnnnnnnnnnnnnnnnnnnnnnnnnnnnnnnnnnnnnnnnnnnnnnnnnnnnnnnnnnnnnnnnnnnnnnnnnnnnnnnnnnnnnnnnnnnnnnnnnnnnnnnnnnnnnnnnnnnnnnnnnnnnnnnnnnnnnnnnnnnnnnnnnnnnnnnnnnnnnnnnnnnnnnnnnnnnnnnnnnnnnnnnnnnnnnnnnnnnnnnnnnnnnnnnnnnnnnnnnnnnnnnnnnnnnnnnnnnnnnnnnnnnnnnnnnnnnnnnnnnnnnnnnnnnnnnnnnnnnnnnnnnnnnnnnnnnnnnnnnnnnnnnnnnnnnnnnnnnnnnnnnnnnnnnnnnnnnnnnnnnnnnnnnnnnnnnnnnnnnnnnnnnnnnnnnnnnnnnnnnnnnnnnnnnnnnnnnnnnnnnnnnnnnnnnnnnnnnnnnnnnnnnnnnnnnnnnnnnnnnnnnnnnnnnnnnnnnnnnnnnnnnnnnnnnnnnnnnnnnnnnnnnnnnnnnnnnnnnnnnnnnnnnnnnnnnnnnnnnnnnnnnnnnnnnnnnnnnnnnnnnnnnnnnnnnnnnnnnnnnnnnnnnnnnnnnnnnnnnnnnnnnnnnnnnnnnnnnnnnnnnnnnnnnnnnnnnnnnnnnnnnnnnnnnnnnnnnnnnnnnnnnnnnnnnnnnnnnnnnnnnnnnnnnnnnnnnnnnnnnnnnnnnnnnnnnnnnnnnnnnnnnnnnnnnnnnnnnnnnnnnnnnnnnnnnnnnnnnnnnnnnnnnnnnnnnnnnnnnnnnnnnnnnnnnnnnnnnnnnnnnnnnnnnnnnnnnnnnnnnnnnnnnnnnnnnnnnnnnnnnnnnnnnnnnnnnnnnnnnnnnnnnnnnnnnnnnnnnnnnnnnnnnnnnnnnnnnnnnnnnnnnnnnnnnnnnnnnnnnnnnnnnnnnnnnnnnnnnnnnnnnnnnnnnnnnnnnnnnnnnnnnnnnnnnnnnnnnnnnnnnnnnnnnnnnnnnnnnnnnnnnnnnnnnnnnnnnnnnnnnnnnnnnnnnnnnnnnnnnnnnnnnnnnnnnnnnnnnnnnnnnnnnnnnnnnnnnnnnnnnnnnnnnnnnnnnnnnnnnnnnnnnnnnnnnnnnnnnnnnnnnnnnnnnnnnnnnnnnnnnnnnnnnnnnnnnnnnnnnnnnnnnnnnnnnnnnnnnnnnnnnnnnnnnnnnnnnnnnnnnnnnnnnnnnnnnnnnnnnnnnnnnnnnnnnnnnnnnnnnnnnnnnnnnnnnnnnnnnnnnnnnnnnnnnnnnnnnnnnnnnnnnnnnnnnnnnnnnnnnnnnnnnnnnnnnnnnnnnnnnnnnnnnnnnnnnnnnnnnnnnnnnnnnnnnnnnnnnnnnnnnnnnnnnnnnnnnnnnnnnnnnnnnnnnnnnnnnnnnnnnnnnnnnnnnnnnnnnnnnnnnnnnnnnnnnnnnnnnnnnnnnnnnnnnnnnnnnnnnnnnnnnnnnnnnnnnnnnnnnnnnnnnnnnnnnnnnnnnnnnnnnnnnnnnnnnnnnnnnnnnnnnnnnnnnnnnnnnnnnnnnnnnnnnnnnnnnnnnnnnnnnnnnnnnnnnnnnnnnnnnnnnnnnnnnnnnnnnnnnnnnnnnnnnnnnnnnnnnnnnnnnnnnnnnnnnnnnnnnnnnnnnnnnnnnnnnnnnnnnnnnnnnnnnnnnnnnnnnnnnnnnnnnnnnnnnnnnnnnnnnnnnnnnnnnnnnnnnnnnnnnnnnnnnnnnnnnnnnnnnnnnnnnnnnnnnnnnnnnnnnnnnnnnnnnnnnnnnnnnnnnnnnnnnnnnnnnnnnnnnnnnnnnnnnnnnnnnnnnnnnnnnnnnnnnnnnnnnnnnnnnnnnnnnnnnnnnnnnnnnnnnnnnnnnnnnnnnnnnnnnnnnnnnnnnnnnnnnnnnnnnnnnnnnnnnnnnnnnnnnnnnnnnnnnnnnnnnnnnnnnnnnnnnnnnnnnnnnnnnnnnnnnnnnnnnnnnnnnnnnnnnnnnnnnnnnnnnnnnnnnnnnnnnnnnnnnnnnnnnnnnnnnnnnnnnnnnnnnnnnnnnnnnnnnnnnnnnnnnnnnnnnnnnnnnnnnnnnnnnnnnnnnnnnnnnnnnnnnnnncattggaaatgtcattgaggaaaatacgtaataaagaaaaaaaaaagaaaaaaaagacgttagttagtaggagtctaaggccatataggaagtaactagtagggattttaatgccatttaggagggagttgttggttaaataattttatacatcttccttcttttttgcctttctcttgtcaaagtattttggaatatcttaagtcaacatagtttggaaaggtaagagtcttctaaaactgctcactttattattccgaatagtctatgtgtagattgtgtattcatctgtatgttaaagcataggtctatttgggcttggtggcatttcctatattaccaacatttagaaggctgaggcagaaagattgctgcaaattcaagaccaactgggttctatatccagttcctcataagtctgaatacagaacaacccaggatgggaagattcttcaggaataatatttggtggaaaatcaatacaaaggggtctattctgtatgcttatatttccattaagaccaaacaggaaagcttgtattgtttgatttaggagtggataccaagtagctgaaatgactaccaagaaggaaagaaggaatggttataataattaatagtcttgctcttttccagccagaggggcttgtgggagggttcacattcttcatcagagtggtagtccacattgttcattgtacaattatgtgttgtgattggatttttggtttatgaacttctagatgggtaatccgtattttaaaacacaaagtctagcactcatgagaaaaaaagaacaacaaaaggaaagaaggaagtctgactgcattcacttgcttgtcttgttactgtttgacttacgttggtttgtttattttttcatgatggagatcacctaagcctcatgaatgcatggctagccctgcaccactgttctcctgttccctaggacctcatgcatgcacggctagccttgcaccactgttctcctgtcctctaggacctcatgcatgcacggctagccctgcaccattgagctcctgttccatttcttgcttcaatgtttagatgactaaatttttatttgatttttttttacctttacatagacagtttctataaatttctcctgttcagaagatgaatatatatggtggataataaaagctttgatactgatgttcacagaagcatttattaacaaaattgacatgccattaataatatgaatgagatatatctattaactttgtcatttttgacaacctctatatttgagatactattagttgttatttattgtcatttatcatatcatatttaattatcattataaatactaaaaataacattgactattaccaggtctcatgtttaatttttttaagcattaatcacttcttaactgaaacagagattggatgcaatattcatgttacatggtctttaatgtgtgatgtttcaccatagtagctggctcagaccaaatatctataattaaaggtaacttggcttagtaagtactcgtgtacctgagtaagaaacataaacctttttatttattttttatttttttacaaaacataatctatttagtgtttttgtttttgttgttgttaggttttgtttgttttctagacaagatttctctgtttaacagagccctggttgtcttagactttgtagaccaggctggcctcaaactaagagatcctccttcttctgcctcctgagtgctgagattaaaggtgtgcatcaccaagcctgcttactcattatttttaaaagtttagttaatatgtacaaaatgtatctgaggctcatgctttgtttcctttttcttccttttctaaagattatcattatgtttcactcacttagactaagcctttattttcaataaaagagataagaagagggaagaaaaactgacatgtttgaacattagcttgaaccatggaactgttaacaagaaatagaagcaattgttagcagtgatcttgttagcaaaagatgccaatgagcttcgtggagaagtaggctcccacaatcccatgcacgacttgttcatttggcagactgctatacagaaaatagttagtacgatgctatttatatgaaaatgaatattgtaatgtatctgcaggatttttattgcaaagacagagggaaatacaacagtcagactgaactcaccaactgctccttacaccactctaacactaagcctgtgtccccagagttcagcatttgcctctggatgtacagtgccagaggggacagatgtgtccacacaacacatctggtcagggttggtgtggtattgttggaacatgtactaggtagaatgatgaagattctggcatctatctcccctgagcaggactttaggggattttggaagaatactccatcaggaagacccagcactctcagctggcgtcattttaccttttctccttttccttgctggttttgtcaatggtttccatactctacaggcataatgaatgtagccacagtcctgtgataacacactctcccctcaactcctttaccaaagtttaggattgacaaatcccttttctttatcttaaagagcagatgtgtactcaggattttgagtggactcctgaaggagcaaagattgagtcaacagcctggtcctgcaagggtctattgctgtggcactctgtagcaccgaacgagctctgttttacacgctgattcaaagacttagatttccatgcttggcagagctacccaattaaaatataataatgagctccaaatgcaaacccaatatgtgattttaaatttccaagtagcaacattttaaaagcaaaaataaataggtaaaattaattttaacagttttttaaaatctttttttttccaaaatactgtcattttaatatgtaattaaggggagggagaaaaaatggctcagaggtcatgagaactggctgcttttctagaagatctgggcttaattcctaatgcccacatgatgtctcataaccatgtataactatagttctatgggacctgatgccctcttctggctccacaggcaccaggtacacagacatatatgcaggcaaaacactcatacgcataagataacataaaagtaaaaattaatataatggatttaaaatgaccattaagctattttaagcatatttgttcatgtgaaatattaagtacagtatgtgttttacatgtatactctacacaccctggtctaggtaccggtgaagtgcgcccatattggatagcgccaatctggaggctcatttctaagcccttaggattctttttgtttttctggattttctgagtgtaggcagcacaccaggaaggcaggtcattgagcaccccagaatgatgttcagggattaggtctgatattgaagtgtatcatcccgcacacattctgctggccactactcacgcagacatagtgagtgccccgcctagggcactaggggaatgcagatgagcccagcagaaagtaggtttgttgaatgcataggaaagtcttcaccgcagcagttcccatattttacaatccaggaaactatgtcctagcagagtacatgatgggctagttaatgggataatgtgagcagactgcgcaccctccctctctcgggtgatgtttcttccgtgaggccggctcctctcttcctttgtttcttccttatccctccctttattctacccatgcagatgcagttcctgcagtaagtccaatgtcttcaatatttcattgcattggctcttgcttaatgactgtatcctattactgccgttttagcggatgacagacagcctaggataaggcagcaaatgtgctccgtccgtaagtggtccaactatcagaagcatggtaagccactgcattgtcatcttgagtggacctccttctccgtgcggaaactcctcattcacaggatgaggactattaaggttgccatcaagcatctcaatcaatgaataaattgcatcttacgttctaatgatcggtctgttcgattgaaggctttgctttttaaaagtgcttggaagactaactaacaagggtgctttcagccgtgacattattgaagtgcttaggtagactgctctgtttcataggttgaagatgcttcagtcagagaaatgaagtagtgttccttaaaggaagtgcatggcaaaaggtgctggcgcctcgccgatttctaattagaacactagaaaccaccaagttgctttcactgaggaaaatggagttatagtatgactattcagctgtaatttggccacatcaaaattggtttggtgttttgttgttgcttaatatttttagatttaaaatatattcataagtgtgaaataaaaaaagaaatgatacagggaatttttaatcttccagtgtgccagtcggacctttggctagtttcttttcccagtaaacgcctataaggtggtacttagccctgttgcttatgagtccttctagagtttgtattgccatatagtaacacggattattgtttttctctcattttattttgtatgtactgctttaaaactgacttccctttccccacttaaacaggttttattaaacgtcaaagccaaagtgcaacactgtcttaacacaaaaaggttgcaaagtgttcgcagtattgattgttatatatccatacagctaaaaccattcctttgatcatataataatgtatgtaatttccatgattaaaagtaccctatacataataaccataagttatattattttaaactattatattatactttttatctctttctatttcacactagtttattataattttaaaatatgaccttgtattataaaaatcaaagtttaaaatatttctagaaagacatatatttccaaaattaagcctctagttttgtgctttctgtggaatgctattttacaaatttaggtggggaagcatcctttagtatctccttgtaggatagtagttctcaaccttcccagcactgccactcttcacacagtttctcatgctgtggtgactctcaactataaaattattctattattacttcaaaagtgtaattgtgctactgttttgaattgtaacataaatgtctaatatgtgacccacaaaggggtcacaacccacaggttgagaaacacttttctaagcgttattaaaagtaatattatataaaatagaaatattttgtaaaacacaaataaatacacaaaggaaaatttaaagtatgaaacacatattagggaagagagctcctagatagttattttttaatttttgtgattataattacaccccttcctcctccaaaatcctgccatgtacccttctttattctttttctcattcatggcctctttttaattaactgttcttgcagatggacatatatacatatatattcctagatataacacactctgctttctaaacttatcatgaagaagttgctaatttttaaaaaagaattatttatttttttatgtatatgagtgcactgtcactgtcttcagacacaccagaagagggtatcggaccccattacagatggttgtgagccaccatgtggttgctggaaattgaactcaggacctctggaagagcagtcagtgctcttaaccactgagccatctttccagcccaagagattgctatttcatagcataaaaagttttcttaccatcattatttttatctatatgctattcaaataaatatatcatgttaatgtacatttagtatattaccaatatttgaacattataaactannnnnnnnnnnnnnnnnnnncataaaaagttttcttaccatcattatttttatctatatgctattcaaataaatatatcatgttaatgtacatttagtatattaccaatatttgaacattataaactatgttcccacaatagacttgcatataagaaaattcacaaaaagtataaatatattgaacccttaaagtctcagaagtagaattgctattcagtacatatatgcatttgaaacttaacagaagcagccaaattgtattcaatctgttaaactaatttgctatctgatgtggactggactcagttgatctctcaactcacaggagaatcagggtcccagtactcaggtgggcaaggagtcagcagaaaaatgacaaacagacaatgacacagagagagtgctgtatctgaatgtaatttctcaaagtgagcatcagacttataatacagaagaaaaacaaggaagttaggtgatacatcagccaaggtacattgagatgcataatggctctttacacaaaacagagaaaatgcatacgtaaaagctgacaggaaccaggcagtgtttacaactgagattagatcagctctatctaaaattagctattcacaggagccaggcaaaagggctaatacgcccaggtgcaattctggtctattgtttgacccaccactaggggtcccttagtaaatacctaattatgctattcctctgggcctcgagaaagccatgcaccagagaagttccattctactaacccttacatgaactatacaatattctagttcctccttaaaccacaacccatgttctttctactattatgtaatgtaggctttctattattatgtaatgtgttatgtatgcaatgtctgtaatgagaattttaagttactttgttgaactagccctgagatttctagctcctgtccggcaaataggaatgcctgatttctaactatcaacactggaggcattttgactgaatgagtagcattacctataatataacactgactatcacaaggacaaatctggagcattcgtgctattgggatgccaaaactccaggagaaaagtttccgtgaaactttttgccttggggctgcgtccaagcttcactggagtgggtgtggcagctatccaactgtaagtgttgatctatccccatttcctgtacctttggcaataatttccatgatagccaaatctctttcttttaatggctctagattttgagtctagtctagtctttcctatgtagtttttctaaatcatattcacatatcttttattttttatttaaaatttttttggtccattgggactttataaggtgtatattaaatccaacttaatttatcagttgccatgtttcccccattgacttgagatgtcacattgcaaatccccacatgtgtttgaatacacttctagattcaccctgtattctgtattagcatcagtctggattcccgaagcttattctaacatttgctaagctgccttactggcctccttgctaactggactcttctctttcagatttccctggcaattctttattgttcattttatattaaaattgaacaatttcctattcttacctttactgtctacctaaaagaaaaactgctattatctgagttgaagtttatgacattgcttagggaaaaatagtttctgccctgacttccttcagtgatgaactatcactgtagttaagccagataaccctttccttcccaagttgttttattcatggtgtctcatcacagcagtagtgatcctgactaggatgcctggcacaggaggtcaggtgtactgggaaaaagaagccagctcaggttttgttgctcttccagatgggagcagggtgactggagttaaatgggacagacactcacagtaagtttttgttaattctttattgaccatcagcaattattctaggttctaggatctaatagaaatcaagacaggcagaaaaggctatttttagagaacatatattctaacaaaggaaaaggtagaatttgatttgccaacagtatatttgtgcctttaagagaatggaaaggggagggaggaggctcggttggtaaagtgcctgcctcatgaacagaatgacccggatgttaatctctagaacccagtaaaaaaaagttgatatgatagcatacacttgtattcctagtgcagaggaggtagaggcgggcagggtccctaaggcttgcacttaagaggtatagacttatacaccttcacacacacacacacacacacagagagagagagagagagagagagagagagagagagagagagacagagagagacagagagagacagagacagagagacagagagagagagagagacagacagacagacagagacagagagagagtgacagagagacagagacagaaagatagagagagacagagacagaaacagacacagagagatatgaaaagacaataaagagaaccagcaagatggctcagtgggtaaagaggtttgatttgcaagcctgatgacctgagttcagctcctggaacccacgtgaggtaggagagaactgactccacaaggctgtcctctgaccctgcacacatgttgctgtgtgtgccaccccctccccatacatgcacaatagtagtaacaaagtcttacaaattctcaagaagagaatgaaaggtcaattatccagcaacaaggaattggctaataaatagtgtatgttactctgccctaggaattatgaatgatgttaattgacacaaaggaatattcatgatatgctatcgaataaaagcagcacaattctggaatacagtatagtgtatacagaatgtggaatacatctgtacgaaggggcaaatgattagagacttacctagcttctccttattcagtgactaccgggagcttttctataccaggcagttttgtttggtggtaggtagacatgatccctgattcatttttttaaattttattttacccatattagcattttatcttcatgtaatgtctgtacaacacacatgtgcctggtatatgtcagatatggaatctggaggccttgggactagagtcactgacgcctgctagcttccctgtcagagctggggactgaatcttgtgccactgctcctaaccactgactcttctctgccccctgattaaattttgtctgaccttttcaaactttttttttacaatgatcttgatgttatttttgttgaaaaacaattaaatttagaattccatccgccctgggccatttatgtgatataaatttgttttctgaatcatcattgactatacaaatggaatgagagacacacagttaaaaatggcagtcctttcctatgcccagtccagatcttatgcaagggaggaggtggcccaggacaccagtttccaaagtggccagaactggattctgcttggcacagaagcaagtagcatcctgttgctgggactttgtatctttggctgtttatagctagcggttcaaggaggccggccattctagcctggtgtcagtttacatctgctgtatgttacttgannnnnnnnnnnnnnnnnnnnttattttttaatttttgtgattataattacaccccttcctcctccaaaatcctgccatgtacccctctttgttctttttctcattcatggcctctttttaattaactgttcttgcagatggacatatatacatatatattcctagatataacacactctgctttctaaacttatcatgaagaagttgctaatttttaaaaaagaattatttatttttttatgtatatgagtgcactgtcactgtcttcagacacaccagaagagggtatcggaccccattacagatggttgtgagccaccatgtggttgctggaaattgaactcaggacctctggaagagcagtcagtgctcttaaccactgagccatctttccagcccaagagattgctatttcatagcataaaaagttttcttaccatcattatttttatctatatgctattcaaataaatatatcatgttaatgtacatttagtatattaccaatatttgaacattataaactatgttcccataatagacttgcatgtaagaaatttcacaaaaagtataaatatattgaacccttaaagtctcagaagtagaattgctattcagtacatatatgcatttgaaacttaacagaagcagccaaattgtatccaatttgttaaactaatttgctatctgctgtggactggactcagttgatctctcaactcgcaggagaatcagggtcccggtactcaggtgggcaaggagtcagcagaaaaatgacaaacagacactgacacagagtagtcagtatctgacacagagtagtgctgtatcagaatgtaatttctcaaagcgagcatcagacttataatacagaagaaaaacaaggaatctaggtgatacatcagccaaggtacactgagatgcataattgctctttacacaaaacatagaaaatgcatacgtaaaagctgacaggaaccaggcagtgtttacaactgagattagatcagctctatctaaaattagcaattcacaggagccaggtgaaaggtctaatacacccaggtgcaattctggtctattgtttgacccaccaccaggggtcccttagtaaatactctaattatgctattcctctgggcctagagaaagccatgcaccagagaagttccattctactaacccttacatgaactatacaatattctagttcctccttaaaccacaacccacgttctttctactattatgtaatgtaggctttctattattatgtattgtattatgtatgtaatgtctgtaatgagaattttaagttactttgttgaactagccctgaggtttctagctcctatccagcaaacagcaatgcctgatttctatcaacactggaggcattttgtctgaatgagtagcattacctataatataacaccgactatcacaaggacaaatctggagcattcgtgctatgggatgccaaaggtccaggagaaaagtttccgtgaaactttttgccttggggctgcgtccaagcttcactgaggtgggtgtggcagctatccaactgtaagtgttgatctatccccatttcctgtacctttggcaataatttccatgatagccaaatctctttcttttaatggctctagattttgagtctagtctagtctttcctatgtagcttttctaaatcatattcacacatcagagagagagagagtgacatacagagacagaaagatagagaaagacaggcagagacagacagagatagatatgaaaagataataaagagaaccagaaagatggctcagtgagtaaagaggtttaatttgcaagcctgatgacctgagttcagctcctggaacccacgtgaggtaggagagaactgactccacaaggctgtcctctgaccctgcacatatgttgttgtgtgtgccaccccctccccatacatgcacaatagtagtaacaaagtcttacaaattctcaagaagagaatgaaaggtcaattatccagcaacaaggaattggctaataaatagtatatgttactctgccctaggaattatgaatgatgttaattgacacgaaggaatatccatgatatgctatcaaataaaagcagcacaattctggaatacagtatagtgtatacagaatgtggaatacatctgtacgaagaggcaaatgattagagacttacccagctactccttattcagtgactaccgggggcttttctataccaggcagttttgtttggtggtagatagacaagatccctgattcattttttaaaattttattttacctatattagcattttacctttatgtctgtacaacacacaggtgcctggtatatgtcagatatggaatctggatgccttgggactagagtcactgacgcctgctagcttccctgtcagagctggggactgaaccttgtgccactgctcctaaccactgactcttctctgccccctgattaaattttgtctgaccttttcaaacttttttttttaaacaatgatcttgatgttatttttgttgaaaaacaattaaatttagaattccatgtgccctgggccatttatgtgatataaatttgttttctgaatcatcattaactatacaaatggaatgagagacacacagttaaaaatggcagtcctttcctatgcccagtccagatcttatgcaagggaggaggtggcccaggacaccagtttctaaagtggccagaactggattctgcttggcacagaagcaagtagcatcctgttgctgggactttgtatctttggctgtttatagctagcggttcaaggaggccggccattctagcctggtgtcagtttacatctgctgtatgttacttgaccctttttatgttcctgttgaagttgcctctccccggaaatctctgtcattccattaaccccgctgccgcctctgcacgcagctgacctcctgcgttggaaaacagaatgtattctggttacattttaaagtaagttttgggatgagttcctggccaaggatttgactctagttatctgttcccacagactaaaggggaggggcttaacaaagcctctgtgttgttctctgtctctgtgcttccgacctcctgaactgggtcagcctttcctgtaatgtattcatgatcctctcctggtctttcaatgctggatctttgtatatatgctgaagaacaaacaagcaagcaaaatccatcattttctattttttttttaaaatactccatgcttcttataaatcataatataaaaataaatgcatactgatacaaaagccaaaccggaacaacagaaaatggcccacatacaatccctttccctgtgaataaacgagtgtattttctttatctttttggctcatgggattgcctcagcttttgttctaacatttatatagcctgtttaataaatctcaaactctatctggaccaatctttttaagctatgaagaatggatactatcaaaaaaactttaccttttctcatatcatgaaatgtcacaatgccagtttcaggaaagcactggtcagcctcagttcaaggaaactgctgatcaagtggccaataaaatcaattatcagtggacgaatcccaggaggcattttagtactgagagctcctagggtcattgatggctctgacattagtgacctatgggaggaagaagggaaaaggtccctctgggccacatcactctgagctgttctctcccagcctgggagggagatggcctgtgacctttgtgtgatcttcatggaagccctcctcccggatgcactgtaagcagacagacaggcaagaaacacagacacatggggtcctctttcaccagcaacacctaggttttctgtaggtttcttcttgtcatcactgctctctctggttagctgatccttttcagcctagatctccccacacttaaggtttctctcagcctttgcctctgccttctaggtagtctggattatttgcacaaagacataaggcagttctgaagatgtgatcttttctggaccatcttctatgttttccttggtatgcagaaattatttaagcgctatatccttatgtctactgatgtccctggtgtctaattcctctaccaaacctttctttcaactttcacaattccaagggcgtgcttctagtgccaggactgtcacctttctgttctttgcccccatgttccctccgccttaaaaaacattagttgtgctctctatctggaagtcagctggcatatcccactttgcttcagaagtagctaaagtctaacttacagataaataatggaagttgttttgccttgtgaccctctcgacagggcttttcttacccatgttcccagcatcccctgctaagttgcccttttcattttgtgtccttaattttattatgtctgtttcctgtcagtacacttgcacacatctgaattttcaccagaccatcacaaaatggtttctgtctacagtgaattaagagtgggctgagcacatggtttagggcacaagggggcagagtgtattaatcatgaatgaaatattgaatgaatctaggttcagatgttgtccgagctagctcagacctcatttatcgatcctgccacttcttttgtatgtattctgaaaccccacccatggtttgaaaggaacagaattctctgtgtataattagggagaagaaagctcttcactaggtttatagtcaatctaaataagcaatgggttttcaaatgacattttagataaaattaacctagatatataaaaagtacattgcaactgactttgtcacttagcttgtaacagatttcaaaagcaaagaataagatcctttgaggaggttgaatcgctgttacaggattatttgaatagacctcatcctccattttggcgggtcattggagtattaataatggatggctgctgtgcttggcagtcagatatgttattcttatccatttttatttcccaaaggagcctctggaaaagggcaaagagggtagatttaaaaccacattattggaattcaatacctttcatcttgttttgtatgtctagggtttgttgaagagtggtactaatatggagagtcagccaagcatggggcaggcggaataccaaaatggattttcttaagtaaaatataagttggattctgtgttttaatttaggtctcaatgaccaacactaacatttccagaaaagattccaaatgtgtgtttgtgtattttgatcattttgattttcatcgggtaaaggaatggacaaaaatctaccaaggcagattatttaggctaatgaaaataaataaaaaattacataggtaaattacaaaaataaaaacaaataaaaattatgtaagtcaattataaagtataaatgtgctaattcttaaaaaaagctatgacaaactgaagttttagtcatgtaaagtgaaccactgaaggaatactaagttctcacatgcctttgtccttcctgtgatcacacaaaagcccaagaggggatgaattcgaatcctagaatgctagagtgtcatgatcactctgtcaagccttggaatccatcctcagaaaagtgttctctcttggggttttatctgaaaacagaaaagaagctggctccctatccagccacacccaaaggggacaagtggggcttccattatgcactccttttatagagctcttgcaacttacttttttttctcagttaaaatatatcttgaccatcagatggcattaaatgtactttggcacattgtctatatatttagtggttctcaagctgggccccaagccctttgggtcctgcatatcagatatttacattatgattcgcaacactagcaaaattacagctatgaagtagcaatgaagtagttttatggttggggatcaccacgatgtgagaaaccatattaaacgatcgcagcattaggaaggttgagaattgatgctctacggcaatattgtatttatcaacttggatgttatcatggtttatagtgatagagaaaaaattaacaactcaaggaccaaaagagaggtgtactggacctgttgatagatccacaggttgagaactgctgtcctagaggaaattcctaggaatgaattactacatcactagagataatggaaaatttccaaaaggctaactgaggcttactttctaaccattcctatgtgaaagagagactgacattatagagtctggagtgactattttctcacatataaggtcctaaccatggcctctaaaattagctcctcatagatctctgatccttcaagggttcatttcctgttctaggctctcaaaaaaaatctcttaaaagcctgtgtccattgtatcagttcccagtaggcatgtcgtgggtgtatagaaaccaaccgcacagctagttgctgtagatatctgtgtggaggaggaagacacagaaacacatctttagaagttgtgccacggccttagtggtctaaatatataaagcacatctaaaacaaggctggcttggccaaggttatgacttgagtcagcaaagacatcccaaagagaattttcatcttttttatttctttttttagacagaagaatttatgcataagtctagagcttgcatttataaatgaatctttataactagaaacactactaagggccttttaagagagttgacaggaactttccaagtcaagtaagacaaatataaataattaataggtattgataacctccctccccacaagagaaatctgaaatgcttgcagtgagggtgagtgacacagtcagatagacaggggcctcctaagaataggtgtatttgtgttgctaatgcagagaacttgagggtggagtaatgtctctgaactcaccaggccagccaaaggcaaacaacccaaatgggacattaactccagggtggtgcactgcacttttggcccttattctgaatggactgtagatccttcccctccaactgctgctctgaacctacattgttaacctaccaagtgagctgttgaaggggccatcacagtgtgtcccctacagagatgacccatgttcattattggatggctctaagctgtaaacagtcacagccccatggccttgcattgctgagaataaacgatcacctctcaaacctcgggtgccaggtcttctgtgttgctgattactgccttcgtcctattgcttattctatgagagtctatgaaggctcagtggctacagaggcaggaaacttctcagggtacgcctatgaccaagtgacttctttcctggatggttgttgatcatgtggttcttgtcacatttcattgaaggattttgaggggctggagagatggctcagcagttaagagcactgactgctcttccagaggccttcagttcaattcccagcaactacatggtggcttacaaccatctgtaatggggtctggtgccctcttctggtgtgtctggagacagtgacaatgtacttacatacataaaataaaaaaataaaaaaataaatctttaaaaagagaaggattttgaaggtaataatgaaacttatgaaacctgaaagttttattaagttatgtagattgtgactctacagtgcaagttatttaatctcaaagcctcgatgaaattgcctaatgacacattgcttagcatcaacatctctgttgttgaatggtgcatgtaaaaacagaggagaaaaatagaggtatatcagaaaaagttacaagttctcctagaaattatctcctagaaatttcagtactgacaaataaaattgcaacaaattgttttctggggcatgaaaacaaaggatgagagttctctgggtacctctgggtgatgttagtagtgggttatctttcccaattctaggtgtctttgtttctatagctgtagcagcaggtgtatacaaggtgtctgcttcagcgtcagtcagcccagacgggtgacatatggctctatgctttcttgcgagcggcatggagaacaccagcttcgtggctgccagtgtgtaagaaaatgtacggccttcctcttgcttctcagccctcttctcataaacacaaaagaggattcatcagcccaagcctatcaatgtggatgcacctcaaagagtaacaaactagcccttatttttaagggtggtccctcgggtttgtgaagtatcatatcttcttcaggtgatttggactctgcaaacatcttttggacattgttcatctgtgtggcagggtcctgttggtgtgaacagacccaaagacacatagagcaggtttcctgcctctgggaagacaggctggtcagggaactgtgtgagttggagctaattataacagtaacatcctttccaggggcgattttattgctgtcatcatattcatgtaattctaccagtaaaaatgataatcattgtatgcagatttataccctgttagtcataaatgccacctaccatccttcctccctatgtccgttatagttgttctcagtgacgaagaaaaaagtagacactagaaagagtgtttggtagaaaaaaagaaggctccagccacatatgtagcagaggatggccttattggacatcaatgggaggagaggcccttggtcctgtgaaggttctatgcctcagtataggggaatgccagggtgtggaagctggagtgggtgggttggtgagcagtgggaagaggaacgggatagggggttttcggaggggaaaccaggaaaggggataacatttgaaatgtaaataaagaacacatctttaaaaaagaaagaaagaaaaaggaaagtgatttatattcctggtttggaagacttttttttttttttaaagatggctgcgtctctaaggtcactagctacatggaagactaagtcgagtgagtactgggcaacataaacgtaatgtcgtccacgtctttttgtcctgccagtgatcctgaaggtcacagggatggctgtatggtgagaggagagtatcactttcctgtgttagtacaaccagctctgaggggaaatatcgtatgtgtcaatacgtttgaagattcactgtccgcttccgctcacttctgaggccgccctctttatcctctgtactctccagaacacagtgtaggagctctgaaccagttagccaaagaagtcgctgctggtactcacgttgtcatgaccttaagggctctgctttctctttctgcctaggcctgaaaggattgtgtgaccaaaaaaacccaaacttctatgtttattttttgctgtgacgatggacttttactatttttaactgattagatagcagaagttacttccttggttcattgtcctgcaagttttgaactgtctttttataattatgggttgaactggggacagtttgagtatctttttaaaacattgttgttcaaagggtatttttaaaccatccccagtttgttatttttagagacatctgttaatctaatcatctgagcgagcctgctggacaacaacttctctcatagggaaaggtttaaatgaatgaaatccacataggaccaagggagattttaaaccaagaaagcaatgggtaatattgaaaagtaaacctgaattgttttatctatgagaattacttttttagttgtcagtttgtgaaagtgaagttgataatgttttcagtcacaagttaattggtagccactaactataaagagaactatgagatgtgcctaccatttagttaagaagaacatgcacagaaagaaacgagtcttctgggattgaagctagcttgctacattctgttagtgataaaaattgtcaagacgtaggaaagagtgtcctgttgtgaaatgatatcataagaagtgaggtgcagcagctcatttatctctagatacacgatagtggcacatgataactttccaggcaaacgtctaaaggcttgtcttgatcacgtcaacaaattttctgtattcttctacctttacaatcccaaggtcctctctgttcctagacatggctaccaagggataggaggtgtattaaaggcaacgtctgaatctgaagccttgaacctgtgtaggttagtagatcttttattatcttatccttctaggggatcattcatgtcaaggtcccattgttccaaggtgaaatacttggaaatataagagcggaatctggaagtcagataacaaaggtctacaccagggaagaggctgaaacaagcagaaatgcaagtaagactccgctgcaagtagggaccacagggctatgtcagcctaagggcatgaggatgcccagactcagccttccctgctgaagaatgtcatgctggtgtgctctatggtatcctgtgtgggtgggatggaatctgtcttttacacatattttcttcagtatcttcatccatcttctaacctttccacctctaaattcagtttcctgccaaccagcacttttctctctctcaaaacagaaaatagcttgaaattaaacagtatttgttgggttactataattccctatgaatctttgctcctatctgagcttaattaatcattgtcatgctaagtgtttaaaaattctacctgtggcatgaaatattgtgtctcccattaatactctcagtggcaaataaaaatattttgtgtgtttgttcttaagatggatgagtgcatagataaaaagctgatcgagaaaggattgtttgtatcctaaaaaaggattttcttatttcttatttagttttctctgggtagcaaatgtgtatctaccaagcggtttagtcatgagagttgaaaccagtttctagttgccatctgcttcagtcacatgggcagttgagtctagactcatttcctacatgcatcagttaggctggccaagcgccccagactgtgcttccaattcaccttgttaaagacattcctacagggcctccaacaggtcagttctcctggagcttttaaaatacaaacagttcctgcagggaggcagtcattcagctaattactttttgaagtctctaatcccctagattcgactgcattaaattagcaggctacccacaaccttcagcttcttttatataaatttccagcaaacaggcaattgctaagaagctaagtattagatctctagactaattattctgtaaatagttgtttaatatctgtgcagaatgacagaggaaagcacatttttctattactagagagcacatagttcagaattacttattttttcttcaatcaaatctttgattaggtgctcaaaacaaagtccaagtttggaaaagtgggtacatacacatacatgcacacacacagacaaatgcacacatacacacacacacacacacttgcatgtgcaaacacatacacatagctttttattctacagtttgtgtgctcatatggttttggtcaggttaagcaactggtggtaaaataaaaggcatgaaataacttatagattctagaaagttgcatcttactatgcattatttagttttagaattttaaataagggtttcatgtgcacattgccagaatattgatcaggggaggtgatttcttttcccttcagagctcgtctgcttctttgggaactgtaccaactccctttccttttctagacaggcaggaggatggctgactggcaccagcaatacttggtgcccctttaagaattgtttctcctagatagttgcctgggaatcttgacccatcgcctggctgactacattcctacattcactatgaaggagtcaagtcatgtgtcagaggaatgggtggcatggattttggcatgtggtgccatagctatatataacctattgtgctgggtgctgcggatgggtgagaaattccttctagtctattctgagcaagtggcacaagggttattccagctattgctgattgagtctgtaggttccttttatttctattcgatactatttgcaaataaccaaacactgtgggaaagtcaggagactgttctctggccagcacattaaaaggggagctagaagtttaaaaacttcttattctggagcaagagtggggtttggacttttctaaaagtgagttatgagttacgaagtgtgatacgtgtgctgacattagtgctctcatgaagggaggagggttgcggaagccaggatgccctcttcttttcttacctaatttggacttggtcagatctgtcacaggactggtgcattattggtgcactgtatcagaaactatagacagacatgtctgtgtgtctctgtcagaattcactcagtaatagcaaattggctacaccatttcattggctgaaatttgccaagtagtcctcgtttttttggatagctggccattggcaagcataggctcttttgtcacaatcttaattacagatactcacttttagatcacatggtttatgtgacatagtataaacccaagtgtagttgcagaatgcctacaaagagcttgcagaagctgcaacagagttcaagtcctccggaggaggaaggcagaggaagaaagtaggaggagtcatgaaaagagtcactgtgcaggcagatgtggggcaaccacaaaggcaagccagcattgcagcgttaagccaggcctctggatcaagtcaaggtgtggtacaggctgccagacaagacaagatgaagtacatgcatcccacagaggtgctgccatgaaaccaaaaaaacagatgggctgatggtggccctttgagttggtcatcagcagtagggaaggagctaaactgaagccctgggtgctcaggaggctgtcggccctttcgtgctcacagtgaggagtcagaaaacaggtcagtggagaccaaagccacagcagtgttaggagctcctctgtaggggctacagagaaaggtggtgtaatcttcgttagtctgttttgtttgatatgattttaatacacctacgtactgttatgatcccagtatacattgctaaagtttatagttggtatcttcttgcttttaggagttggcctgtgctttgtgggacacgctggatgggcggcatggtgttcatgtgcacaaggtgcagagtcatcctgcgttttcactcagaacagagccaaatgttgattgcacattggagtcacctagggcaaagcacagtctaaaagtgctattttacatagttttggagtaatagagcgggatatcagcatgatgggtgttctttcaatgattataatggtattgtaatgaaaccaaaatcctttggcatgtgtcttagtcaggatttgtattcctgcacaaaacatcatgaccaagaagcaagttggggagaaaagggtttattcagcttccacttccacattgctgctcatcaccaaaggaagtcaggactggaactcacacagggcaggaacctgaagcagaggccagggaagatgttacttactggattgcttcccctggcttgctcagcttgctttcttatagaagtcaggactaccagcccagggatggcaccacccaccatgggccttcctacctttgatgactaattgagaaaatgccttacagctggatctcatggaggtatttcctcaaggaaggctcttttctctgtgataactctagctgtgtcaagttgacacactaaatcagccagtacagtatgtcaacacggttgcttgtctggattagagatcccctcagcaggtgataacgggacagtaggcaagtgttcattggcacccatttaactttacatagataatcaacagtacttgagatgacaatggtgggacattgataagacaataattgtattgtctagactggtaacaaagtcattttctcttctagatatttgaagtgttctgcatctgtaggctcaaggagacagagagaggctaatatataaaaaccaggagtatgagagtttgggaacactgtcaagagaggggctggaatgttagccacagatgctgggctaggagagaagtggaggaggggccagagcttgggggtgtggaagaatatctgaaatgggaataaaaaaatctggaaaaagaggaggcggtggcctgagagacctactgatgttgcacagatggcgtgatgacagggttgagaacagagccgtggcagagagacgcgtcaaaggaataggctggaggcctagatgttacaaaataaagggagtctgaggtgcgtcagcatggacgtgagcatgacttaagatgggggtatgtttggtatggagtggggaaaacatgaaccagacacatctgtcagtgtaccgtggcttaagttcttttgaaaaattcaactggaattcaacacatacatgaaatcagaaggttatcttcgtggcgtagaaagctatgacactgatagcagtgctcagaactcaaatgtttctctgaaagctttcccttaattaggctccccaattttaataatcagtgatagaacaaagcctgacggacagaacacttgtatgacacatatctactattttgattaacaacttcttaaacgatcattcatgggcttcatgtgtctgtcctgacagccacggacaccgagaacttgtgaatcaactgtcacatcagatatagaatctgcgctcctaatgtgtgagggtgactgacattttgagttagtgattttcttttttttttttttttaaagatttttggttcttttttcgcctttgcatctcagaagtaattctgcttgacatcgagggttggaaatttagattctcactgtgattttgagtattaaatagtgtcgattggagagtgaccattgccccttactctgacagttccatagctcatttagaatggccggggattcctgtgaaatacattctagcctttctcagtcctagactaatgtgtctatgctgaaatgtgtgctcagtatagcttaccgctgtcagatagagcagccggtccttctctagaacccaaacgaatgaaaaacaagagtcagaatggacccctcagctgagcctttagttagaatacctcaaggaagaggaacatttttgtgtgtgtaaacgggccagtattcaggactatggctgcaacgctgtaatagaacaaacgaggccagatgtctaaaacgtgctgtggctgcccttgtgcttggcgagtgacctttcgtaacccttcctccccagcataaagctaaggtgccccgacatgtgttctcacacacttgctttccttcgctgcaggatatttgcgaggatatttccgaccacgtggagcagatccatgccctccttgagacggagttctccctgaagctgctgtcctactcggtcaatgtcatcgtagacatccacgcagtgcagctgctctggcaccagctccgcgtatccgtgctggtcctccgggagcgcatcctacaaggtctgcaggacgccaatggcaactacaccaggcagactgacattctgcaagcattctctgaagaaacaacagaggtgagtggcctttggcagcaagtcatgctttgtcaggtgtttccattcaaagatggaaactaaaatttcagtttagagatgagagggtgaggtttgtgtagggaagtaagcaggtctttatctaggatctcggcggagtgagtaaaagctaaacgcttgttgtatgaagcaggcttttgacataagtttgtatagatgtcatccatggatgttagcacttcctgatttcgtgtctcttcctcaatcatttaaaacacagttgtttaatactatgttcaggtactaggaatatgatcaaacccgcatttctatagggtggagggcagaaagacggctcgctcagcaattaagagcactgagtgctcttccagagggaggttaaatttccaaccctctcatgggagctgacgactacctggaaccccagtgcctggacccctcttctggccccagtgggtaccagctaagcatgtagtgtgcagacatccacacaggcaaaacactcatacacataaaatacccactacctttgaaaacccatcatttcattgtgaggagatttaaatctagtaggggatagaaagaaatgaagagatgctaaggccaaactctgataagtcttcaaaatgtagtaggatgtcaggaaaagaaaccatgggctgataatatggtatttgtcttcttggttctatagctctttatacttagttcaattctttgttattactttttttgggaactcatgttcttcaaatttataaagctcttgtatgtgtgagattaagaagcttctaaacaagtgttgaagaattcattaatttattagtgttccaatgactgtttaactatcagcactgtgaaacaaatctgtgcctatttttatagatgatatacacttactgatgtttttgtttattcaaaataaagatgccattgtagaaagtccatgtggggtttagaagacagtgggaatcaagatctgccttgttctcctctactaagcttgccagtttctgcttgcagctagcactccttgctgttgtgactgggactgtggggtgagactgggggcagtgttggctttcagatgccatagctccccatgcccccagagtgtgtggcgttcacggttactggaggctacaggttccagatgaccaccgttcctatctaccacctctgaacatacaggctgatggaaatcagaaacttgtctacattctaaaggggtctttcttcagacctgcccttgtcagctgctggaagggacatgaaaattaagttagtcgattgccagttctttcttataggaatctgaagatacagcagtgtcctgggacttattcttgatattgtatggattatattttgcatttgaacttattacatacataaagtagaaacaaaaaaatggcgaaaggctattgactaattgctaatagctatttttttctctgacgtcataaatttatatcatgtcgtatctgttctgattcttacaagaagagctaaaaatttatttataaatttagtctgaagcagttccgcacctttttatatttgaggctagttttagaattgttgcagagagacaaaaacccgccttgtgaggaagggcagaggcacagtggccatctagcgctgctttgtgatgtcttctgtgagtcaggttctgcttgctctgagcctttgcaaaccctttctgttcccaattgtttgtgactctagtgctcctcggggagggctgacgggagcttagctttatttgtttttgcctgcacaccagaactgagaaagggcaggaaagtcagataaaagtcccagaatacatttggtgatggaaggtttgcagaaaggaaatgaaatggaaaaaactttacaaactaagatgaaatactgatagcgaacaggaaagcatgacggagaagaggcttgctctatatcgctaacagccctcaggactaacagtcatgtgtgtacctctgcgatctaaaagtgggaaaaccaacacatacttaccccttggtctcatagctgtgtgagacttatgacttcagagagcgtgtttgtttttcttaaaattgcccctgcaaggtcagcagtgtatagcattacaccgagcaatgagctaacgtgtaccaggccattggtttaatctccaacatgacccttcttctcccacctaaaacccactgcatagtgaagaccttcattggttttattgttattcaatttccctcacctctgcctccagcagggattaaatccaaggtgttggacactctgggcttgcactgcactactggactatacttcctatcccaagactatactgtttctgcttggtgaatctattttttccccaaagggatagagtttttccatatttaaaaatccagtggttacaatgtgaatgtttttgagtatggattttttaaaaatcaaaacaataactagagatcccaagagttttacaaagatctgttgtgctctatgctccgagatgcagtcatctatttatctaacatatagctttaacaaatatgtccaacatttattgcgcatccacttttcaagagtttgaaggctaaatatgctcctggtcctccctgtttgtgcaaaggcaggtagctgactctttcagcatctagctatctcctgagctctgaaattaattcattacaacacctttctttagtacttttaaacctcatggaagtaggacagtaattatgatgagaacaatagaaatattgtaaatttctactagttgctaatttaaaaggtcttaggggtggcttaggaatataaccatcatttataatagcttttaaattagctattaattgtattaattctttgataattccatacaatacattttgatcatatttaactcccatttctcccctaattcctaccagagtcacattccctaccgtattcccctcaacttcttgtcctctctttaaaaaaaaaaaaatccaccaagtccaacttgtgctgcataaatccttctggatgtggggccatctgcttgagcatgctcaatctgagggccatgccattaaagaaaagtgatttttttttctcttccggacaccatcgcctgtcaatagcttcccagccagatgtgagccttgctggatagcgcctgaccttgcacagacgctgtgttgcctccacagctgctctgagctcatgagtgtagtgttcctgtcatctccctaagatgatactttccttcagtcttccctgactgctggctcttacaatctttctgcccttctctccagcaactgtctctgaacctcagaaaggtagagatatagatctcccatttgtcttgtgttggggtcgccaggactcctctaaccgtcaacttgggtagaggcatcccatacctagcactagacctgttatttagcatcctatagttcctgggagaaacattgttctctgtatagggcaactccattttaaactcttttatatgactatataaatagtatctttatagaagagaaactcctaagtaatgaccaactaaatcaaacactttaaaaaaacacctccttttagattgggaatcactattattctcttaaaaattgcaagcttgtctcactcatgcctggatggtttggggttctgactttgtcatttaatgagacttttccaggcatgaagccttgaagtcacacaactatacttagctcagtttccactgaggttagaggttaatcttcctctctgctcagggcacattggtgctagaggctgctatgccttcctcctcagcatacatcattgccagaaggtaatgcagcaagcaccaagggtgagcatccactgagtaggtatccatgtaccagactctctgtcttggtattttattccctccaagcctttcaatatctttttggcatggcttatcacttcttttcctttaaacttttgtgtgtgtgtgtgtgtgtgtgtgtgtgtgtgtgtgtgtgtgtgtgtgtttgcatatgtgctgtaacatgcatgtggagatcagaggactagtttcaggatttggctttcttcttcttccatgtgtgttctcgggttcatactcgaatcgtcagccttggtggcaaacatacttagacactgagctgtcttgctacacatcatttccagtttgtagatggaagaaacaaaggttaacaacatcaagctgctgacctgtaatcatagagctgattagtgttagagcaagggcttgactctgaaactcagtgagtctcatcgtttgtgtcaagtcaaagtacatactcagaggaggaaatgacacacaggcagagagaaagagagagagagagagagagagagagagagagagagagagagagagagagagagagagaaaacagatatcaccattcattcattcattcattcattcaataaatgtatctttgagtgtcagcaggtcagcaggcttgtccaaggccttagtcacgaggccacagtgacttattttcttcctactgctgtaatttaaatgaggacaatagagcggatctcagaagagagtggtgaggattaaatggagaagtgtaagaatcagacacccccctcccccatcttgagacaaggaagccaggcttaggaaaagttagttatcacaattatttgtacaatatcatctgggtattgtagaataagagtgttggggttggaaatagatacaagaggagaaggaatagctgaagggagagagcattccagagacaggatgaatacacgaataataaaatctcatgtaagacatggggaggtccagtctcaggataacctggctgaagagatgtgtgggtctagcaattggaatggggggctggggcttgggggctgtggtcagtgccttcactcccaacctcttgcgaagaaaacgagggtcacttttgcctcctttccttcatgtgccaagggccttgaccaggctatcatccagcttggttagaagaatccggtttttatcctacatcatcaattagaaatctccctgtttgtcatgtgatatacgaactaaattagtaatgagacaaaagcctcaattacacaattaaagagtaaaaacaaaaccttataatgtgacaaagaaaactgggagtgcttttgaaactattaacgtactctgttttaaaagaaaagatagaaccggaattttggggttgatctcgaccatctctaaggcgctatggccaagttaaagtttgaatacttaaaaggtgaatggtgtatataaagcaatgtagtaattggttatgtgccttttcacaggtcaggccagagcgactgaaatgggttcagatttcacatggaatgcagttaggttcgtgtactcaaatgttacactcactgaaaccattaccattgtgtgtttcagggccggcttgactccctcacagaagtggacgactctgggcagttaactatcaaatgctctcagaattatttgtctctggattgtggtattactgcctttgaactttctgactacagtccaagtgaggatctgcttggtggcctgggcgacatgaccactagccaggccaaaactaaatcttttgactcttggagttacagcgagatggaaaaggaatttcccgagctcatccgaagcgttgggctgcttacagtggccactgagcctgtcccttccagctgtggagcagccaatgaggactcatctcaagtgatcctttcagaggaccacagaggtggacatgaggaagatggcgctcttgaacctggagagcagctgggctcaacactggagacgtcttccttaggggacacactgacaaacgctgctgaacaccctccggagacagcaaaccaagactctacttcctctccgcagcttggtgcgaaaaaatcccagcctggtccttgtgaaatgatgactcccaagagatccatccgcgattgctttaattataacgaggactctcccacgcagcccacattgcccaaaagagggctatttctaaaagaaactcttaagaacgagcggagaggcagtgatgggaaggggagggtggttgacctgaagcctgagctgagcagaagcaccccgtccctggtggaaccccctgacagatcgaagctctgcctagtgttgcagtcttcctaccccagcagcccttctgccgccagccagtcctatgagtgtttgcacaaggtggggatcggcaatcttgaaaacatagtcagaagtcacattaaagaaatttcttccagtttgggaaggcttactgactgccataaagagaaaccgcgactgaaaaagcctcacaagaccttggccgaggtgtccctgtgcaaaatacctaaacagggaactggttcaggaaagcaatccgagaataccaggagctcagtcgtgccgaccatggtgtctcctggagctccgaaagccacggcgagaccagcaacagattctgcgtctacaacctcaggtgacgcgtgccatcagagaaatcggggtggaaaattgccagcgcagtcgaaggcctccagctcatccccttgtagtcacagcagtgagtcctctcttggctcagacaacatcaaatccccacttcctctcctttcaaaaagccaaaaaggctccccacccgctccatgtcacgccacacagaacggtcaggtggtggaggcctggtacggctctgatgaatacctagcgctgccatctcacctcaaacaaacggaggtgttagctctgaaactggagaacctaaccaagcttctaccccagaaacccagaggagagactatccaggatattgatgactgggaactgtctgagatgaattcagactctgaaatctatccaacgtaccatatcaagaaaaaacacacaaggctaggcaccgtctctccgagctcatccagcgacatagcctcatctctcggggagagcattgaatctgggcccctgagtgacattctttctgatgaggacttatgtatgcccctctccggcatgaaaaagttcactgatgagaaatcagagagaccttcatcctctgagaagaatgagagccattctgctacaaaatcagccttaattcagaaactaatgaaagatattcagcaccaagataactatgaagccatctgggaaagaattgaggtaaggttagttttaacctagtgatttcttgtctgggttttaaaaataattccagggaagtagtcacctccttcccattctttatcaaatatgttaagttttcaattaaactttaaattcttcaaaggaagagatggaaaaacaattctatccatcccaggagccttgactgctgtagaattctgttgatcctactcaagctgaacagggtacctgacaaacgggcggttgctgggaaacagcttacagcagtcacggcacacacatgggatgcgcatccaatgcagacacccagtggggcatcacagtgaccttccacacctctaaatctccttccttagccctagagtgactctcgctctctagcaccttctgttggaaagaccactcatgtccaacttactaaccatccctgttttctcccctcctcttccttttggggacctgtggcttatttctaaaccatctctcacatgcactacgtgggggattttgggagaagagatttgatttggggcaaatctgtacttttggaaggaattattggatgtgataggacctttgaagacagacatcaggactccataatatagcttatggttttattctccaagaggcatctagacaaagattgactttctctagaactctgttggaaataggtctagataattttatcattatttctttccattggaataaaattgtccataccttgcataatgtgtatagctctttactatgtataaaaatcttccagatgcacgtttaagcctaattctgccactatgcaaggaggttatctacaaaatgaattattcttctatactgatagaaacagaggtttggtaagcctaagttagttttataagctaactaactaggttgacagacatatcaactggatgatacttttgcttggaaagctaagatgcaaatctgtgtcttttgattcttcatcatttttactgttgcagtgttagaaagatttctcctgcagggaaattttaatgggagaggaaaacaagatttggtagagaatatcactgtaaccctgggtctgcccaggtacttctcttgtcttttatatgttcattgatgaacattatcaggctaggcactgctacagtacagtgcatatggacagaataacctttttaaatgaaaagtcaagtctataaaaataaaattagcataaatatataatagttatgtttcaaataattgtcaccatacatcaagtatttaggtatctggtcctcaccacaatcctggcattaatttcaaatggggttaattaattggggataaaaatatagatgaggagacagaggctgagagacaccaggtaatctctggagataacaccgctgacttgatcaaattctcagagctgtaagtccaaagtcaggacttgaatgcagagccagccttacctgagcagtgtgcaccacggctcccggactggctagagaaactatggcggccttggtgagaaccagtgtggagtcaattttaggggcttctgtgaagcagagcaggaagtggggtagtgtcaaagagggaatgcaatcaagcaaaggagtctaggccttgctcggccaccaagggctctgaggccgttttcccattgtcactccctggtgttccctctggtccctctgaacctcacaaagcagaagatagacgacatgctaatggctggttcacaggaaggactagtagaccgtgatggaactccccaggacaatacctgcatatggtacccagcatctcagctcccaagaatcctcagatgccctgtcactcacctttgtgtctttacactgatattgataggaaggatttctttgtagtgtacttttatttttgctcctttgaaacccgtttttgtttattttttgagattataacttaattacacttctccctttctgtgattccctccaaaccctcccagaaaacctcttcccactctccttcaaatcaatggcctcttttttgcatgcgcgcatatgtgtgtgtgtgtatacatatatattcctaaatataacccattgattgagtccatgtattgtttcttgtatcaatgcttgcaggactgactggtactgggcaactacttggtctgctcatcctcccggaggagcttccacccccagtattactcagctgcctgtagctctttgtgtagggttgaggcctcatgggctccccgcccccacctccaccccatttggaaacccatccttttaatagacagcatatttacatagtttaggaactttattatccattagctctccctccacctctggaccctgtcttgggttcggacctcaggtacctgttgttacttacaggcttatgtcttttaacaagttcttattcatttgtaagcaagagcagacatttttgttaggtaatattttaaaaaccaagagtcaagttgcaacccgtccttcataaatagaagctcctttctgtttgttattattattatttcttgacgtctctaggatgtttggggggaggggtttattaactctctatgacttaccaagaatttatggtataggtaaattgatggaggatttcaggttagagtgcccatgactctgcaccatgaactttcaacataaagttaagaggaaacaattaaatcaagtcactgaagcagtttatttttttctgataaacgcatgaaatggaataaaaataatgaggagagttagagaagggagtgcctaaagcaaatggactttaacctaggttaaaaagtgacatggtggccgggcgtgatggcgcatgcctttaatcccagcactcgggaggcagaggcaggcagatttctgagttcgaggccagcctggtctacaaagcgagttccaggacagccagggctatacagagaaaccctgtctcgaaaaaccaaaaaaaaaaaaaagtgacgtggtgtctggacccataccttacatgagtgcacgagctatatcacaaaaggcaagtctagcctgagcccgtgtattcctagtgctgctctgtttgttggctaactttattttgttctatttcttcttagaattaccgagcaattaaacccaggagctcttacatgctaggctaggctgagcagtcgaacccagggcctcttacatagcaagctaacaccccaccactcagttacatgcctagtctgtttgtaaagtaatctattatcggaacacagtcatgcttttttccccctgtggatgtttctgctttgtgatgatagacttgaagagttatgacagaaaatatgtagcctgcaaagaatgaannnnnnnnnnnnnnnnnnnnnnnnnnnnnnnnnnnnnnnnnnnnnnnnnnnnnnnnnnnnnnnnnnnnnnnnnnnnnnnnnnnnnnnnnnnnnnnnnnnnnnnnnnnnnnnnnnnnnnnnnnnnnnnnnnnnnnnnnnnnnnnnnnnnnnnnnnnnnnnnnnnnnnnnnnnnnnnnnnnnnnnnnnnnnnnnnnnnnnnnnnnnnnnnnnnnnnnnnnnnnnnnnnnnnnnnnnnnnnnnnnnnnnnnnnnnnnnnnnnnnnnnnnnnnnnnnnnnnnnnnnnnnnnnnnnnnnnnnnnnnnnnnnnnnnnnnnnnnnnnnnnnnnnnnnnnnnnnnnnnnnnnnnnnnnnnnnnnnnnnnnnnnnnnnnnnnnnnnnncccccccccccacccagagctgtgcctctagttgcatatgtagtagaggatggcctaagcggccatcaatgggaggagaggcccttggtcttgcggagatcatatgccccagtacaggggaatgccagggccaggaagcagaagtgggtgggttggagagcagggtaaagggagggtataggggactttcgggagagcatttgaaatgtaaatgaagaaaatatctaataaaaaataaatatttagaaaaaacagtacagaccactaggggtgggggggaaagacctgtcccattttgcagatgatgaatctgaggatcaaatgagctgaaggtcatgtgactgctaactctagagaggacttgatctgtgagagagtgtaaaatgccaaggaattaagacagtaatcatacgaatagataaaaatccatttaccaaactcacaaaagcgcttctgggttagtaaatggacagtgggaacttttcgtaatgactgtgtggggaaacagccacttgtctaaagtgggaaattctcggatctactgagcagtagatccaaactcttggaacagttgagcagtgcccaggagggaatgcagccctggtgtgtgtgtgtgtgtgtgtgtgtgtgtgtgtgtgagagagagagagagggggggggggagagacctcagtgaagacactcagataagctttgatacagttcaaggccttcttttcacactctgggtttctggagaacattgtcctgagagatgacactagtcacttggagtcagtggcactaaattgataggtgcatgacacaggtaggcccatttctctacagagatgcaaatgtcttcaaacgccagattacggtatcttggccgtagtcaactggcccagctgttgctgtatttcgttctcagagacatagacacacagcttttgagagctcgctgccagctggagatgtcaccgcttgtaaattattttggatttagtgcagcacaggcttagcccatcccttgctctttgtaactgggttggataaaactgtcctcatgtctgcacagaggcagctgtccttgtgctcagagatgaagctgggaaggtgtgggtggagtgtgttgtaaaagtaggagaatgaattaaagtgacactggttttaacaatgattttccccacagttagataggtacagacgggccccgtccttacagacttcattttggttatgtgcctacacatccgtgaccacaccccgactgtggcaatcatcacacgaccccttcgctttcttccttttccgtttttccttcattgtggttaccaagactcacactcgctgtgttaaccatgtgaggtgtgcagttcaggagtgctgggttttcacattcctgtgaaacagctcgtgagaatattctcctcttgtaagcctgaaacttgccagtgggtctcgacctccctaaggctatggccctttaatgcagttcctcgacttcggatgacctccaatcatacaactatttttgttgctactgttatgaatcataatgtaaatacctacgtgttccagtggccataggcaacctctggtgcacaggctgagaactgctgctctatgccattaaacggcccccttcattctcagctccttgtctctaacttttagggctctgccagcagcatctgcatggaatgacacgatgtctttcctgtgactgagttatttcactagcacaagtcaaatccaagttctgttcattttgtctacccactgtttgcaacacggttgcatctcctattcaaagcaagaataagtcataatataataaaatgcatagtgatatgtatagtaattcactatgagctacacatctagattttcctctgccttgaattggcatctctcattgtctttgtgaccagatacctgaccaagcagcttaagggaggggattcatttggcatgcagttagaagggacacagggaaggcgtgacctcaggcaacttcatgacagggtcacatggctgggcctcttcacttctcagcagaactggaagcagaggccagactggaagctggatgtggaaagctatgtcaacctcggggccagccccagaaactcatttcctgcagcaagtctccacctccttaatgttccatgaccacagcagcaaatagctggggagcacgtgttcaagtatgtgggcctatgggggccattccccatgcaaagggtgaagcaaccccactgtcctgttagggagaacctgagaactccccttctgcccacagccccacccccaccccactcccgcctccgagtcttctctccttccatcttttctctcatccctgcctctttactcttctggaccttgtcttcactccagctcccgagaaagaaagagagaaaggcagccagctttcttctgtggacgtgaatgtttgacatatttcttctgttcacacaccattggtccaggtcaccagggagcttcagaaatgaaccagcgtgttattgctacagatatgtcttgctgtaactgctgcttagaacaacttggtgaaaggaggggactgtgaagttagaaggaaaggggccagagagggaatcgaatgccaaatatctgcacagcaaagttacgaaatgaatctgtttaatgaatgtatgactacatgaatgaatgactgtaagaagctaagtgtaagcttcttctagactagggtcataaaccaatgatccaagggaccaggtggattgtggaaatgagtcgtataggatgcataaatgagggacagtgggctgattcaactggagcctacacaacatgtctaaaggacaatacctctcagctgcagatgccatttgtgtgggaatgtgactttgtacggcaagagattttttttttttaagtaggaaacctacattttatgtgacatctctcagttttaaaattttaatctgagccgtttttaaatagatccaataaacacattcatggcaaagatttggcttcaagtcaccaagctgccatctttgatgggaaactacttaaggtttttaagcatataagattggtagcttctatacattaatctgaccctcgtttggggacatgcctctaagccatggcgattttcagctgtggctgctcgttacaactgctggaggttatcccaaacaccccaacctcaaaccttaccccagagcgattaaatcaggccctattgctttacaaactcttccaggaggtctggcaggatggctctgtgcatgaaggcgctggcgtgcaagcccggagctctgagtttgatccctgggacccactaaaggagaatggagaggatcagtcccacaaactgtccccttactgctctgcacgtggtatggcacatacatatgcacacactaataacaattgttaaagttcttcaagcagtcgcaatgttcaattaaattgcacagtaatcctttagggccaattttaaagggttttgcagtaggctgtttatgttactacataactgtggatccataaagatgatttgttacgtttttgggtctgtcttaaaataagaaaatgactgggcgtggtggcacacgcctttaatcccagcactctggaggcagaggcaggcagatttctgagttcaaggccagcctggtctacagagtgagttccaggacagccagggctatacagagaaaccctgtctcgaaaaaaacaaaacaaaacaaacaaacaaaaaaagcggagaaaaagctaattttcagatttcaagttgaaaattgggggctaggagaagtaaagatttaataaacggttctcagggagcacatcaagttaggttacgcagtaaatgttatcttaaatgccaacactatggccgtaatccaagttgagaattctaaatcaacacaatggttttaaagataagcccacaaaattctctttagggataaaataataagtcttcagagtaatgtgttgtggcaacgccaggagagaaacgcagccttgcattaaccctgctgatagatttgttgagcgtgccaaggtcattgttcaaggttggttgagaagaaccacagcttagaaacaaatcccttcttgttttcccaggaggaatgctgcagtgccttctgtggtttctacaaagcttgccatgggccttgacagaatattagtgatgatttaccaccaccgtgaggctatgctaggcactgcatctggttctcttggaaaaaaaaaaaagttctgttcacaaatataaatgtgaaaatgaaaatctcaaaaaaattgtagggtggtgtgtgtgtgtgtgtgtgtgtgtgtgtgtgtgtgtgtgtgtatgtgtgtgtggtgtgtgctgtggtgtggtgtgtgtgtctgtgtgtgtgtgtgtgtggtgtggtgtgtgtggtgtgtgtgtgtggtgtggtgtgtgctgtagtgtggtgtgtgtgtgtgtgtggtgtgtgtgtggtgtgtggtgtggtgtggtgtgtgtgtactgtgtgtgtgtgtgtgtgtgctgtggtgtgtgtgtcctgtggtatggtgtgtgtnnnnnnnnnnnnnnnnnnnnnnnnnnnnnnnnnnnnnnnnnnnnnnnnnnnnnnnnnnnnnnnnnnnnnnnnnnnnnnnnnnnnnnnnnnnnnnnnnnnnnnnnnnnnnnnnnnnnnnnnnnnnnnnnnnnnnnnnnnnnnnnnnnnnnnnnnnnnnnnnnnnnnnnnnnnnnnnnnnnnnnnnnnnnnnnnnnnnnnnnnnnnnnnnnnnnnnnnnnnnnnnnnnnnnnnnnnnnnnnnnnnnnnnnnnnnnnnnnnnnnnnnnnnnnnnnnnnnnnnnnnnnnnnnnnnnnnnnnnnnnnnnnnnnnnnnnnnnnnnnnnnnnnnnnnnnnnnnnnnnnnnnnnnnnnnnnnnnnnnnnnnnnnnnnnnnnnnnnnnnnnnnnnnnnnnnnnnnnnnnnnnnnnnnnnnnnnnnnnnnnnnnnnnnnnnnnnnnnnnnnnnnnnnnnnnnnnnnnnnnnnnnnnnnnnnnnnnnnnnnnnnnnnnnnnnnnnnnnnnnnnnnnnnnnnnnnnnnnnnnnnnnnnnnnnnnnnnnnnnnnnnnnnnnnnnnnnnnnnnnnnnnnnnnnnnnnnnnnnnnnnnnnnnnnnnnnnnnnnnnnnnnnnnnnnnnnnnnnnnnnnnnnnnnnnnnnnnnnnnnnnnnnnnnnnnnnnnnnnnnnnnnnnnnnnnnnnnnnnnnnnnnnnnnnnnnnnnnnnnnnnnnnnnnnnnnnnnnnnnnnnnnnnnnnnnnnnnnnnnnnnnnnnnnnnnnnnnnnnnnnnnnnnnnnnnnnnnnnnnnnnnnnnnnnnnnnnnnnnnnnnnnnnnnnnnnnnnnnnnnnnnnnnnnnnnnnnnnnnnnnnnnnnnnnnnnnnnnnnnnnnnnnnnnnnnnnnnnnnnnnnnnnnnnnnnnnnnnnnnnnnnnnnnnnnnnnnnnnnnnnnnnnnnnnnnnnnnnnnnnnnnnnnnnnnnnnnnnnnnnnnnnnnnnnnnnnnnnnnnnnnnnnnnnnnnnnnnnnnnnnnnnnnnnnnnnnnnnnnnnnnnnnnnnnnnnnnnnnnnnnnnnnnnnnnnnnnnnnnnnnnnnnnnnnnnnnnnnnnnnnnnnnnnnnnnnnnnnnnnnnnnnnnnnnnnnnnnnnnnnnnnnnnnnnnnnnnnnnnnnnnnnnnnnnnnnnnnnnnnnnnnnnnnnnnnnnnnnnnnnnnnnnnnnnnnnnnnnnnnnnnnnnnnnnnnnnnnnnnnnnnnnnnnnnnnnnnnnnnnnnnnnnnnnnnnnnnnnnnnnnnnnnnnnnnnnnnnnnnnnnnnnnnnnnnnnnnnnnnnnnnnnnnnnnnnnnnnnnnnnnnnnnnnnnnnnnnnnnnnnnnnnnnnnnnnnnnnnnnnnnnnnnnnnnnnnnnnnnnnnnnnnnnnnnnnnnnnnnnnnnnnnnnnnnnnnnnnnnnnnnnnnnnnnnnnnnnnnnnnnnnnnnnnnnnnnnnnnnnnnnnnnnnnnnnnnnnnnnnnnnnnnnnnnnnnnnnnnnnnnnnnnnnnnnnnnnnnnnnnnnnnnnnnnnnnnnnnnnnnnnnnnnnnnnnnnnnnnnnnnnnnnnnnnnnnnnnnnnnnnnnnnnnnnnnnnnnnnnnnnnnnnnnnnnnnnnnnnnnnnnnnnnnnnnnnnnnnnnnnnnnnnnnnnnnnnnnnnnnnnnnnnnnnnnnnnnnnnnnnnnnnnnnnnnnnnnnnnnnnnnnnnnnnnnnnnnnnnnnnnnnnnnnnnnnnnnnnnnnnnnnnnnnnnnnnnnnnnnnnnnnnnnnnnnnnnnnnnnnnnnnnnnnnnnnnnnnnnnnnnnnnnnnnnnnnnnnnnnnnnnnnnnnnnnnnnnnnnnnnnnnnnnnnnnnnnnnnnnnnnnnnnnnnnnnnnnnnnnnnnnnnnnnnnnnnnnnnnnnnnnnnnnnnnnnnnnnnnnnnnnnnnnnnnnnnnnnnnnnnnnnnnnnnnnnnnnnnnnnnnnnnnnnnnnnnnnnnnnnnnnnnnnnnnnnnnnnnnnnnnnnnnnnnnnnnnnnnnnnnnnnnnnnnnnnnnnnnnnnnnnnnnnnnnnnnnnnnnnnnnnnnnnnnnnnnnnnnnnnnnnnnnnnnnnnnnnnnnnnnnnnnnnnnnnnnnnnnnnnnnnnnnnnnnnnnnnnnnnnnnnnnnnnnnnnnnnnnnnnnnnnnnnnnnnnnnnnnnnnnnnnnnnnnnnnnnnnnnnnnnnnnnnnnnnnnnnnnnnnnnnnnnnnnnnnnnnnnnnnnnnnnnnnnnnnnnnnnnnnnnnnnnnnnnnnnnnnnnnnnnnnnnnnnnnnnnnnnnnnnnnnnnnnnnnnnnnnnnnnnnnnnnnnnnnnnnnnnnnnnnnnnnnnnnnnnnnnnnnnnnnnnnnnnnnnnnnnnnnnnnnnnnnnnnnnnnnnnnnnnnnnnnnnnnnnnnnnnnnnnnnnnnnnnnnnnnnnnnnnnnnnnnnnnnnnnnnnnnnnnnnnnnnnnnnnnnnnnnnnnnnnnnnnnnnnnnnnnnnnnnnnnnnnnnnnnnnnnnnnnnnnnnnnnnnnnnnnnnnnnnnnnnnnnnnnnnnnnnnnnnnnnnnnnnnnnnnnnnnnnnnnnnnnnnnnnnnnnnnnnnnnnnnnnnnnnnnnnnnnnnnnnnnnnnnnnnnnnnnnnnnnnnnnnnnnnnnnnnnnnnnnnnnnnnnnnnnnnnnnnnnnnnnnnnnnnnnnnnnnnnnnnnnnnnnnnnnnnnnnnnnnnnnnnnnnnnnnnnnnnnnnnnnnnnnnnnnnnnnnnnnnnnnnnnnnnnnnnnnnnnnnnnnnnnnnnnnnnnnnnnnnnnnnnnnnnnnnnnnnnnnnnnnnnnnnnnnnnnnnnnnnnnnnnnnnnnnnnnnnnnnnnnnnnnnnnnnnnnnnnnnnnnnnnnnnnnnnnnnnnnnnnnnnnnnnnnnnnnnnnnnnnnnnnnnnnnnnnnnnnnnnnnnnnnnnnnnnnnnnnnnnnnnnnnnnnnnnnnnnnnnnnnnnnnnnnnnnnnnnnnnnnnnnnnnnnnnnnnnnnnnnnnnnnnnnnnnnnnnnnnnnnnnnnnnnnnnnnnnnnnnnnnnnnnnnnnnnnnnnnnnnnnnnnnnnnnnnnnnnnnnnnnnnnnnnnnnnnnnnnnnnnnnnnnnnnnnnnnnnnnnnnnnnnnnnnnnnnnnnnnnnnnnnnnnnnnnnnnnnnnnnnnnnnnnnnnnnnnnnnnnnnnnnnnnnnnnnnnnnnnnnnnnnnnnnnnnnnnnnnnnnnnnnnnnnnnnnnnnnnnnnnnnnnnnnnnnnnnnnnnnnnnnnnnnnnnnnnnnnnnnnnnnnnnnnnnnnnnnnnnnnnnnnnnnnnnnnnnnnnnnnnnnnnnnnnnnnnnnnnnnnnnnnnnnnnnnnnnnnnnnnnnnnnnnnnnnnnnnnnnnnnnnnnnnnnnnnnnnnnnnnnnnnnnnnnnnnnnnnnnnnnnnnnnnnnnnnnnnnnnnnnnnnnnnnnnnnnnnnnnnnnnnnnnnnnnnnnnnnnnnnnnnnnnnnnnnnnnnnnnnnnnnnnnnnnnnnnnnnnnnnnnnnnnnnnnnnnnnnnnnnnnnnnnnnnnnnnnnnnnnnnnnnnnnnnnnnnnnnnnnnnnnnnnnnnnnnnnnnnnnnnnnnnnnnnnnnnnnnnnnnnnnnnnnnnnnnnnnnnnnnnnnnnnnnnnnnnnnnnnnnnnnnnnnnnnnnnnnnnnnnnnnnnnnnnnnnnnnnnnnnnnnnnnnnnnnnnnnnnnnnnnnnnnnnnnnnnnnnnnnnnnnnnnnnnnnnnnnnnnnnnnnnnnnnnnnnnnnnnnnnnnnnnnnnnnnnnnnnnnnnnnnnnnnnnnnnnnnnnnnnnnnnnnnnnnnnnnnnnnnnnnnnnnnnnnnnnnnnnnnnnnnnnnnnnnnnnnnnnnnnnnnnnnnnnnnnnnnnnnnnnnnnnnnnnnnnnnnnnnnnnnnnnnnnnnnnnnnnnnnnnnnnnnnnnnnnnnnnnnnnnnnnnnnnnnnnnnnnnnnnnnnnnnnnnnnnnnnnnnnnnnnnnnnnnnnnnnnnnnnnnnnnnnnnnnnnnnnnnnnnnnnnnnnnnnnnnnnnnnnnnnnnnnnnnnnnnnnnnnnnnnnnnnnnnnnnnnnnnnnnnnnnnnnnnnnnnnnnnnnnnnnnnnnnnnnnnnnnnnnnnnnnnnnnnnnnnnnnnnnnnnnnnnnnnnnnnnnnnnnnnnnnnnnnnnnnnnnnnnnnnnnnnnnnnnnnnnnnnnnnnnnnnnnnnnnnnnnnnnnnnnnnnnnnnnnnnnnnnnnnnnnnnnnnnnnnnnnnnnnnnnnnnnnnnnnnnnnnnnnnnnnnnnnnnnnnnnnnnnnnnnnnnnnnnnnnnnnnnnnnnnnnnnnnnnnnnnnnnnnnnnnnnnnnnnnnnnnnnnnnnnnnnnnnnnnnnnnnnnnnnnnnnnnnnnnnnnnnnnnnnnnnnnnnnnnnnnnnnnnnnnnnnnnnnnnnnnnnnnnnnnnnnnnnnnnnnnnnnnnnnnnnnnnnnnnnnnnnnnnnnnnnnnnnnnnnnnnnnnnnnnnnnnnnnnnnnnnnnnnnnnnnnnnnnnnnnnnnnnnnnnnnnnnnnnnnnnnnnnnnnnnnnnnnnnnnnnnnnnnnnnnnnnnnnnnnnnnnnnnnnnnnnnnnnnnnnnnnnnnnnnnnnnnnnnnnnnnnnnnnnnnnnnnnnnnnnnnnnnnnnnnnnnnnnnnnnnnnnnnnnnnnnnnnnnnnnnnnnnnnnnnnnnnnnnnnnnnnnnnnnnnnnnnnnnnnnnnnnnnnnnnnnnnnnnnnnnnnnnnnnnnnnnnnnnnnnnnnnnnnnnnnnnnnnnnnnnnnnnnnnnnnnnnnnnnnnnnnnnnnnnnnnnnnnnnnnnnnnnnnnnnnnnnnnnnnnnnnnnnnnnnnnnnnnnnnnnnnnnnnnnnnnnnnnnnnnnnnnnnnnnnnnnnnnnnnnnnnnnnnnnnnnnnnnnnnnnnnnnnnnnnnnnnnnnnnnnnnnnnnnnnnnnnnnnnnnnnnnnnnnnnnnnnnnnnnnnnnnnnnnnnnnnnnnnnnnnnnnnnnnnnnnnnnnnnnnnnnnnnnnnnnnnnnnnnnnnnnnnnnnnnnnnnnnnnnnnnnnnnnnnnnnnnnnnnnnnnnnnnnnnnnnnnnnnnnnnnnnnnnnnnnnnnnnnnnnnnnnnnnnnnnnnnnnnnnnnnnnnnnnnnnnnnnnnnnnnnnnnnnnnnnnnnnnnnnnnnnnnnnnnnnnnnnnnnnnnnnnnnnnnnnnnnnnnnnnnnnnnnnnnnnnnnnnnnnnnnnnnnnnnnnnnnnnnnnnnnnnnnnnnnnnnnnnnnnnnnnnnnnnnnnnnnnnnnnnnnnnnnnnnnnnnnnnnnnnnnnnnnnnnnnnnnnnnnnnnnnnnnnnnnnnnnnnnnnnnnnnnnnnnnnnnnnnnnnnnnnnnnnnnnnnnnnnnnnnnnnnnnnnnnnnnnnnnnnnnnnnnnnnnnnnnnnnnnnnnnnnnnnnnnnnnnnnnnnnnnnnnnnnnnnnnnnnnnnnnnnnnnnnnnnnnnnnnnnnnnnnnnnnnnnnnnnnnnnnnnnnnnnnnnnnnnnnnnnnnnnnnnnnnnnnnnnnnnnnnnnnnnnnnnnnnnnnnnnnnnnnnnnnnnnnnnnnnnnnnnnnnnnnnnnnnnnnnnnnnnnnnnnnnnnnnnnnnnnnnnnnnnnnnnnnnnnnnntcctccacaccatcctgctcttacacagtgctcctccccaccatcctgctcttgcacagtgctcctccacaccatcctgctcttacacagtgctcctccccaccatcctgctcttacacagtgctcctccacaccatcctgctcttacacagtgctcctctcatcatcctgctcttacaagtgctcctcccaccatcctgctcttacacagtgctcctccccaccatcctgctcttacaagtgctcctccacaccatcctgctcttacacagtgctcctccacaccatcctgctcttacacagtgctcctccacaccatcctgctcttgcacagtgctcctcccatcatcctgctcttacacagtgctcctcccatcatcctgctcttacacagtgctcctcccatcatcctgctcttacacagtgctcctcccatcatcctgctcttacacagtgctcctcccatcatcctgctcttacacagtgctcctcccatcatccggctcttacaggctcttcacctcctcttctgtgatgttctccaagtgttggtggtggcagtgggtgttgagaaagaggtctcatttatggatgagtagcctttaatgtactttctctggcaattatcatggaatcccccaaatgaatattattgcatgaattttacaggtgaaggaactgatttcaaaggcaggaaacaactcctgtagtaactgctggaaccaaagtcagttctgagtggctctaccactgttccctaatgtctaccctggctcacggttaatgtgtctctcttttaatataccatcttctgttatccttacataatctttatttattttcaactttcaatttctgggaagaaaaacctatcagtcaagtcagccagctggtcttccgtgatgtcatgtggaccagtgagaccctgtttgtgtactgagtccatcaccttccagctccaggtttgggtactgagtccatcaccttccagctccaggtttgggtactgagtccatcaccttccagctccaggtttgggtactgagtccatcaccttccagctccaggtttgggtactgagttcatcactttccagctccaggtttgggtactgagtccatcgcctttcagcttcagggcacggacaagacacttgctcttctcatctgcataccgagagtgacaagagtccccacctcctgtgatcattacaggtcctaagtgttttattttacacaacagatcctagctgtagtgagggtgcttattacttcagctagaattatccggatgaattcgctgggcctttaactgtggaatacggagaaagtagcaattaggttttaacgacttaaaataccaatagaagttggccattttttttttctccataaagttgttgttcacggttccggggttcatctgcatggccctgcttgttggcagcttatttgatctagtctggcccagaattcacatctggggtctctaacaggagacagaatccttttgaggtgaagacacacagatacacaaggttcacatccagatgccagacaccacagggcaactgaccatccaggacgtggctaacgctgcctgctgaccacttcctctgtcagtcaacggagtcattcagcctgttacggcaatggtcgtgaatggtcacatttaacttccttcaagtctgccttccgtacgttaggagggaactctttagtgatctttcttgcagagctcctctcaaaagacggggcagaaagagatcagtgcgaagggagaggagctgaggagctgaggagtccaggaaccgaggagccaggctcccacctcagcctttgtgcgctggggttgggggaggtgcgttctccacacagtgcagggcagcaccaggcaggaggaacctgacttctatagttatccagaacactagagaaacacactcatgtacctagtaccaaccataggaaggaacaaattaatgtacagataagagtgctgtgtataacagaatacgtccttcattctttcttaggagctgtttttcttacaaaatcatttgaatccaatatatcagagtttagacatgctttgcattctgccatctttttaaatatcgatatttacctttctgtgcccattcatgtctaccagttgcttcatacacagcaggatcttactaaatatttcaatgaatgaatgaatgatcagtttttgtcatattatagtttgatccctatttcaaaatagttgcattttctagatttaccctatttttctgcctgttgtcatccacaccggcctgctttcctttattcacaccacaaagatgtcagtgggccctctgaaagcaagcatcagctgtgtgtgggtctaagtgtgaatgcacctgtgtgcaccactttcttggtctttctgagagagagaggacatgtcccgtgactcacaggaagtgcccttggtagtacacggaggtgctggaacactggacaaagccaggagatcaatacatcaagagctgactgaacgccagggaaactgatttccattcaaccgtttgcatccgcactcttaaggccacacacagcaacagtgcccccactggggtgtagagagccaagatttccctaagagaaagtacaacctggtttttgttacaaacaggaacagcgagacttctcatgtttctgtctcgatggatgaaacttggcatcggcaaaagaggaggcaggagatcacccggcaaagaaaaccggtgagggtgggctgcagttgagaagacatttgcagagaaaggtccttgttgtctctgatgtccaccctgttgtgttgactgcctgagctgtacagacactcgttcaaggaaggtttcccagggccctcggtttactaattgcatctcagaaatctcagctaaccctgcactcgtggttctgctaggaaatctgacatgcatgacttaaaactttttgactaacaacatctatgaccctgaacacgctcctaagctttcatggttgtttttagagggggagggtgataattaatcatctagtattgattatatttaaaatagcatacttaactatttacccttcagattcaacttgtttccaaatagcttgcgccctgacttaattttaatccacacaccagtttatatacaacaactcaagtcacacttaacagcaagtggtggatgacctgtgcactaaaattatgatttccattttagttgctatcatctacactctcctgtaggtgacagataacgcgtctatatgtttctatgctcgcccaagggtctcttaactcttccacaaaaattccactatgagggtactgtctgacgacttgagttccacagggctctgccgtgcttgcggaagtgacaggaacatccgaggacatttgtcttaaatatgacatgtgaagtattgacagccccctaggaaagcccgggaaaacatggacgcaccactccacgggtgccagacggagatccacccaggtcgggaggggcgcgctctagtagagactgtgggcctctgtacctgatctctccctttggaacaggagcgtgtctctgggctttatccgtctgcttttgtcttttctaacatcctaccccatttctttttcttataatccactaggggaaaactgttcacatttcaggttatgaattttttaaaaaatctaggatgtactaaataataaaattcaacttctgagaagcatgacaacgaaagtgaacgtctacatattggtcttatttttgtcttaggatgtcctcattaaagcattaaaataatgatcaaaataaatcaaaggtaaaaagagaaagaaggaaggaaggaaagggaaagggaaaggaaaaggaaaaggaaaaggaaaggaaaaaagaaagaggatggatttcctgtaaaatagggaaacagcataccaaaccaaacgaacatggaggcccgcccttgcaccgcatgacctccaggtggcgctgttgacctacacatggaaagcagacgccaggttcagtttatagctggattttcactttttcaaaaatattttctgtctccacagatgtgttcttttaaatggtcaataaaattttataaccactatttgaaaaatcgcaagattattgtgatttgtgcttcccgggcaagaatatttcttcccgtccagacatactcagccagtcaggtgtctgtctgcatttgttccgtggtgtctcttttctgcccttctctactcccaagcacccacaggctcagccacagaaacttgggctgatgatgggacacaaccggtgtcttcatcattcggctctagtaactcagctccgtacactctgaatgggcggggtcatctgtactcaatgccccccgccccccgcgtccccaagccaggcagtggtttgggtgtgggcaagcagaagtttgtcacgcactagagatgttttgaggtaacttacgcagtgccccccacggtctaatcgttctctaagaagctgcctctaggtaaaatccaggagagaacttgatttcctgtttggaaggatttcaggccaggagcagtggtcatcaccaaaatccaacccaacccaaaccaaaccaaatcaaaccaaaccaaccaaccaaccaatcaaacatcaaagcagaacagtaggaagaattgccatagtttgaggcaaagtttgggattttaaagattatctttaaaaataatcaactaaccttccttttgtgcccttcttttccttctctcacaggggtttgtgaacaagctggacgaattcattcagtggctaaacgaagccatggagaccacggagaactggactccgcctaaagccgagaccgacagcctccggctgtacctggagacacacttggtaggcaagatcatgttgtggcttctctttctgtcaaggatttcaatgttgcgatttgtttaggtccaatatcaattttagttatcaaacgtcattatatgctaatgaacccaagctctaatggggttaagcctcaagctgaccattttcaggcatttcaagtaataatatgacccctaaggcctccgtacttcaaacagatgcttcaaagctttctccagaagggacgctattttaaaacaccttagaaaatcttattagacccgtgttctctaaagtgatgattgaagatttccctcttcttggggggaaaaaaaataaatgaataaaagagaaaattttgatgaccattctgaagctttctggagttcttgtaaaattaatgagcccctcattatcaagaaggtctatttaatctgttctacacttggctattttaataaaatatttaaaatgatgatctccatcatttctgctgctacgtggatttttcagtagataattaatacaactgtcattttgccgggccctctgcttagggaaaaccagggagtcattgtggataacacttgggtgactatgttttgagtctgtttaaagcaggaattatagaccaggatacacttgatgaacctcgggaggtttgtagtgaatgcttcaaatggccgatatcaattatgaaggggtgggacccccgtaccggagtgtgagaaagcgtgacaaaaaagcacattgtcataggaaatgaaaactcgggctttgaggatctcatctttattcctttcactgatagcataaaattgacaaaggcaacgaacaggaatccttgggtgcccaagtgtggggttgatttctgcccctcttacacgcttagaatttggaatagaatatgcaccacggacagtctcatgcacgaggtttcatgggaaagactgcagaaggaagaaagacggacacaaaaaagagagaactttagtttatttagtgttgtgctttgaacatgttttatgtgactgcaagttaaacagccccgggaaccagttaatgctgcaggtaggctccagataaacatagcctgggttgacagtccggtccgtagaaacgccagtggccataagtgcctctcttgtactgggtttggaaagactgccctgaacactcaattccccgtagaacacacttttcagggttttcttcttcttcttcttcttcttttttttttttggagggcatttcataatagcaagataaagatattcagtgctttatgatgtaaattatattaattagaatgtcaacgttgccctggcactgttctgacagaaattctaatctgtgtttaaacaggactatatgaactttatttcacatcaagtgtgctgtcttaattttcttgatttaatattttatggaaaacacacatccagcttttgaggttccagagggcacgagggcataaggtgccctagctgtggggtgctcaccgaaagccaggaggagtggctggatggcctggcaagggcctttcctctctgcgtagcatgtccctgtgtcaccattgcatatccctgtctcagctatcttacagaaatcttgcttgacatccctgtgccagcctcacctcatgctagcccaaagctagaagtttcttttatgaaggggcattttgtattgttatgtagttgcaactaactctatatatctaatgttaacttagaatgttgctaatacaatgtcagaagtaaagtcttatattatcattcagtttaaattgctaccgtgtctatgaccttactctatgtagccttagcaattgcagaactttttattggtggctattaagaagctcaggcagctctcattccaaacatggagtcactgcccactgctgtgggtcaccaaagagtccttcctgatgtctctctctgtttctgccacaggattaccatcttaggggggaactctctctctctctctctctctctctctctctctctctctctctctgactattctggctagcatagagatgatataggtaaagtttgcttatctctgcttttcaaatggcgagaaactatggtttgcaggccggttcaccgactgttaagtcagtctcccattgaacttctgagaatagcagtgtgcaatagccacattagacttctgtgcatggtttgctgtggaatgctacagaaatcactgggagtccctggactctaccaggccagttaccataggacaaggcttctctgtccaccttaccctctgtccctgattgtcacctttatcttattgtattatcattgtgctgaactaatattcttttagtctcaaaaggaggcaaagcctacctttctatgaaaactattcaagtgagcttagagattcatatcttagcttagtctatacaaaccattattgttccctgatgtgggagcagagggtttttacagtgtcacacagtagtggaggttgtcacacagtagtggaggttgtcagatacactcgctaaatcatgtttttctagatcctaagatttagtcttcagtctttaggaatgtgggacctgagagcgattgtcttctctgatataatacattggaataggtggtctcttctagtatttactcgtaaagataaacaaataccaaaacaacagctgtacatctatatcttcatacttaattcaattattttccatgatggcagccaagggtttttcaccaacactaatcaattaaagctttacaatgtctctctgagcgagagtcaggaattttattttagctgtaggaaacagtgtgaaattgtcatggtacatcagcgattttccatgataattaatcatctgcttgcaacctggctgctccttcaaaaatacaattcccatctttctggaaactggcactttcaggaaatgtcatttggaggtggtggatggcgggtgctggtcttttctgaaagcaatgttagaagtagcattgtacgaatgtactacggggaagactcctctttctctctttccttcactgttgtctgtttcctcttcaaaaacagctccactggagtgtttggcctgcgagatcgcgtatcttagagtatgaacgttcacgagctttgacaatctgaaagatacatacactccaccaacatcacgatagtgagcacattcatcacgccaaacctcctcatgacactttgagattccttccttcagcccttcccagactgcactgcagccctaagcaactgctgatttggtttctgtactatccagtttgctctgtctctaacttcataggggtaaggccggccagcatgctctccactggggcacaggcctgatctctctccttcagcatgtttcttgttagctataatgacatcgcatctaccgatgttccttctgtgttgttcacatgtgcatgggccacgcctgatgccttgagttcctgataaacgtttaatgtttcctccacagtctttcaaattatgtatacctgagaagaagcacaatacatgcaaacattgtgaatagccaccgcatgccagaggacgtagctctgggatagaccgtgtgcttaggaaatagccatcgagagtgtttagatttcgttcctttaaggaaatgttcagcagtaaggccacagaggaagccatcctggctagatccacagtttgtccatgtgcttctggaaggagatctctcatctccagagtccttggaagacatacctaattcaccaaatgagcaccactccatagacatcggagccaggaaaacaaaccagatcttaactcatttatagccagtcagactatctagggtgaactactgtagtccagccagaccaaagagttgggcaagagcaatgactaaacctagggtagggccagtcttaaaacttggagaggaaatttgggtaggcgtcccatactctatggcacaaggattgatcaatttcatgttgtctggcagttttaagtttgttataagaactctctgactatgtagcccaggatgtcagggaactcactacgtagctcaggctggccaccagctcagagtaccagaatagcagataccaccatgcttgtcttaagaagcaacatttgtaattttcaatttgatatgtgagagctgtgtaacacaatggcgactatgggttcaagattttagttcatatatctgaagcacccgtgcaaccaggcagatcctgaggtgctagagcaatgattctcagccttcccaacactgcctccttttaatgcagttcatgttgtggtgaccctaaaccagaaaagaattttcattgctatttcctaattgcaactttgttactgttatgaactgtaatgtaaacctctgggttttgaccctcccaaatctcctaaggggtctcgacccacaggatgagaccacccaccccgcccccgtgtggagcacgctgcttgaacctgccttctcttggggttttctattgaacagagacgaccatagagtatacgatatagtcctgaccaggaaaattatataagataaatgaaggagttcagagaaaaggtttaatgttttcctagagataattagatgaaggccttgaagggcatagattactctgttggatcaaatgagaggagagagctggggtagggacatcacggtgagggtcatggaggaaaagagtggaaggggactgtcaggtgaggtcgagcctccacttgagccttgaagggcgctactggacagtaagggacactaagtgacgatttaaatcgccaaatgtttctcaggggtactgaaacttttggctttgtgtcaagcagaagagtgacaggagtcagtcacaagtcccatgggggtaaggccaggctggcatagtttagctgaatgatcacagtagaggactggcttgaatagagtatttgatgttctactacggacaagcagttatcattcttcaaaaatgatggatttttgcctggctgtgtgcagacatggcagaaactactcgaagtgggtggcagtataaaggtctgaggagaggcctccctcctgtcctctcagacaccagctctctgctctttcttgatatcatcacacgattatcccaagtatttaaaaacagctacacatatgtgcggtgctttgtgcccagcttaaactagcaacagatcaaaagcagtaactataacacaactttatcctctttggatggctttaacagtatttccatctggggtactctgtgattttctttaagcaatcctttatgctagacccttaggttatgtgtagtcttctatctccaacgatgcttctgtgcacatgctcagaccttaatcatcttgtttggtatgagcatgtccttacattcagactttctggctaaaaaggctatacacgttcaaaactttcatctattactagattgtctttggagacgatgcggtgtgtgctccgtgctgagcacgcccactgccgtctgctgttgaagcttgttgcacactgcttagccttgtccatgcggtggttagcagggatgaccactgtgcttccagcatttggggtggggttgtcaccttctccatgtttgggggcatcgtttgcatttctttccttgggtctgtctgctcattatctgtgtctggtcttctgttgggtcattactattctacttctggatttacatgcatttcttaaataccaaaggaagcagtcccttgtctgtgccgtgaatggaaaatatctcgaaaggaaaccatcaagaagtctcttccaaacgtacagggacatctcaacaatttgtgcctgtacttaggcagacttgggaagccatgctggacctctgcacctggcaaaaccaggcatgaaaatcaaagctaaaaccttagatatagagggtcgagtttaagatcaaagagtttgtaggtggattcggagattaagaacatcagagcaagccgggcggtagtggcacacgcctttaatcccagcactcaggaggcagaggcaggcggatttctgagttcgaggccagcctggtctacagagtgagttccaggacagccagggatacacagagaaaccctgtctctaacaaaacaaaacaaaacaaaacaaaacaaaacaaaacaaaaacccaagaacatcagagcagtgggaatggaatactgggtgagtgggagtgggttgggggagggggacaggagcagattacagggcgaatcaggggttcacaccaagagctgcttttgagactcgctcatgttcagtcagaaatgtcagacaacatctttttgtctgccctgttctggtctatggcaccctgaactacacccaactgagtgtgggaaagactcagatgcagggaggtgtgtagatggatgaatgcttctccgcatgagccgggcctccaggcactgccaggtgtgtgtgtgtgtgtgtgtgtgtgtgtgtgtgcgcgcgcacaccaagctactgggacatcatcactccacagatgtagcagtgtgtagtgtggactgaggaagcgcgattcagcccctgcctttcactcaatgtctagttaaagagaaacatcacgctacactcagtgagaaaagcaaacaacgtgagacagcataaagcgaaaagcacagacctccaccctgccgactaaccagcccaggcagtctgctctgtgttctgtggagcccttttatgtgagacgagcacacttgcaagtccgtgttggatataagtcagtaaagtgcttccacagacctgtttccatctgtatacaaaagaactccggtacattctcacagctccttagtgtttgatcacgtggacatgccccggcttatttaattaaatcttgtcatgatgggcactttagcttcttccttatttctgctttcttttttcaaaccgtgctccacgaatattcagtctaacactggcagacaaccttcttgtccttttccaggcagcctgcagcagcagctcagggaccccatgtaataaaaaaaacctctatcatcctctaggaacagctttcactgtaggtaataagaaccgaggcagatccgtgtttgtgcgtgggaaatctgagtccccatttacaggtggactttaaaagcacagccttttgaccctctttgttcatcctagtattagtgcctgcaatttgtgttggctgccacaaggtggcagaggagcaccagactccacttgttctcgaggtcccatctttattgtgccctcgcccggatcttcataaacacaattggatttaactagaggaccggacgtgtctggttaggagaatgatcagaaaatgcagacgcacacgtctcccatcaccatctagatctctgtgcttcatttctgattcaatcgcctttatttctaccccaagaaaaaccagcgttcccaaacacttctgactgctggtcttttgctggccctcctgtgtctacctctgctccatttttcattgcttgaagttaagagatcacaagagtttgtttttcacctgccgctcacctttcctgcttccccttctctgctgagatgacggacagccatggcctaagcaagttgagcttccttcacaagaacaggagctgcctgccgtggggctgtgctcctcaggaacagggctcagtcagccagacttcaaagcccagagcgtgcgttgggcccagttgcccaccacccccttcagcctcaggagcaaggctacagctttctgagtgctctgacgttccatttgcttgtcccttggctcccatcagtttaaagtgtggctgagtgtttagcaggatatggtaccatttctcctgtttatctgaaatactcagcacccagcctgagtcgtttgctgtggtggtggtggtggggtctgtcaggaactacagcattcgggcattttgcctttgcttgtgacatggagggggcataggcagagagggaggctcattttggccatgtgacggtcataaccacattccagtgctctcatggttcattctgtgtgtctaggagactcgtgttacttttcccagtcaggaagaactgcacttccttcctgcttggtttaagggctcttaggccataatatgtaacaattctcatgattttgaatatcgttagtgcccagtttactaacttatagcttacttttttctcagacagtaatggctgcttttaactagatgatcagagaagtggtgagcttattgagcacagcacatccagagctatggtgtactgagcactgaagaaaagtttgcagacaggccttgcgttctgtgggccatgcacaggactggctgagggcattgattaaggaccagggactcacatcttatcacatggaattttgggaacttgaatcagtttatctggtatatatagtaaaaacttcagatttttatattaaccaggagaacatttacctatgggatgacttttgggaaggtgacattagcagtggtaggcgaggaagactctcctatttgggcgacttttgcacatcttccttgagtacttaagagtgtatggtaggaatggctcacatcttcttaaagaagttgaaattctgtgttttggctagtgaatctgtgacaagaagggggaacccgaaggtttccttttgtttgtaggggtgtgattcatctcctttggcaagataaagcaattaaaaaaaaccacaatggaaataaaaatgataattcagctattagaagggttaacatctctgcagctttaatattacttcttaaaaatatgaacattgtatgactagacaggatgttaataacttgacattacaaaaatttattaaatttatttttaaagtggtttggttcccccttttgaatgcataaagcgtgtgggagttggaatggatctgccccaggctgccaaaacaagattttaatggaaccggagtccttcagggattgtcctaaatccacataatattcttaagtcctggtgtttgcactgggacctgtgtattagcagatgtacgtgtgaataatatacgtatatccatccatcaccctggtgactccacatccttaagggctgccgcacatcaattattccacctcagggggtagagagatatttgggctagcattgaccttcttttcaatcagggcctccaaacagtatgttctggaagtcaaatagtcccttcagacagaacctctgtttgagcacgcgtttggcctgatgtctccatgctgaggagctgaggagtcaatgtgattacctgtgtcaggtgtggaggcagcgtccgggcagcgaatgaaaatcccgtcactcagagtcacggtcagcattcagagtctcacccatctatctccatcttgcataagttattagccagtctatcagggaagagcgtcaacctcactgagctgctctctctctctctctctctctctctctctctctctctcacacacacacacacacacagtctttgaaataaattatagattgaggagctagactcactttcaaaggcttggagccatttttatgaactgagatcttgggagcagcgtctctttaggaggaacaaggtttttgcctttttaaaaaaatttttttgtctgttttcaagaaaaagacttttcaaacacgtggttttaattttttaaaaacacttggaaattatttcttaaatgcacaaagttctctccttcagcttctgatagttgaaggtgtgttctagattgttgtgaccgaggaaccaatgacaaagccacttcattctgttgggaaaatgtacagtgactggccgtttatttaattgtgtgctaagtaccatatgatgagagggtaaagttaaattgatgattcaggttaccccagccagtgtacagtttatatggcaattatgctgggtcatctaagtgtaattggcaagtaattttgtaagcgaaggaacatgacagctcatttacatggtgttcaccgagtaaaatttggggacattcatcaaccactctcgagtgcagagtgatcgcattgatatcccttggcgctgcaggctgttggatgctggtgtgcgggatgagtcgtgaggtgtgcactcccctctatggtggttagatgtgtgccaggcactcttgttccaaagtgggtgagacctcagcccctttctcaaggagctcaagggtgggaaacagacctctcaataatttagaacaggggtcggtaagtggaggcttgaagcttgctgtggttataagcgtctagggtggaagatcagggaaatcttgctagtgagcacactgaattggattttaaaggatgttgcggctttgctgaaatagcacttgccagacagaggcacggcaagaacagagtcctagaggagcaagtagacaagggcgtggagaacccttggagttgagctgatagcacctgcagccagataaaggctgagcctgaatacatatgcctggccagccattcaaggacttaagaagaggtgggcctccatctgagctcttctgaagacgttgttttgtgtagtaacaattaactgtgctattatggtggactaggttttgttctatgtgtaccaagggatttttatctttattaccacctaggaaataggcactaaaattcttttcaaaaatgagaaaactaaatagacaggggttgcccagacttaaacagagagtgacaagggagctgggctttgaccttaactgtccaggtctgaagcccttgcctgccgctagcagtaacccacatgatgcttctggcttccttggcacactctgctggaattctagactaatcgtactcactaggctccgagagcggtgagtgtggccattctgctcatagtcctatttgtaagtttgagatgaaagtgcctgtagcatactaacacacaaccaatgtgcagtgtggagggaggcctaagaagggaaacgacgaggcttggagctagggcagtgtccgtgtgcagaggcgtggatggggacactggtctgggcttggtaagtgacctggcatgtggatcttgtcgcattcttgtatgacttctgatttccaaccgagatactggagaggtgacttgacaggagaatccgaggaacagggcagttcacagtgcttgtcacagagctcttgagttcctgggaagaactatgtgggctcaggataaaagttaaaagagacttcctcagagatggctaaaattagaagggacagtctggggacagaactgccctggggtagatgagtagctggatagcctttgagactcttctctctttgaaaattctctagtttaaagtaaataaaacttctcctgtttcccttcctaaactgcctggatggaaaaaaaaagataaaaatcaaagtattcaaggactggaaaatattgagtccaaatgccttgactatagataaaggaacggaagcccggagggttacatgactcatctgaggacacaccctcgagggaaaagaagacagggtcattggtttctcctccttaggtctcagtaacatttttgggggtttggtgtccatgtaggcaagcccctggtagaaagtgagacaaaagcaacagaagtgtttgtctctagggaagagattattaacaataaggggttcctgtcacatgacaacctaggccatttatcaacccgagagtgtgaatttaaacatttatgagtggttagggagatggctttatgggtaagaccattttatctgcaagcaggaggagctgagttcaaatatttagtacctacataacaagccggtcatggctatacatggctgtagacccagcactgggggacannnnnnnnnnnnnnnnnnnnnnnnnnnnnnnnnnnnnnnnnnnnnnnnnnnnnnnnnnnnnnnnnnnnnnnnnnnnnnnnnnnnnnnnnnnnnnnnnnnnnnnnnnnnnnnnnnnnnnnnnnnnnnnnnnnnnnnnnnnnnnnnnnnnnnnnnnnnnnnnnnnnnnnnnnnnnnnnnnnnnnnnnnnnnnnnccgttctaacttctgactccactgtcctccagaaacgttgatgttccgtgtgttttcttgaagtcgtctttgtctttgcaatgagattatgtacacattgacatctataattttattgatataattttgtcttcattgtttgtttgtatccgctatatatttgcatgtatcgcccagtcattaaattgtgatatatcttaccagctttttgtttatttatttttattagatattttctttatttacatttcaaatgttatcccctttcctagtttcccttctgaaaatcccctattcccttccccctccccctgatccccaacccacccactcctgcttcctgaccctggcattcccctatactggagcatagaaccttcacaggacctagggcctctcctcctattgatgactgactaggccaacctctgctacatatgcagctagagccacgagtccaaccatgtgttttctttgattggtggtttagtcccagggagctctagggttactggttagttcatattgctgttcctcctagaaggctgcaaatcccttcagctccttgggtcctttctctagctccttcattgggaaccctgtgctccatccaatggatggctgtgagcatccacttctgtatttgtcaggcactggcagagcctctcaggagacagctatatcaggctcctgtcagcaggctcttgttagcatctgcaatagtgtctgggtttggtggttgtttatgggatggatccccaggtggggcagtctctggatggtcttttcttcagtccctgctctgaactttgtatctgtaactccttctatgggtattttgtttccccttcaaagaaggacagcagtatccacactttggtctcccttcttcttgagtttcatgtgttttgcaaattgtatcgacaaagtcatctttgtctttgcaatgagattatgtacacattgacaactataattttatcttcatcttttgtttgtgtcctctatatatttgcatgcattgcttagtcattaagattgtgatatatcttaccagcttttaagaggtacttaaacacttactgaaagagctctcgttcgtcactttatccgtggcattttgaaaggtgcattctatactgggagaaccagcatctgacttgtgtggatgcagtgtggagcggagtaggagctcctggactcctcctgattgatgatgacttgtttgcttgcccgggccctctgacagagcaaatcgctcttgtttggcccattgcagagtggctcctaagcagagacggtctgaggcagacagcaatgacttcaagctttggcttttctaactaaacagttatttccactcccccaccccccgaaaagccttgttcttattttctgagggaatgaaaatctttgtgtgaagaagtgtcaccaagtgtcttactcatcggcatgtaagccatctctttaagtgacagtgggagtaagggttcatcagttcaacatgcctttcacatttggagactcctgactaataaataacctctggcattcagcattagaacagccaaaagaactagaatctggcacatgctgctctcacgcacagagaaaaacttagaaagacagaagattcactccaactttctttcttctattcatttagaagaaaaagcgtacctttttctaattaaagattatgaacacacagaaacatctggcctatatcaccacagcaacctcctaaaacggcccgcttgtctccagcgtgtcctttaaaaacgaagtctgtatgcagcaggcagcgagctcttcctagcttgtaggtcggcaccagccgctcacgtcactgacatgtcaccatgggtctttcatgattcttggggtcaagtcctgtgcagtcacagttgctgtgctcctgcctgtagtctcccctggcatcacagagcactcagagctccttgcctctgcgtctctgaagggactctctcgacctgcgtagaagtccattcattcttcatgagctctctgcaggccctgctaagactggatctcgttggcttccacagccgttatccaggtctggccttttaatacttggctatattttaatttagacaaactggaatcccattgggcgaggctattactgctccattttgctcgaggcaaaaggccctaccaattggtatcgcacataaaattccaattacacatgtattctatgctaggtcatacaactacacttgtacctacctctatgacccaatggattagaacataagctgccccaagactgcggttatgtagtgcttctttttacatatgtaaatctggtaggaactgctcaatgtatgtgttctatacacatataaaaacacacctagaagatatactaatatataggcatatataatatacacttagaaaaaagtaaaattcactcaagaaagaacctggggcactttttggtactcatgatgtctcccaaacatcccaggactcacagtgctcagggacctggtagacacacacagtgctcagggacctggtagacacacacagtgctcaggggacctggtagacacacacagtgctcagggacctggtagacacacacagtgctcaggggacctggtagacacacacagtgctcagaggacgtggtagacacacacagtgctcaggggacctggtagacacacacagtgctcagaggacctggtagacacacacagtgctcaggggacctggtagatacacacagtgctcaggggacctggtagacacacatagtgctcaggggacctggtagacacacacagtgctcaggggacctggtagacacacacagtgctcaggggacctggtagacacacacagtgcttagggtcctggtagacacacacagtgcccagggacctggtagacacacacagtgctcaggggacctggtagacacacacagtgctcagggacctggtagacacacacagtgctcagggacctggtagacacacacagtgctcaggggacctggtagacacacagtgctgaggggatctggtagacacacacagtgctcaggggacctggtagatacacacagtgcccacagaatagctgggcctctggcctcaccatgagatgccagaaggatggcaccactgtggacatttgagccattaaaagtggtcattctcacgtttccaatcctgggagatccttcagaagtgaccatttccacatttatttcctgtattcattccacacacactatctactttgtcagtcttatggctagttgtagtcatggtacctgagttttctgaatttacaacacatacagatctataagagctgttcatgccagatgttgtaataacccattgcccattggttaacttagaataattgggaattttttttctgctttctttttctggttgtcttaaaactctttttttttaattggctattttatttatttatttttcaaatgttgtcccccttcctggtttcccttctgcagctcacccattccatccctcctcccctttgcctctgtgagggtgctcccccacccacccactcattcctccctcaaccttctagcattcccctacactggggcatcaagtctccacaggaccaagggcctctcctcccattgatgtctgacaaggtcatcctctgctacatatgtggccggagccatgggtccctccatgcatactctttggttgatagtttattgtctgggagctctgaggagtcccgttagttgatattgtttttcttcctatgggattacaatccccttcagctccttcagagtctgatacccatttcagaggatgaagacttcatctctgaaccacagagaaagaggatgaaataagagtctctgaatccagagcatccagatgcctgcatcctttaaggaaatgaagagactgcatgggacccagggcaggtcactctgtcaaaatctgcaggtgttctgtgttctagagacctagatctgtttcctttaaaaggacaaagaggtggtttatctatttattttgtgagcatatgtgagggtgggagagtctgtgtgggtcagggtgatgctcaggactttttagtggggggtgggggtgatggctggttctctccttatcctagagatcacgttttcaagatggaagtcagggttttgggtttggtggcaggcaccttaaccttcacagctatcttgctggcccagacactttatttgtttgtttgtttgtttgtttatttataattaactactttcctcttgtgtgtgtatgactgtgagtgtgcaagacaaaggaggagctgcatgactcaggtctctcctaccacatgggtcctcagaactgaagtgaaggtgtccggnnnnnnnnnnnnnnnnnnnnnnnnnnnnnnnnnnnnnnnnnnnnnnnnnnnnnnnnnnnnnnnnnnnnnnnnnnnnnnnnnnnnnnnnnnnnnnnnnnnnnnnnnnnnnnnnnnnnnnnnnnnnnnnnnnnnnnnnnnnnnnnnnnnnnnnnnnnnnnnnnnnnnnnnnnnnnnnnnnnnnnnnnnnnnnnnnnnnnnnnnnnnnnnnnnnnnnnnnnnnnnnnnnnnnnnnnnnnnnnnnnnnnnnnnnnnnnnnnnnnnnnnnnnnnnnnnnatccagggctgtaatgccaatgctcttggcataaattcagtctcgagagttctctgtaccgtcagggagtggtgtgggtgttgcagagggctgtacacactccaggcattttggagaaaataccctaacagctaaggatggagaaatggtcagctatcaggttaatgaaaagaacaaactcacaaaagaaataaatcccttctttagggagaagtggaggcaacacaaggagagtgtattgaagaatcctttaacagcctgagatctcactaacaattctgttaatgcgcctgcttggctgccatctcgggggcctgttgcgaattctttacttgatattattaatggttaatgggtgcacctgaaatcaagcaataatgcaccatttgggtaatagttatattaaatggctcttttatacaacatcgagcttatcagattatctcattcctaataatgagcacctcgtcttttccaatttcctaatccaatgtttcctcatcatcctgaaacaccgccatttccagacgcatctgttctatactctcagcttctgtgatgtcacactgccgtgctcctgggtccctccattctcgcaggcactgagacagaggcccctgtgcctctttgaaaactggtgatcagcagacattcagtacagggaaatcgtgagcaaaagacaccaccaggctgaatttatagtgatgtagaaatgtttatacaacaggtttctccctaaagtttggcgaattcatcttagatgtttctcttctttctgcttccatttctgaaacctgcgtaacctagtctaaatggcattgcttcagtacagaggcaacccacagcagggaccgaaagcaaaggatgtagtaaacaattagatatccataggtgctgccttaattggactgatcagaagtattgagggatctgacgtgatggctcagaagttaggagcatttactgttcttgcagaggactcgggttctgttcccagcattcacacagtgactcacagccatccacactttcatttccaggggacctaactccctcttctggcctccacaggtactgcatgcacacagtgaacatatatgcaagcaggtaaaaatacccatacagatttttaaataatcatgtttaaaaggaaggatcaagatttctgagcatcacatagttttttgtttttgtttttgttttttgtttttgatttgactgaatacttgtagcagacggaacaatgtaagaaatgctgaatagcacacagggagacaaatattttctctttctggaatattgagctgaaatgttaccgtatctactgagaaggatggatgacacaactcatcattttgaattgcgtcagttcaaatccttatctctatgttacattgctatctctcttagtttcatactatctctctcttcagtctatctctgtctatggtactttaaaaagtcccctttctcctggaagaaaagaacaaagcagactcacccctgggcatccacaacccagactgcattccccaggttcagttatccactaacaccagagcccatgggctttggtcctcaagcctccattgcctggcttgatgtcatagaccacagacagtacgagagtcatggaaggaagtcccgatcttacaatgtatgattacccaacttctttaattaaaatgaaacccagtgtggagtcacctgatcctgtttcctgatgcttaataccaaacacaggacagagtattcatgtattgtcccacgacgtttaacagaagaaaacacattgcatattttggaaccttatcatgagaagccaatatttagcacactgtatttccaattagtgaagtgaggaatgaattcttgccccaaagactaatgaatgatttggttgctggtgggtaatgtgatttttccttctctggactcctgtggttggaatgcctttaaacatttcagagctggaaaaggtttttggaaaacatttgaatttcttaaaatatctagacttcccagtagagagcatcactgaacacactcagcaaatgttgactgtgaccacaaactagtgaaccctagcacgtgatatatctggaaagtagcaatcattaacctgcttataatttgcaagctaaagatggagatatagcagcagatgcctgataaattcaatagtagtagcacatgtaaggaggaggaggaggaggaagaggagaggaatggccaccaccaagtgtatctggggaggcttcctggaagcagtgactaaatttgatatgaaccttgaaagaagtcagtgactgtcatgagggtaaatctcttgctgtacttggtgtgtttatttgtaagacaacatcacaccataagaaataagcttttaaagagcaaaaaagtctggaaagagttggaatctagactgtagcagccagctgcccttctctgtaccatggctcctgcagagtcaaggaacagagaggaatcaaacgaccctgcatttgtggatgcatctaggcgacataaggctactgcgtttcttggctgccaacttctgtggctttgtaaagacttgcattactaatgatccttagacacgaaggaaagcgcacgtgtgcggtgggaattcgccgtattttactgaacactgccactctccacatagcctatgggatgtgacttttcataaaatcgtaatgaatgtctgcatttgtcgagcagtttccaaacagatgcactctgctagtctaacagaaacatttaaagcccagaccccaaatatcaatagcttttagtattgcaaattagtctgtctattgggtaaatagggccgtgtggttcttgataaaaagtagcaaacaattctgcacgcgtgctttgtgtgtgaccataagcaattctgcgtgcgtgtttcgtgtgtaaccgtaagcaattctgcgtgcgtgtttcgtgtgtaaccaccttcccggagcctgagggtcctgtgcttcttttcagagctttaagttgaacgtagacagtcactgtgccctcaaggaagccgtggaggaagaaggacaccaacttcttgagctcattgcgtctcacaaagcaggtaaatccccctgaaatattgcgggtctttatgtctccagactattaagagtgaggaagcattgccgtaaattactgcatatattcacttccttatgtattattaatatttacattatcagattgaccttcaagatttataaatgtttcatatactgcatacaatgctgtggtacttataagatgaaatactgcctccaaacggtctgttcattttatttggggcttgccatccgcccgagttccaattgaaatcacactcctgaaaacttcacgttgacatgctttttgatgtaggagctctggaagtaacattaagataatgaatgagagctgttcttatagacacaatgcatacccactagggtgaacatagacatcattatgggttgaaggcaggctgcccatacacatctgattatttccctgccggttcacacatgtggacgtttggcatattctctgtaggtctttgcattagcagaagcttaggccttcaaccggttcttagaccaatgttgatgaattcatgaaaaaaaatgcattatgaacaaaaagaagttttcttgtatggttccacttatcctgatagtcaaagaccacaaaacagggtgagttgaagctcccccactcccctgcacttactatacaaacgggaaaagaaccgcattaagcagatatgttaatgccaaatagcagtctcttgattctggcctatttactgtatttccagttgaattacctgtctgttttcagatatctttctttctgatcattaggaagtctccatgcagataaacccagggcctttatactggaggtgtgaagctatagccttaatgacatttacacaccacgatccttccacttttattgttcacaccaaaccaccaagtctgcgtcagtttctgcacatgcctgccctgtttctgcattgttatgtcttagcattgccagtctcagctctgggtggcaagtgccaggcaatgggaaggtcgtttagaagcatgtgtacggcttgaaatagccacccagctttctatgtcacaacccgtagcggggtaaagatgcagccgggcccacaacttgtgctttcctctcctttggagaaggactgaaggacatgctgaagatgattgcaagtcaatggaaggagctgcagaggcaaatcaaacggcaacacagctggattctcagagccctggacaccatcaaagccgagatactggctactgatgtgtctgtggaggacgaggaggggacggggagccccaaggtaagtggcttgaagtttgccttattccctcttattcctgtcttcttttgaactaggcaccactgaagttttctttccacccctaaggctcttcttttctagtgggtaaactttgtaactcctctgtctctgtctctctcctcccatatatatatatattagtatgtatatatatcttggctgaaaacaaaacaaaaggcgacaactttcaagttttccaggaagaggtctctttgtacaaagtagcagagcagaagggggacaggattctcagggggtgggaggaagagggggggcgcataaaacatttagtaaacaaaacataaagcatctttaacatgaataatcagaatggttttaaattgttttgttgcaactataaatcactataatcagtgcaatcactcagctctgacatccattagccgcttggttacagcaaattaacaaagaagagagaaagtgattcattatctcattcctgttaatgactatcagatgcattgcctaattaggggatggtcattgtagtgggaagaaggtcatgtgctttgctacaaatctttttgctcagagtgtaacttctccataatggcgcctgcaccgaatacagcaaagtattttttaaaaacgagtattggcatgttttgattatccattttggatttacaaaatagcctgtggaacatatgccgctgaacattaaatgaggcgccttttaagtcggaacactacggtcgtaaaggtattctttggatttacaatgtcgaaaacaattttattaatctgacattttcttaacagtttctcaatttgtgaaagggactccagaaattagttgcctggtagactcaggatctgaacatattgtagcacgggggagacagattgaaaagttcatagtttctattcctggaacggacagagcgagtaacactccccaaccgcatttcttcagcacgcgtgtgcacgagcattgcgctctgagtgagctagcacccactgtgccctctgagactcagacttttaatacaggcagagcagaaacccaagccagcctcacaacattgagaccgtgcagcctgtgaaaagcccaggggattccctttatctgttggcaccagaattgaacggcaagatcagcccaactggaacctaggtcgaagaggtcacatttcaggaaacacctgaagaaagagagagaggtgcgtggcacatgagcacatattttaggaagtgacctgatgggaggttcaaagctgcagctagcaccagggacctgactgtagtcagcagacatctgcttgcagaggaagcagttgattggcaacggcttcactgtggaagtggagccgaaatgacaagaaagcacagaactaaaagctgggttgtgttttatttatttaacagaaagaggggctgagaagtagactcatggtagagtacttgcctagcatacatgaggacataagcaagattgccaacaccacaaaaccaaaccaaaagctctgtcatgtccaattcccattcactggctgccctgtattcagccatcacagcaaacactaaacacagtcaagagaccccagagaggttaaccagtttgcctaagggcagacagccactaaatctcagagctagggctccaggctgcacttccaggcttagatcccctgttctccctctccaccgtctgctccctgctgcctgggctcagtgtgcatgtagagctgttagagaggtggggcttgtggggatggagggttaggatgcttttgagactgtactattaaaacgatgaagggaaacaggtcgcaggacagaagagactcagaaaagttgagggagggttgccatgagggagtgacatgccacagagtagtggtctgagaagggtaagcatcgaggaggaagctgttgacttgtgtgtgtgtgtgtgtctgtgtgtgtgtgtgtgtgtgtgtgtgtgtgtgtgtgtgtgtctgtgtgtgtgtctgtgtgtgtgtctgtgtgtgtgtctgtgtgtgtctgtgtgtgtgtgtgtctgtgactaagtgggaaataaccctggatttctgtgtagatacattctccactgtctataagtcacgaggcaggggtggatgacttacatgaggaagggaggacatgatataccacagggatctccagagacgtgcacctcagactgatgggagagctgtggtgtggtgtggtgtggtaaagctggtcaacaggactgggtttcagtcagcttgtttcctgagccagagcaaaagagacaacatctgccttctcagaaaacctcctctgagcacaggtcactcctcacgttctaacaggaactcctgtaagaggcgtactgccccccacacacacagaatcaatgaatgggaagatgtctgagacattgacacttaaatagcagacagtaccagctaaagtgtttcaacaaggattgtatgattaaactgagctacattttattctggcaaaatgttccatggccattagagagcagtgttttagagggctttgtaaaaagtagatgatacctctatttagctatgtatttcaaaataactttgacttttctaagtctctaccttgaccaagaactactctaagaagggaaaaaagagtaagtataaagtgtaagagttaaaaattatttaaaaggtcaaatgagggacacggtgcactgggaaggggagtctgaagttaaggatgagaaggggacatgaataccctggcccgtgatgatccctgtccctgtcctggaaaacagaaggcaaaccacaaacacctgcgtttgggtcattgcagaagagacagtgtcccgagtttcgtcagcttacagagaacagacttgttcttagtaaggcatttctgctctgtggtaccttcaggtcaccacacaaatgtcacaaatgaaaatactgacaggaagagattgtgtgtgttgtctgcacacggggaacccaggagctgcagagccaggtgatcttccctgacaaacccagccatactcaaggacagatgtaaaataaacttaaggataaggatgcaatgggggaaagatcaggtttctttttcctatttgtttaatgtttatgaattgtttctcttagacttgggacaaactaaatttcaaggagagagacttagagtgcttgaattaaatggctgtcacttactaccaggtgtctttgggaccattacccaacttctctgtgtctcctatttctcatttgtaaaatggaggtgatggggccaccgagaagctcagagtgtggaggcatccagcctgttggcctgggtttaatctctgagagacacacgtggtggggttcaaaaagctaactgcccctaaattgttttctgccctccacatgtgaactctaacatgcctaagtcatcccccaaccctcatagaacataataacattttaaaaaatttttgaaggggtaaagataagttcttcctcaaatatctgtcatcttagtttaaagaatgcttacaatgagtgggtgttttgtggaatacccacagtcccagcactgaagaggcagagcactaagatcactgaagactggggccggcccgtccactaaatgagcttcaagccagcaaggacataaatgcagtatgcaggacagagccttgcgcagagccattcctaagcaggcaaatggaatgcagaagcctttgccgtctaatgacacaagagacaaacgatcacaatggatttgataaaattccaataggaactggaacaagatgctccaagtagaggagggagaaacatcaaggaaacacacggaaggagcggactctttaaagtaaagacgggaagaaatttgccagtgtgaaaatgatgggcagagagattagcatgttaaagactcagaagtgtgagatggttggtgggtctggaacccataaccactgcataggttatgcttgcttaccaggatctgcactgtggctcccggtatgaaaaattgatcctgactaattagcgattggagcaataagactccaagtctgaaggacacacatacatattgcttaagaaatgtctgccatgtagcatcaagtagcgcgagctgaaataggccacactagagctccccttgactgagagatagcctctgctgcttcctgtcccttccaggagtcttcttcctatgacgtgaccttgctcgggtcgctcacaaggtgtgccatgaaatgcagccccaaacatggcagttacggttttctgtttcatctgagacctaagagagggatgaaaattaaaacatgataaaaataactccagaactcatcttaggtttacttcagaagcaactgggagcctgagaagcgtaataggaaatctaaggaatatatctagggggtatttttcttttttaccttgtttgagagactgcgggaaagggcttggtcttagaaatcttgtaaaggcggaggagaggaggcaattcaaagactgtgggaaacgtctcccccaggacttggcagcatgcgttatttgttggatttcattttttttttaaagtgttttcccaggactgcgagatcttttatacctggaaatagagaatgtaacccatcagttttagaaatacaactttagcatatgcatccaagaatttgaaatatgcttgtaattgtgtattttcagaaagactgataaaagtttatcaacttaaactagaggtttagtattttaattgttttagcgattcgcagttggatgatttcaaaatatagtgactacctaacgttttaacatggttttgacctttcaaggtaaaagccagaatatcctaaggaagagaaaattagtcgacattgtctcctttaaaatattctcatctgccctctctttattttcctgaagcttggcatccatcaggatgtagaatcaggggccaggatctcccccatgagacttacccagctttgtctcactgaaaatatgcaacaactgcctctctgtccttttaaaggaaacagatctaggtttctagaacacagaaaacctgcagattttgacagagtgacctgccctggatcccatgcagtctcttcatttccttaaaggatgcaggcatctggatgctctggacttggggactcttatttcatcctctttctctgtgggtcagagatgaagtcctcatcctctgaaatgggaatcagactctgaagcttgtcaagaccatcagctcaacgctagctggagagcaagctcacaggggcctttacatatgcttgcgagggcctacagataagagttttaggtctgactgggattgggagttgtgtagcttttgacttaggtagtcagtggaaagttgagtattaataggcactctggcatgtttgcttacccgaagtccaagtgctaacctagtgcttaggcaaatgagttgtgtaactctgcttaattaaagaatatgaactagggggcatgttaagaagatgctctctgcatgagatgacacctttggggtaatagtgcaacacgatgctgcggttctgggttctggaatatgggtcgatcctgaatttttcaaagcaccactgagactaagattatctctgcactaagctctgttctagctaagggacataggtcatcagtgtgttctttactataagttcttcataaagagcattgaggtcatagcgggaatcacatttatatattatcagttcctctactgctatacactcatattaaattctacttgagacccctcctttttttaacctaaagcaaagaaaggcataggcacataatatcaaaaggaactagaagtgagatagtaggattaaattgcatccaacaaggacagagagacaccaggcaatggcctagctgtttatttattgagtgctgacaggaaactctgcccggtgctgagctgtacatgagagaggacacgctttcctgctcagcggtcttatcattcatgtaagcacagagtgtaatggcttgccgaacgggcttcgggctatcttagatctagaataatagatcacctaagattcagatcatcttaattaggatgttggcagactgaaatggaatggtgctcttgatgaaagcaaacgaggaggaagtgcattcgcacatctgcagcctctacacagcatctagccggctcacagcccttccaacagcccttccctgctccagcggagtcatgatcctgctttgaggacctagggagagcttccttctcttatggatttgtcaccagctcctcttgtgttcccagaagaggcaattctgtttcgaaaatgctttatggtttttgaaagtcaacaacaaaaatgagttacttcgttgaagaccagtgtggttactaaatattgattcaatccagttttacaaaaggtttctctaatttcctattttgcatattatcaacctgtggctttgatgagttgactggggaaaaggattatgaaaataaacacagctaatggtaggtcaaaggtcaaatagtggccatctctatacatgaatagaggtgagtatatgtgagtatagtatagtgcagtgtagagtagtgcagtatagtgcagtgtagtgcagtgcagtgcagtgtagagtagtgcagcatagtgcagtgttgtgtagttcagtgcagtgcagtgcagtggagtgtggtatagctgataagactacagcttaaggtctgtcttcccactgtagttccgtcactggtgaccatgactagagaatagaaacgtttgcctcagcaagaatttgagtgaaattctttggtgtctgatcaacacctagaaattttactgaagtaagtaggcatttgacttttccctatctgtttactggtacccagaagttaaaaagattcatgctgttggctactaacttagagtccatagaacgcagtcttctactaccacacccaaacctcccctttctattcattataaagacaatatacaataaacacaatagagagattttttctttaatgcacagtggaggtcaccatctgttgaaactgtcatatataaatacatacacaaaaagtcaagatacaaaatcgcttctaaagatgctttcaaattaatgagtagattctttgaaagagtgagacaatggcctcagtgtgtcacttactcttctttcttggaatgtgttgtttctgtcaggggagcgcttggccagcgagagccttgcctgctgaggagatcaccctgcattgtgttggctcttgtgtttatcgagtcacacaggactgcatataaaacagcgctttacaagtacccacccttaacacttcacactcctgtttagctgctttcactcttctacccagggatgtcacttctatccagggatgtcaaggggtattgagatggccaccttctgctcatctctctcagatacggttgagagnnnnnnnnnnnnnnnnnnnnccagcatatgaaacacaaccacctaagtttctcaggtgtctgcctacagtctcatcatttccccctgggcttctctacaaagctcactgcttccacaggatgcagctctgagtgcatccaccctgctggtcctccctgtcctgtttgcaacaccattccctcagaatccttttctgtaccccattgcttcgcaacagacgttctttaggtcttccttcaccatagctctctacaaatacctctcattttccagactgcccagttgccctttgagctcattcagctccctgcatctttgtgcatgtttcctccctaactctctcctcactggcgagtgccagtgctgggttcttgttcagctcacatctatggcaatgtgatccagtttattttcagtgtccctgttacatttatacctcagttctacacatcacatctgctctctgaatgttatattagagatgcactacgagctgcatagtccctgaacatgaggaccatttctggttctccattctatatactgcaatgcagtgctcagcgtaatatatctctcagggagtatattaaaaaaatgcttgtttgaataaacaaagatttcataacaggaatcaaaatagtaacccatattggaagatggtgctgagtagaacgtgggcttacttagctaactggggacgcattcggggaaatcggtatggttgtctcctactgattcttctccctctttgttctggctgctctgagctgagcagaccccataggtgacatgtgccccaccactgtgacagtcttcctcactttaggcccctagatgaaggggccaatagtacttggacctttgaaaccatgagtcagaataattctttcctttaaggtatatatggtattttgttccaccaatgaaaaattataaacctaatggccatttgtctctttaaatagctgggatgagaaggaaaaggtgatttttgtaagctaatatttcataaaacaacaataaagtatnnnnnnnnnnnnnnnnnnnntgacttttcccctatctgtttactggtacccagtaagttaaaaagattcatgctgttggctactaacttagagtccatagaacgcagtcttttaactaccacacccaaaacctccccttctattcattataaagacaatatacaataaacacaatagagagattttttctttaatgcacagtggaggtcaccatctgttgaaactgtcatatataaatacatacacaaaaagtcaagatacaaaatcgcttctaaagatgctttcaaattaatgagtagattctttgaaagagtgagacaatggcctcagtgtgtcacttactcttctttcttggaatgtgttgtttctgtcaggggagcgcttggccagcgagagccttgcctgctgaggagatcaccctgcattgtgttggctcttgtgtttatcgagtcacacaggactgcatataaaacagcgctttacaagtacccacccttaacacttcacactcctgtttagctgctttcactcttctacccagggatgtcacttctatccagggatgtcaaggggtattgagatggccaccttctgctcatctctctcagatacggttgagagatggccactgagttgtgatggcgccagaactctttcagtcttatttcccactatccttaaatgaaaggtaacacttctcaaaaaatgctatatgtagaggtttactaacatatcacacagacagacagacagacagacaggcacacatgtccgcacgcaggcacgcatgcacacacacacacacacacatacacatttatagggagacgttaactggattggaggcattctagtcccaacctcaaggcccagttccacacaacttttaggccactcttcactgaacttgggcaacagattctcatatttatacttggttgagcattgtctcctggactacgtaaatttgtggacctcagtaagtgagaaagagcagaagaggaaaaaaacaaaaacaaaaaccaagcccaaagaaaagactcagataaatgtaacaagagaagaagaagaagggtgaaagcaggagccattaattcagggacatgccacagtccctgaaagtcattgtctgagcttggctgtggatgagtcctacctagcctgcccatgctctcctgtggacacggccggcctcccataggctgcccacatgaggcatgcgggcatctctggtttcttgcctctcttgagtgtaacctctctcacacttactccttcactctggacaccaaagtcaaaaaaccatctttatatttgacatcacagatatcattgtttgaccaccatgtgctttattacatgtgtgttagtatttatagaagccttattatactctaggttcatgttcagccctttacccatttccctcgcataattgagatgcataccaatattccattccctataccttcttgtttttctttacttaaaatgtgttcccctctcttttctctgcctcattcatggctctcacagaccctctctctataatgctcttattcatctgtaaaatcaatgagtattgactgcagtcttttaaactccatgaatataattctaaagggagtgagcctaatttcaatctgattatatatgagaagacatttaccccacttacagaatatgggttttatagtagtatctaatattcagctaagttagaagtcaggagatattggaggacagacatcctaggtaaaaacaaacaaacaaaacacaaaaaaagggaaaatttgaaggaccgttaggaaaggactgctaggaaaggacaagcaagaagagtttcactcttttgaaactggaaagcccctgtgttcatgtgaagggagagaggccttatggaggttaaagctgagatgcattgtagagagctttaagtaataggctgaagagttgctatactcacatgaatgcttctgatgattcagtatgtccatagaaaacagatggctaaggccaggtggaagagaacggctgtaaagtcattacagaggcttaggagcacactcttgttgtcctgggagttgggagaccaaggtaggagaatcacaagttcaatgccaactggggctacatggcaagacccaatcttattggttatcagactattaccattccagggaacttgaatttagatatgcaaaagaacaaccttaaagtgttcttgctatcacctcttaccatctcaagaaggcatgagcacagcacaataaaaatttgagactacattcagaaacttttatgttatgcaattataaatgatatatccttataaatgccttactgtattgatggctattgataatcttttactgcctttagttttaaaattaagctttattattatatgtgtataagagaaaacataggatatatagaatttggtaataaatgtgcatttttaaaaagcccctgtggggtcttgaaatatatccaccatgtttaaagaagactgccatacagtgaatcagtgcaggagaggaagttacttaggggtggggatctgcgaagttcaagaaggaatatgtcttctccaatcaaagagatagaatagatgaatgttgatgataaagtaaagacaaagacaatggatttaggatgatgtcagacactgtgactagtctctggagaaatgcttgccatagagagcgggcagagggagagaggcaggtctgggagagcagagtaggatctgaatccccttctgagagttcgtaccatgtctatcctggctaaggtgaactgcatttactgtttatgctgcagtttaatggttaatcatacgcagccttgtgacatcaccttcatcttgacattccacttatctcttttatagtcggctttgagggtgaggccaccaagactgaaaattccttggaagagcaagttcatcttaaagtttgtttgcctcagtttgcataatgctccagtgtacaatatagtttatttacatttatcggcttactatgcattttctccttaatgctgatgatggaactccactgtatcttcgcatctgtcacaatgcaatgtttatcctaactttgtaaacaatggcccactctttgattttctctgcttctcccgtatttccatttcctgttggttttcattccaaacaaaacaatcttaagtgaaccttaagtggtcattttacctattttcccaataatttatactataaaagagaaaatgtccacaattttactactaccactgagcttacttaaggcaagtccctttggttaattattggagttggtcactcagatttcacatctactttatttttaagttgttttaaaatgcttgctcaaatggtatattctgtgtaacttccttaaaataaaaacctaaaagcatctaaaaggaattagtaactggccagctcactagttgatgaaatttgtggtctttgctttaaagctctgtaacaaagttaggtacgattgaccctgaaaaggtagaggtctctaaattgacataaattcaaagggcagaactagatcataccagtatttgaatgtctaacaaagtctaatctctgacatattatatttggttcactacagtctgtgttcataaatatatccttctagtaaatgacaaatgtgaggtttagctaacataataaagtgtgtatgcttctagacctttatagactgcacacagctggagagctctgccctgtataatgactgcagggttcctctgtatatcgtttctctggaacacactccacagagcagcacatgcccacacataagcactcatgtgttttcccagctttgttggactcacttccttgctgccctccatttgctatctcttgtagatgcccggacttcattctaccaataggattccaggtgagggatactaaatttcactggataggtgcatgtggataaagtccgaaatcattcattcatagcaagaacttctgacccaattctgaggccagaaaggagtgttgtttcttcaatatattcaaacctatagtgtttatttgagccatccaaattaaagggctatgcattttttaattatgaggaattttgaaacacttcttcatttcaactcttctcgttttgttttcagtctcagtcccaatgcatggctccctccnnnnnnnnnnnnnnnnnnnnnnnnnnnnnnnnnnnnnnnnnnnnnnnnnnnnnnnnnnnnnnnnnnnnnnnnnnnnnnnnnnnnnnnnnnnnnnnnnnnnnnnnnnnnnnnnnnnnnnnnnnnnnnnnnnnnnnnnnnnnnnnnnnnnnnnnnnnnnnnnnnnnnnnnnnnnnnnnnnnnnnnnnnnntccttcctctccccctctttccctttccccctccctgacccactgcccctttctccctttctttttcctttgcaacatgaaaatatcagatcatagtgtgttataccgctgattttttttttattgatacattctatgacatcgctgatcatgactgttttagggatgtgccagcctgcttggcacatttcaatttccccattatccaagacttaggatattctataccttggcctaccgtgcactttgcaagtgatttttcagcgacactctttttaaaaaaacactccttattactttccttgacacaatattctaagaactgtatatgcttttaaaagggagctttctggctctcattgctcattctcaatcatgctcttatattactgtctttttttctttaaactgaagttgacaagaataatatgaacagaaaacaaatgtagttttcaaagtcttcattgtatagtatcgttatattttatgtattttagaatgaaatgaaatcatttttattccctaataagtgggcttcgtgactattactgtaattcagtcattggaaattgcctttcttttttatttgaacgctaagaatcattaactgttcaatataggacaaagagaacaacaatgtgaacaaagatattctgagtaagggtagctctaatgtcctcagtgtttgtctgccttcagagttacttttgtattttgtccaagtgcagagtggtttgcagtcgtattcctaaatcagacctttgagaaatggtatattcaattgttgtatgcagattattttagttttagttgtgcacaaaaagcttaatgacaatcctccattggctcatacacaaaatggaaatgaggagcaggagtttgaagatggaatctctttggaaatcctgcattttaagcagatgttctcttacagcctcctgtcaatgaatgccttgaaatagaagctcttggtttatgtacttttccaaggcaatcaatagttctttcttcccataaatagtaaaattggttattaggaagtgtaggcacacttgtcctcataaaagggaaatgggttgagcttgttgcactaatgatttaatcagcaacagcaacagcaaataacccttattaaacttaatacagcaggccctgcagcctgcgtgacattccttcttcctgacagaaccacttgttcagccttcatagctatcttctctcatgtggtgtcattctagggaggtgaatcaccttcctccgccaggcagtgaatcatggttggtctatcaaacagacaaaaccattcctttgccatgaccaactgtaattggtttgagcccgaccagctgccatacactcatctggtcagtgaactctggagagcagtctctacgatgctctggaaagatttcctttctagtagaagacaaataagaagaaagggctccctgcaaactctaggtgctttctttggagagggtgtgaagctgctgcctgcagctgctccctgtagctgttactgtcacctgagctggattaagaagttgcactcaccccatgccaagggtggcagaagggacgggtgattctttttttttttttccattttttattaggtatttagctcatttacatttcccatgctataccaaaagtcccccatacccacccaccnnnnnnnnnnnnnnnnnnnnccactccccctttttggccctggcgttctcctgtactggggcatataaagtttgcgtgtccaatgggcctctctttccagtgatggccgactaggccatcttttgatacatatgcagctagggtcaagagctccggggtactggttagttcataatgttgttccacctatagggttgcagatccctttagctccttgggtactttctctagctcctccattgggagccctgtgatccatccattagctgactgtgagcatccacttctgtgtttgctaggccccggcatagtctcacaagagacagctacatctgggtcctttcgataaaatcttgctagtatatgcgatggtatcagcgtttggatgctgattatggggtggatccctggatatggcagtctctacatggtccatcctttcatctcagctccaaactttgtctctgtaactccttccatggatgttttgatcccaattctaaggaggggcatagtgtccacacttcagtcttcattcttcttgagtttcatgtgtttaggaaattgtatcttatatcttgggtatcctaggtttggggctagtatccacttatcagtgagtacatattgtgtgagttcctttgtgaatgtgttacctcactcaggatgatgccctccaggtccatccatttggctaggaatttcataagttcattctttttaatagctgagtagtactccattgtgtagatgtaccacattttctgtatccattcctctgttgaggggcatctgggttctttccaacttctggctattataaataaggctgctatggacatagtggagcatgtgtccttcttaccagttggggcatcttctggatatatgcccaggagaggtattgctggatcctccggtagtactatgtccaattttctgaggaactgccagactgatttccagagtggttgtacaagcctgcaatcccaccaacaatggaggagtgttcctctttctccacatccatgccagcatctgctattacctgaatttttcatcttagccattctgactggtgtgaggtggaatctcagggttgttttgatttgcatttccctgatgattaaggatgttgaacattttttcaggtgcttctctgccattcggcattcctcaggtgagaattctttgttcagttctgagccccatttttaatggggttatttgattttctgaagtccaccttcttgagttctttatatatgttggatattagtcccctatctgatttaggataggtaaagatcctttcccaatctgttggtggtctttttgtcttattgacggtgtcttttgccttgcagaaactttggagtttcattaggtcccatttgtcaattctcgatcttacagcacaagccattgctgttctgttcaggaatttttcccctgtgcccgggacgggtgattcttaatatcaccacatggctgaaccgaccaggtctggaggtagcatgcccttggcaatttcataacgtccttcttcttgagcctaccattagttggaattggagtcttcatcaagtagacctgaccctgtgaactaatctctaaataaaacatttgatcctgattgatagtttcaatgtgcaaatttagttgctattttttaagctaaactttactcctaggtccagcatatgaaacacaaccacctaaggtttctcaggtgtctgcctacagtctcatcatttccccctgggcttctctacaaagctcactgcttctacagaatgcagctctgagtgcatccaccctgctggtcctccctgtcctgtttgcaacaccattccctcagaatccttttctgtaccccattgcttcgcaacagacgttctttaggtcttccttcaccatagctctctacaaatacctctcattttccagactgctcagttgccctttgagctcgttcagctccctgcatctttgtgcatgtttcctccttaactctctcctcactggcgcgtgccagtgctgggttcttgttcagctcacatctatggcaatgtgatccagtttattttcagtgtccctgttacatttatacctcagttctacacatcacatctgctctgaatgttatattagagatgcactacgagctgcatagtccctgaacatgaggaccatttctggttttccattctatatactgcaatgcaatgctcagcgtaatatatctctcagggagtatattaaaaaaatgcttgtttgaataaacaaagatttcataacaggaatcaaaatagtaagttgtattcatgccctttccattcatctttagctatttaagtacttatatgaaatttgtaagctctctgaggttatagagaatgaaaaggactgattatacttaattaacatggtggaacatagtccagttatgtgaaaatctggagatttcagtgctgaatattctctaagatgaaatttcacatttaaaatggtacaggtaaaggaaagcaacctacaacacatatacttggaaatctgttcttctaaaaacattttaaaatggagttattttatgaattagctaattgttagctgagattctggactaattaattatgatttaatagtcagtgtggatagctagtactatcaccccattttttaatgttaattttttatctaagtaattagtactaaatgccaaaaggtaatagtaaaactatataatatcaataaagtataaagtttagtgtttattatctgttttctgagcctctgtaagattatcattccttaacagaatgtgagagttacattaagtttaataaaaatgccaaaaagttggtgaaagggagaatagagcattgtgcaactattgtttctactgtttgattggcttcttctcacttcattaactttaatatgtcaggcatgtctctcattggcacatggcagttggagacttgatttctagctggtgggctctggggagagaactagatcccgaagacctctgatctaaccagtggattaatttcctggggaacccatgtattatagcattattggaagatggtgctgagtagaacgtgggcttacttagctaactggggatgcattcggggaaatcggtatggttgtctcctattgattcttctccctctttgttctggctgctctgagctgagcagaccccataggtgacatgtgccccaccactgtgacagtcttcctcactttaggcccctagatgaaggggccaatagtacttggacctttgaaaccatgagtcagaataattctttcctttaaggtatatatggtattttgttccaccaatgaaaaattataaacctaatggccatttgtctctttaaatagctgggatgagaaggaaaaggtgattttgtaagctaatatttcataaaacaacaataaagtatatggcaatataactattattggcttgctttgtagtttaaaaagccctcaaatttaatacatttttccttaaagattaaattaaatatcagttattttcattgaggaagaaccaactttgagacgaaaaatgataggacaaatagaaaacttacagagctagccagtggggtgctaagagcaagtttatatatcttcacatctcaagtcagatggaatgtggtgacccaggaatgtcagagaatctcttcgttagctatgctatctgcacatgacaagtgatggtgttccctcccctctttccctccccgaggtgatcatgtaagagttgactatttcataggtgattgtcagtagttcagaggtattctattaataaactcctatagttactgccaatctgggagtctgattcctcgttctcctgcagagctaggtggggtggttgacatttctgggctgtatgttggacctttgagtggacataagatcataggaaaataaaaaggaaaatcataggattaggggaaagttagagatgaaaaaccaaaggaacagcctgaggtaaagacagatctgaaacaaaatatagcaggaaagagtatgaagaagaaaacaagaagtgggtcctggacagattcattaaatgaccaaaactcagagtcaaattcttcacgagtttcagtggtacctaccattggtgttaacagtagtgacagttgtacatgaggatatcagtcccggaatgggtcatggtttttacatcccatcatgtggtttttgacgttccttcttcagagcaaaaatgctggtcatgtagatcttaacaggttccactcacaacaatgtcagtcttcaagtttcagaataaatcttaaggttctagagatgtaagagataacagacccaagctcttgaagttttatatgaaagtttattgtgaatgtggttctggtaacttgttcaggattgttgatattatgattttattaacatgaatttagagatctacagtagctttctgtgggtcatttattcttgctgggtgtgttattcatagtgtaacatctgacgtatgacacttggctagtcgatttaacaggggctcagttgctgatccctcaccaccgttcacgtctccatctccttgctcctaattccacagggcttggttcaaatcaagaaaggagaatggttcacttacaataagggctgtgaggaaagggcttcgggctctcatggtcttgtctgtacaatgcctcagtaaattctttcttcctgtatttgacactttttgcttaacaaccaggatgcttctgtggggtcaatctccagagacaaagaagcatgacctgtgctgcagacatagaagactcacaggagaaccaaagaagaaagcttttattctaagtaggtttatctatgtcagcatctatggctcgagccttatactccctgtataaagctgagtaccataccttgatctcctaagaaacacagagcagtaagtgggcttcatagcctgtctgcatctgactgctctgaccatgttaatcgtcatgtgttcataaaagcatacaaggccccagggatctgtgttgggcaaagtcaataagttgtttagtttgtgcacaatttggggagaagagagtagagtgcaaacgtgaattgacagtgaccaagtaaatgaaagtgcttaaaataaatgctggtgaatggctttttatttaacggtattgttattccaaatgaaaaggtcttgataaatataacttaactttgttacttgcaaggccaataagaaggcattctgcaagtacaggaagaaaagcaagctgctgggtttatgagtccaggaccctgtacaattacacatagcatcgaagataccagtagtagttgatcacaaatgatgacaaagcatagagctaataagacagataaaaatatgctgttcaaggaaatagtctgcttttatggagcacatgacattcctgcatcctgtgtctgccatgatataatgaccctattaacagaaaagaaatggaagataaggagtcagcttgcttgctgcccaagcccaccataacactgtaaattgcctaaagtaagtttacagctcttaggaaagaaattacacttgttgaatgggcctttgggctagctggagaaatcggtaatttaagagatgtggggcttaattctgatgaaatttgattcagatttctcacataaaacaatcatggctttttataatatagaaaaatacgagacaattaaggccaggaaaaaaataggcctgagacaataaaaaatcgtaccccttttcctgttccataaaactatggtagagtgctaagtaagacaaacaaccttataattataaagcaagttataagaagttatttttacactaaaattcacattaatggcttcagccacagcacagttattaccaattgctaataacttgttgccacaaacaagcttgaaatttatttcatattctgtagtcctaataatttttttgaaaaagtatggcattcgaacggcgtaattaaaaaaagtagaataataaacctatatatttatgaagggcttgtgtgtgtatttgcttaaagtaagacagataatttctagtgattttgtgagtcacacggtgaataattaaaataaattcaaatattatcatttcaatttccagtttggtgaacataagcaaattattatgtttgttttcaattcctgcaaagcatattaaaatgaacttttcctcaatttaagtaatgtgtataactaaacttccttcccactgtgcgatggtttcatttattgctgtttgtaaactgcctgggatggatgcggagtggattggacttgggactccttgaacagtttcttctgaaataacactacatacgttaagctcaattacacatccaaacagccacggctcacttttggtaatttattcattgatttaacatagcacccagaagagccatgcctgctgtcagttttgtaatatattatgttttaaatatactcatgctcacccatgcacaccattaaggtgtgcataaacctgtgtttttctctcttgacagctataaatgtttgttattattacacaaaacatatgttcatgttgtttttgtctaaattattctatctggggctataaagttttaatgttattagttgcccttagaattttaatgtttcactgccgtaaccttcttaggatttctgtgcaattaaatagaaactatttcactgcagcctggaagaacaatatattttattcaaataaaaaaacaaaaagcaaaaaaatccaccttcttgctgcattcttccagtatgtcaaaaatgttcagttgacaacttctcctttttggttcaatggtggtcagacggggtcacatctggtgaaacgttcaacattgttcttcttcctgcctggcatgtcttggaaagacacggattaggtaccatttcagtcaagggaagacacttcaaacagctttctagggttgttcagggtactgccttgatgactgcatgtggccttgacttcagtctaaagtacatggagacctgcagggactaagctcagtctaaagcaggacagacctctaacttgcctttccctgccaccctgtgcttaggtagagagtggctttatttacataacaatggaaacagcatcatttggcagagtcatagccatcaatgaggtgtttctgccctcctctttgtattcactggacctgagtttccacaaaatttgatttatttttaataacctgactccactcattaatacacaaaatttctggctgtcagcagtacttctcagccagttgaccccttgcagtatattcaacagagtactcttaaaaaagatgctaaccctcatgaagaaataattctttttctttaaacagtgatcctgagataacttacatcacggaactagaatttttcagtgttttcagagctgatcatcaggaaaccgaattagtgactgtcggctttcttctttaacagtacccagttaaaggcattctccagaaagggaaccaggaattgaggttcttaaagcatgtgtgtgtcaggagcagtctgttggttctactttccctgtgtaatactctctgcaaagcctaattaaaaagttaaagccacattttcatccctgtgcagacttcgtttgtctcctcctcctccttttagagtattcacaaatgacagaaattaaagtatttagtagacagaagtcactgcttaaaatagtcgctttagctaacgtagaccatttttatctggagattttgccagttacatgatgaagttggcagaacagagagagggtgcgtgcagattctagctaccgtcttttttagaaatataaagaactatagtagaaaaattcagcatttgtaaaataatggagggaacagaatgggaaggaaaggtgcccagttacacaatagcttctcacccagtgctcatcgctgctaaataactaatcatgtgtggccaggttcctccgtgaggaaagggtcatgtctgtcagttacctgatggtaataaccgtagcggtcattaaaggggacagatgctattaagaatagaacctcaactttttattgaattctttatttaaatgatattaactttaattcaatgtttaattgaggtgtaaccatgcaaactctacagtcaggcaccaggaagtaatgaacataaaattacatgttcttctgataggttgacgggtctttattaaaatttcaagggtctccacagagctttgagtagacacaaactgctcttgaagtcttctgttatattagggctaggttccaggaaatcattttaacttagaccatggaaaaacagggagaaagcctttaaagagaaggaagttcttttacgttaagacagaagttaagacagaagaccccttgtaaatggcaagctgtgggtgcatctgtcatgtctccaccaagaagcatctttcttctttcttccttctcttccaactgcatgagaagagatagcatcccctagatgcctgccaaaggagcacacaaacttttcctgcatccctcgatggccagctatcagtgggcctcattttaaatgtgagagatgattgtagctttgtttctctaaggaactgagcatacaaaagcaacgtgtcacagtgcgaagagttgcacataagcatctatggagtaaggaggcaggaggacccagatttctaaacacaaagcagcacttacatgttatttgaaattatgtctttaaaaaagagtggagattctttgccataatccactgaataatcacttgacactagaggaataaaatgtttcctaatagctaggttcctatgactacttttgtgtgacacctagaaatatactattttataatattctgactatctcaattcctatatataagctgtaaagtatgcatgtaagctttatgtactgtatcaaaggtatatgtaaggtatatgtaactacctcttcctgtcaccattatatacatttgtcccaatttaatgtacaaaaaaatttaaatgaagatctcacttcattttaaatgtaagctttgaaaagattttgtttcataaacttattaaatttactctgagccatttttaaattaaaattacaagtaaagaacccattgttcatatttagaaaatcatcttctttccaatataagagctgtacaatggaaatcacctcatgttgctattgtgaaaaaggcaatataatgcactactcatagagttggatgaaaaaactgttagttcagtggatctgggcatcaccataggttttgttgtctgagacatttttgtaataatttgtacactagcatggggggggggggagacaaggtactttcataccagggagaaaagactcctatcaaagctgtcactgactgggacctaggaacaagcaacgactcacatagatgtgaaattattacctgatagctgagtctttagtattacttgaagtctgaagtagaagataagccctttccacatagcatggttacatctgcttaacaatgaacccttcttctgatataaaggagttggttaattcttttcagattgtaaaatgatttattttgtggtgtttaaaataatagatatccaaagaagacaatatggagtctgaagtaattttaaaaagtgggctgaggctccatggtagagtgcctgcctagcatgtgggagaccctgggttcaatctccagtaatgaaataagcgaagtagagagatctcgccactggaaggctaagacggctgacatgctaatgtgtaacatgtctttcccgtcccatttctactcataatggtttatgcaaagttttaaaaattcaaagattgcatagaaagattcaaattgcataaatttatatgtaatatcaagaaatatgcattctgggctagagagatggctcagcagttaagaccacttctgttcttgtagaagacctgggtttagttcccagcactgacatggtagaccacaactgtctataactccagtcccagggaattcagtactttcttctgtcccctgtgggcactgcacaatatggtgcactcattcacatgcgagaataataatatacaagttaaataaaaacaaatcatttttaaaatgatatattcacacataatttttcaaagataacattttcctgttttgagaggtttattcacatgttacttttactaaagtcctacattgtgctagaaatactcaatctactatttatttttatttttagaaaatttttccttgagcaccttatatttgctataagaataagattaccaccacttttttttagttattcaaataagctaatgatattctaatgacaggttttatatttaccaattttctcccctttcagaatgcctttttggatagcttaatgattttgtgattgaattttataattgacaatatatttttaaagatttgatttgtaagcttttaaatagttttttaaaaaaatatatagcaaaatagagttagtaaacactatatattactgttgtgtagtcatacaagaccaaggtaaaaagttttattgatcaagagcaacagtgacaacataagatgatgagaatctacatccacccctcgaatccatcgctgtggctgaacgccacactatcattccaccatagcatccaggctgtaaagccatttgagttcctctgctaaacaaccttaggttgagctattgaagttgccacataagcgagatgtataaaaatgactcagaagttcacagcaatattttgcttgtccgtttagcttagaaagctaatacaaaacgccgtgagctgccagtgttctcctaggagcatgattacatgggggccgatcattatggtaccaaggaagtccttttacatcttgagagcagtttaataatgttcttcagtagttagaagaaagcagtttagaaaatgatagacaaatttcttctcctcaggtagagctctagcattaagtccactccccctaatcttgggtaataaacatttgtttttaaaataatgaggaaagccaaggggatcagtgaagtgggaggggagtgagagcaggcagtgggtgaatgtggtcatacacatctacacgtatgtgcaacacgttgacagtcatctcggagagcagggagtacctttattactgaggaatctgtttctctatgaaccaaccttttcttacttgccccaatacttccctggatgtccacgatctgttctgagaaagcttagggctcccctttaaatggagaagtcttcaaatagtataccaggcaacaattgatcttttatggcaacgttcttgtagccactaacctttgctgggatgaaatggtaaatcctcagatacacatctacagcacacctaagaatccaagtggagaacttgatcaggagcagggaaggaggccaatgggaatgggctttgaacagagaagaacatattagaaaggtcttgggagtcacaaataactagaagggacaaggagactgaagcaaaaaaaccagacagacagtgtaaagagtattcagacttttcctcgtagagaacaaaatttagagaaaggcttggaaatgatgttctagagaacaacttgaaaggggtgttctagaaaagtcttggaagtgatattccagaaacacatcacaatactcatttgatttgaccttttttggttttgaggcgacatgttagtaagaagatgtggttacatgggttctactcatttgtatctcagggatttcacaagagacgagaattattacaagatcaacagcctcaaagaggcagagcatcaagttatcccaaacaatgtctccttggacagaaaagaggaaagtgagaacccatattcactggcttctttctgagtttacatcgtcctatctgacttcatctgaattgtgagaaactgtgtagaaagcacctgtcctttctgcgtcgatttgtgcagattgtctttgattcacatttcagacttcgtcaaattttaagtacaagacaataacactgtattcacacgtggatagtgcatggaaaatgtagaaatagaacagtggctgttctcattaggacagggttctctatttagggggaataagagaaccacttcccctatgaaatgtttgcatttcactctgttgctttaatgtgtaatgacagtatctgcaaagagcacacgttttctctggcgggttacatgatatccccaagactctctccccctcccccccagggaggaggctgccccttggactgtcagcactgtttgcggattttatttggatagtgaccggtgagcacaggccttgagaggcatcgttcatcttccgaaacttttctttctgccatgagaatggcctgtccaaacagaggctgatcctggatccaagatgaagacaacagatggagatgacctacggctcactcgtaaacatccttaccaggcatgtagcacaaccaggatgtcaaccgttactgcaacaaaacttcccaagtacatagttgccaaaagcttaagaagtattttcctaaacttaagctaaaatcaagccactcttgacttctgctgtctcctaaaatctaagtcttcctctagcattggatgcgtgctcataaaccttccgtagctcgttatttcaattttgaaaacttttgtatttccaatgtagtctgtactccaacctgtatgttcgtatgtcctactcagcctctatcaataattgggcaagttccttttctgtcatacaaactctgaaagaatttttttggccagtaaaatttaatggctacaaataacttacttctgggcttaaacagccattaaatctcagatttaccatagactcggctgaatcaacttggacaaattactcgtgctgtttcagctttgatttccttatcaacaaagtgggcatgttgagtgcccagttccccgggctgtaccactaactagtactgggcaggcagatgctcatagattatctgttgcatagtaaacgctcaaggttggctggtcttatgctcttgactccatctggaatgtttgaacttcttctgatccatcttggttttaactaaacttcaagtctgagttcaaagcccactttctctatattatcttcccatatatcaaaaaaaaaatcattatttctttttataagctaggcatttgttcttgcttctagtcttttagaaggtaaacagtaaaatgagcacattctatgtttttctataggctaataacgtcacagattttcatctaattggcagactgtattttccctcttgtggttattaattctgggagataaaattttgttttaaaaatgaccatgattttaacacaatattagttatagaccattctggaaatggttgcctgtcatctaatttaaccaatctaattgattggttggttggttgattgattggttgagtgtgtgtgtgtgctcgcacctgtgtgtgtatgggtttgtgtgtactgaatgtgtgcaggtacctgcaaaggctagaaggtgttgaatgccctggaactggagttataggaggttgtgagccacttgataatggtgttgggaaccaaacccagttactgtgcaagagcatttagtagtcttaacaaccaagccagttctgtggctcatggttttctctataaagcatcccaaacttgaatcatttagaagttaaagaagtgaggcccaggtactgggcttagttttcagcataaggcttgaatgatcacattattgctgactttaataaggagaaactcaaaagggaatatcattcctagttaaatgaagtgtgcattctgccaaggtcaagctgccttgtattatttgagactcactgctgactactttattaattgttttcagactggaaaatgaagttatagcctttccgggaaactctgggaatcaatttattttagtgaggatgggggcatgggagagcagcttgcaattctgtgcaactgtgaagagcaaggaattatgggaagtttgctgtataagtcatggtcaaagtaaaagtgcttgctttgggaattaaggcatatatgaattatgtgcaaaaaaataagaagggctctatatagttgttttattgtctatttaaatttgtatcattcactaaaaataaagaagcttcatatgacacaaagacatcaccagtcctcctgtaattattaaattgaaagtaatttcagaaagtactaccctgaacagagtattattaatttatctctggccttggaagcctcttggagctgggagctagttgaagctagattagatgaatgaattagaacaacatcatattggaaagcattagtaaaaatagacaaggcatatgtgcttggtattgctacagtaagcagtgggaaagaatgtcaaatatttttgttgaaacattataatattcaatgggcatatatttctaaacatgaatgaagaaggtaagtatagtggctaattttaaaaggtctgtgttaagtgtgaaggttgtaggaatacatatgtgaaagcaaataatagcaggaggtgctgttgttttagaagggcacgttgtgaaggcatgctcattagcttttgtgagagcaatacaccatacagtttatacattgctttatgttagccagtcctctagggagctggagtacaccactaagcgtattgatttacatgctaaccatacaagtagtgctttcctttctgagttatgtagagactagtgtttgtaaggacttcacattctgcccagcaatgattggcacttatgtttttaaattatttaaaataagagagtgccagtgtctatagatgaaaatctatgtatctttaaaaatagcagagtttgaaaggtagcaagtggtacatgtgcagaaatatctaccaagcacatataacacagtcagagtcaaacatcttgcccatcaaaacagacaaatggtatctacatcattctatattcatggacacaattctcatcttgaagactagcctatcagaatgtaagctgttatacttgggtgatgacgtaataaagtttctttaggtctatggcagatgttgaaaatgttcttttggtgcgtgagttttgaagtaacaaagttttgaactaaaaaagcattttgcttggtcactggtgggatatacaatgaacagaactggttccatattcctaatattgttctatgtaaacaaatagatgaaaatatgtgtaattgtagttattatgctagagaaaaacatgggctaaaatcagagaagaagtgttaacatatggaagtacagagtaaagagctctgctctaagatgaaacgctttatgaacttcatggtcttcatgggacctctgcttccactatttcagtaacactccctaaatttcaaaatttagttggctttgtacattagtttgtttctatcaatatgcacttcttctggtaaatgattatttttaaagttatgactcaatgactcaacacttacaaataaaatttggaggtaactagaggaacaatggatgaaccagaaacagaacctcactctctgtgtgtgtgtttgtgtgtacttaaagaatagacacatttactattgtagttttcatgtacgcatcaaattttcatggagaggatactgtagctatctccatctctctcaagactagaactaatgatcacatctgtaagatttcaatcagaatatgaaagtcgtcccagtgtttgttccttcaatccttaagttgtcaaatgtttatcgagtaccttccatatggtacaaactatataccactcttctggggaaaggaattgtaaacaaagccagacacaacttgtctacacaaagtcccaaagaagacagaatataatggaataacatcacaagtgaaataaaatcacacctttggaagattaaaaggagtatacaaactgtggttgaatagatctactcagggagattggcaagaatcgaccaaagcagcaaaatagaatactaggcaaagcctaacctttccatagatagagcggggcttgagggaggagtgaaaatcttttcatgatgggctagaactggtgctttgaaaaccagagggagacctttgtgctgaagtagagggcaaggagggcccttatgtgtggaacaacgtaaggcagggagggagcaaccagagacagcagggaccttacagttttacatcgctgtaaaagcaaaaacaagccaattcaaattttgttcatggcttttacactaatagatgcatttctcaaggcaaatgcctttcaaaaactggcaaaaacattattgtgatggaatattttaatagagtgtgcattttttttctttcctctgaagggaaggtagcatacctcttcttcagtcataaaataaataagaagaaaaataagatctctagctcctatcttgtttatcctaatcaggattagctttatcctaatcaacaatcttgtgttcaaccttaatgatatttcattagcttcccagagccacctttcctgtctaggtctaattatatctaatggaatgtatctcaactcactatattaaatcattttaaagacattttaaaatcactccagagctttgctttaggcctgagagaagactgggttctcttgcccctttttggaatccatggccttctgagttttctccttctcttgtccacccgactctcttcatagcaaatgtaagcagatgagaataaattcttttgtaacagttcataacatttacataaaacatctgctctttgttttattttcattatcttcattttttacaagcacgtgccagtggtgtaataagtcaatcgttcaatacatcttacatagggaatcttccagcctgttcagccctgctcacatcacccctaacagataagcgttagcttatttgattgattcttaccttggtggcatattttaatatcctaccgtccttcaaggaagtcaatattctaaaccttatgaaatttcagtaaatgtgactttaagatgtcctagaaattctacttgcaaggacagtagattctgggactctgttacgagtgtgcagaaacaaaaggtgcccatcaagagtatggagatggggctgtagaaacagaagcttgaagtcatgaggagccattggctgacagaattttcctgtgatggccttcggtgtcacattatcagaaacactgccactgggttgactactcagtgactcaccagattttatcaaggtgcacacatggtacgtgctgtttttaacataaaagaaagagataattgtctctactccttggaaagtccttgtcttctatgctgaaaaggtctagggaccaataaagaaaactattcccgtccccagtctgttctggccctgggtaatcatttatgcatttgattacatcaggactgaaacaaaagaaaaccaattgtgtacagggaagaagcgagatgtgcaataatatataatgaaaaagaaactcagaaaggtaggtaggattccaggtacagagaaagaggatacaccagtgcttttaagaggaagttggaggaactgtgctaattctcctgaactccagctttgggcttgggtataagagtaaagaagaatttcgagagccaactgcagaagggcacagtgtggactggttgactgcaataaggtccctatgttctactatgcaagaaacaacagagaacatcatttggagtttgagaaaaggggagcttattagagaacaaatgatcaaatttgtggatgttttcttccttaataaaattatgaattatagggtaagggttaaaattataaattttattgcaagcgctaacggacataaggtttctgtgcaagaagaatggggaatgtgctcgtcggagctcatactttcatctagagaaagaagaaaacaaataaaccaaaaccaaacagtgtccttacgctataagtgttttctttgaaaatgttcttagtaactggagattcaaagatggcaaatcagcaaataaatgaaggtatctttaagggaagaggctgttaacattatttttttccagaaatgcaatatcatttacttggaggaacagaaatgattaatatagtctttctgttcggggaagctatttcacaagataaaaggctagtaatctaataactagcatatcagtattattttatttgcttcttcctgtttgtaaaatagcttcagtgctatcttgttattgctgttatacttggctagttatacatctacgataagagaacataattaatgtgaaaaattattccgaaatgcctgtgtttattctgtgtcactttagcaatgccccttcaggagcgctcggctcattttccacttgcattcaataacaggcttgcagccagtggcattgtatttacacagtttttgtcaaaacaattttatctctaatagattttgatctacattgtctgaaaacttctgtttctgtttaaaactttaatgtaatttcttgcatctctatttcaggcaataggaaaacttttgaacttacacatacttggcagctgtacatattttttgtttctttcacaagtggattttttttttaagtagggagaaattcccttaaaaccaagcatttcatttttaagtggacttggttgggggcagggaaggggggcagtcagcaacgcatgtgaactctatcttagtcgctcaccacagtgggggcatttgaaaaacactccacttgctatggcctttagatggtcagaatagcttcaggtattagtgaatcctttgtaaatgttacatgaacctccaggaaacctattttgaatacacagagatatattttcattttgatgcacaaagatttacatgtgtatctctccattagcattactccaggtaaatcccattacctagtgcacatgctctgtgcagcttctataggaggtacagttagagtgcttcagtgctaagactgtgcctagggaataccgcatgataagaaagttggcaatacccttaaagtgttacatagtattagaatgttttcattaggatgaaaaaactttccatgaaaatataagagggcgaatcaatacttactggggcaactagaataaatctacacatttcagtataatgcttatcaaataagcataataaggaggattagtgccccagtttcttaaaaggtcctcttgccattgcattgtcttagtagacatcagaagtcttccagttctctaatggaggaattcactagaatgggagtcactcttctcttctgacttgttcatttagaagccaggacttagagctaggcaaacatcctgctattgaaacaacaacctcaccccaccagccccccacccacccacccccatacctctgattcttgttcttcctcttcctccccttatacatttcttcttcatcttattcatagattctttttatgccatacctttttgatttctgtttttattcctctcttcttcttttatgattcttaactatgctcccaatcattgagacaattaaagaaggtccatggattctccttatgtaacttatgtcatcgtggagaaatgtacacatgaaaaagagcaggccttcatttaagtggacatttgaattgtaagacacttggttggtagtctcaattctcagctcagagcaaagccctctgaaataagagttacaaacgcacacagttcttcatcattggctatcccttctttcttgggcttaagactcgggctggcggcagttaactgtctctttccccttcttttcatacgacatactcacctgagactgaaatgccgatgaatccgcaaggctcatgtgtgtacacacatatacagagcacagaagcctgacgtatggaaactgctctgcacatccctagggatgaaatggctgctggtttagaccatttcccacagatcatttggtgtcaaatggtctctttagctgggtgatcttttattagccccagtgacacaaagacatcaaaaggctctgtccacacatgcatccatctccagaaggatttaggggcaatctttaaaatttgaaaaagtattagggacgagaagtcgctactccaaaattgtctaacaatgtccagagaagtgactccttgaaggtcatctgtccccctcatcaagtgttttcaaggcaacatcagagaaatgagctgtcagtaatttctaatctggctaggttatatctggtgaccttggagcaaagaaactctcacatactgctggtttcttgagacatccgtttgatctccttgtgaatactgcccaggggggtttgtttctaggctgctcctgtgagctctgctgggctcggaagtacaaaggttttaaagtacttgaattttctcctagcttgctataaagtggaacaaagtctctggaacaggctttggctcgcctcagttctcttgattttggggatcaacattgaaaaagaaaatcccttagcctcctgcttttcccctgcttctgttcctgttactttcttttccttcttatcaactctcacatcctaaaacgcctgtgtttttttcacactaggaaattatgttttggccgtctctcaatccttcctggttcctttacctcacccagcgctctcaatagttctccacattctcacccaataaaaatcccttctgttgttgttgtgaggtctccttttggctgaaaagctatcaggacgctctggctcacaacagagtgtgtttatgtaaaccaagtcattcaaacccaaggctgacaagtcagacacacccagttatgggttgatttctgtaacccagctatgtcttgtgctatctgctcataacataggatgttgctaccacccagcaaattaaaaaaaaaaaagtactgagttacaaaagtcagatgatcttaaagcttagattctactcaatatttgactctacgcatagggaaattgcgttattaaatgaacaattatttggacagattatttacttctcaaagaaaggtatttcattctgtaaagagcacacttacaagagcaaggtggcactgaggaaattttctaccctgaatattttatttaaatgctatcaagcgatcagtaatgtttgcgcatttccttccccaccattgctgattgccaatatatttgtgggtaaacagacatctctctctctctcttctataactggcctcctctgactccacatgtttcttgatgacagtgtctatcataggtgacaggggagcttactcctgtgttgataaacttccctgacttaaacagacctgtgctggtttcagtgagtctgcggatggtaggagaggcagaggctgtttgtatgaaaatccttgggaacctgtcaggaagatcagggtgaggcaagaaggagtctgggaaaaataccacacaaggctgaataacactttttaatgggaaaaaaatgcttattttgactctaattttatgcttagatgcttttaatttgatccacgtttaatttgtcattccttggagaaggcattgattctctgaaaacctatctgctctgttgctaataagcaggattggcttcagagactgccatgacgacattgtattttaatggtgcccacctggaaacactggaccacatatctctggagtcatttctgtcacctctgggcccacttttctggttgtaattgcctaatagctttgttaaaaccacagttctgaagaaaagtgggcaaaggcttcacactgaccaaacaggtcaaaccagcaaggctggacattgagctctagcactgtcaagggtcagttaaaggtgtagtggcagttgtacatggagggcctctaataatacacaagatatatttatatgtttttagattcactaaaacccaaatactttggcactggaataaaaaatgatggtatttaacatgggtatgagaagtttcagggaggcagaaagattccgagtctaggctaactaactacacatagtagcagttaccttacttggctctctgaagctatgtatatgatctaccacaagcctgatacgagaaaacccatgtctcctatgttttaaaaattaggctgctgctatttctgaaattctaatggctgcactagcaacagtaaagatgtccaggtttcaatgaaatatatttcataaattagcttatcattgcactgatttagcatgcctagcaggtgagagacaaaaacatgtgttatcttccctagggaaccttcagtgaatgtcattctggcttcatatgtctttcttttcttcccttcttgaactgatataaaattctaatgtgtgccctctagttccatcttcattgaaatctagcaaaagcgctgaaggtaaggctgtggcaatggtgcatgagaggtggggagagggagggccacggtgattcatagcgcgccggaagaaagttgcattgctaacagcacacttttgtatgtagacaggttaaaatatgtcacatatcagtgttaaaaatgaagttattcatcttggctagttccttaaagttcataggaaaaagcaataaaactctattggtgacttggaaacatttccatctttatctgagggcatgccgtgacactagccttcaaaacaatcatcaaggaagtaagtgtatgtaattgcaatagaactattggtaattctgacaagtagctgttatttaaataccagaaacggtagatgtgacaaactgtttgcattgttatgaaaaggaaaggtgacattttcaagtaggatagtccacgctaaccatccttatctatgagtctttgttctatgcaaatttgaacctctgctataattatcattttgctaatggcctttatgaccattgagctcagtattttcacaaaggctccagccctttcttgtctgttcccatttgatagatgagaaaactaaggtatatcattgtatgtatgtctccttttcctggtttaaaaaaaaatgctgtttgtgtttttttttcccaaagaaaatatccagttcttttccacctcatttttagtaggaagactaagcaggtaagatctatttaatttatgaatgtgaatacactgttgctttcttcagacacaccagaagggggcatcagatcacattacagatcattgtgagccaccatgtggttgctgggaattgaattcaggacctctggaagagcagccagtgctcttaaccattgagccatctctctagcccccaactaagctgttttaagtagtatttccagcttttaaattcagcatcctgacacacaaccttcagccaggattttcttcccatgacaaaaacaggatacggctccatccatggttcataatagactttgaataaatttacagtattgagatgagactttcaaatgttaactaatgaatgttggctttacacgacagagatattaagaactcaaatatgtttagtaattgaaaatgagatgttgttatttgtggaccatcgggccaaggtaatactagtgtgcaaagttgtgtgaactatgccttggtttttaagcaagcacctctttaaaaaccaacccttcctgaaactcattcaaacataggttgtcagtgtcattatacccatcaacatgacaagaaaaagtatgtgtatgtaccctacaagacacttaagccctaaaaagacaaattatgatctactgaattgtacctagtaagagtttttgtagagtctttagattagccgttccccccttttccatttacagtaatacaaatgtctgctgcagggtactgaggctgcagtagtcacaatggagagagttcaacgtcttctatttctgtgacttcattaagcccacactattatgtgccagattttgctaaagggagactcagtaagtattacctttaaaatagacattttagaacagttatattgaagtctaggtggtttgagttttaaaatgagagcaaaaagtctcacaagtaagactggatttccgttgcttgcttctgaggttggactgttcttttatgtggaagttagtaacccagaactacttaaaaaatatagggatagtgatcattctcagaatagccgtttttggtgagacgcttggaagagcatgccttctgtgggggaacatacgccggagcatggcatcttctttccagtctacctcccttccctctctctccttatcaggtctggagtttccagttgctggaatgggctttgacaaacctggtggtacaaactgtatcttgacctatccgaatcagtgctgtaaaaagcatccaggcacgttgaggacagtttcgagctaaactttagtataaacactatgtagctccacacattcagaagagcattcccggcgtttgataaaatgaatgaatcactaatggcttaaaagccagaaacatagacttaaaagtcatgagcggattcggcctaatgttcaaaagtgggaatctgagtcagctcagcaattctgcttttccattcatgaggtggcaccgtccctgagaaagcaaataactaaaaagtttcttttaccaaaagaaaagggggggcatcgaatttttaaaatataagtttgaagttagtcttccacagatagccaatttaattatgctaaaaatgacatttttaattaaacaccaaggtaagcataaatggatttcaaaataattaatcaaacatcaaaaaattgaaacctttttctgcttgagcagcagaaatgaaagaggcagtcttcgggtctcacagagattcaatctaatttaattctccgtcttctctaaataaacattcctaaaacctttttttcatctgggggaataaggatgagaggggtaatcaatatttctagcattttaattaaaaccgttagtggaataaatccatttaattatcagttaatgaaatacaaggtcatttacctgacaggaactttgagggtggattaccagttggaataaagccggggagcccggtgtcacagccatttaacttctgtcaaatttaaggttaaaatccttttagactctttaacctattctgcagcatctttctatgatgtatgccaactggccagaggaatgcacgctgaaacttattttacatttaactctgttgctaagtttacagtgaatttctagaattttctttatgtttctaaggcattaactgaaagatcgcaatatattctggtatgtttttgtgttcattttgtagtcatcatttataagtctatagatatgcttcctcactatgaatcattattttgttatttttataaatatgaatcaatatgctgtaagttttatcatgctaacatagaaaaactatgtgaaaataagtaaatcactttaaataagttatggttattatatgtagctctcttcttgaggtgacccaaattttattagaatcatataaagaattcaaagctttccatcccaagttagttttaaattgggttttaccaatgaagagctatcactaaagtgtgttgccaagctcctatgaactgttcaccgtttctgtggctcattattgaaactagatccttacaaggactcttgtttcttcttaacatggacattcaattaatcatctatagattgcaggtttattacagttttgtagattgaatttgtctcgaagctagaaagtttagagattaaaagcaggcagcctacttgagccctcattctcccgtaaacagtactaactgtgttaaggtcacatgcagtgcgaacgtgtgcatccagggttcttcgtgcttcatcgactgcaggagtactaacgcatcctgagatagcgtttaaggacataaactcaccgtgatttccaaatgctagacacaattcgtttacaaaaccttatgttggctttaaaataaaagtgaatcaattatcagctgaaatgtgttttaattgaagcaggtttctctacgaaaatggagtaagatttcacccctcttaacccagactatgaataggtttctaatactttgaaaaaaataaatcaaaacttaataggaaaactggactagatagcatcaagaatgttctttttatgttttcataagtgtaatcccgtgactcttgaaaggaggttaataaaattagctttaagttatgagacatataaaggaagaaaattatcgatgatacgtagatttcacttgagctacagaggcgactcgagttggccttggtacttggcgaggtactgatttctcatgggaatttgtccaatagccctctttgccttttaccatttattttaataggtccaaccatgggtgtctagtggcctgcacttaggtgctattgagtgtctgccttatccatctctccaaccctaaccactcttcttctaacacagggctgccatgcttaatgcacgtgtcacaagactatgggcttcacacttctgaatgttttggaatggcattgtcatcgcagtaattgaggggtcttcttgttgcagatagtatatacgccataccacaaggacccgctttaggtcctttgtacggctgcaccagagtacctgagacactatttgtagataacagttatttacttctcatagaggtcgagacacttaagataaggcaccagcaggattgctccttaatgagggcacattctccacattcaaaccagccccttgttgctgtgccctctggagcagggacactcttcttacttgtggaaggggtgggagaatgggtgccctccctcaaccgtgagtcctcctgggagggtgctgagcctttattacttaaaggccaaggttcttttgcactggggattaagtttcaatacagatggggtgggacaccatcattcaaactacactgaaatcatttgtatcactctggactgtagaagccatgtttcctatatgcagcacatcattataattttcttttggttccttcactttacagattttttttttttattgagggccttttttccccgtctccctttggtactgagtctggatcgtctgctctgtttacacacacacacacacacacacacacacacacacacacacacacacacatattcctttagaagtctatatcttcagtgcagtctccagtgactctgcatattagcttgccaggtttttatactactgatatctaagtttacttgttggatgtgtaataatataataactacgtttacatttcttgctccccacttttcgcatccctgtcttgcctgtgtgtgccacggtggtcctcagaaatagacatctaagtgattctcgctcttctctccccaataggaacaggtgtcccccaaatgctgctagccctccctggagaggatccttcggaaaaacatggactcatgctttcatgtttcctcactcaggccttttctgcttctcccctgcctctaccctggttttcattccttctctcagaaacccacaatatcaaggagctgggttattctgtgaagcattcatttgtctgctggtctttataaaaagcacacaatattccttaagaggaaagtcctcacattctatttactactattgtatcagaccagatccattcccattaagacattccttaaagacagtggcaagcttgtcaccaaatgaaattgtttccactgcagaaaactgctctcctcctaaagcgcgctcagcccaggcctctgagcttttttgcctttcttttcttttcttttcttttcttttcttttcttttcttttcttttcttttcttttcttttcttttcttctcttttcttttcttttcttttctttagtgtatttcctaaattatttatttatttttaattttatgtgcattggtattgcttgcacatatgtctggaggtattggagcctctagaactagagttacagacagtagtgagctaccatagttacagaaattagtgaactaccatgtgggaactggaagagcaaagggtgctcttaactgctgagccatctctccagacccctatcttcttttcctattcttcacattactcgttctgaatgcctgtctctaaaacttggtaatccaacactaattttctctcatgtagctttgtgtatcattcattaaaacctgaaagggtttttttgccttgttaattggtccactgtaggtctcaatgtcaagtattcaaccattgtcagttttgttactatgtttgattatttttttcatgtttgtttgtttgtttgtttgtttttggtttttcaagacagggtttctctgtgtagccgtggctgtcctggaactcaccttgtagaccaggctggccttgaactcagaaatcctcctgcctctgcctcccaagtgctgggattaaaggcgtgtgccaccacgcccagccccctcctgtttcttttattgaccagtaagtaagggttgtgtgccaatttcctcatctattatctataaagataatgctctttatcttgaagaacacagtgaagttgaccgaagtgtcgggtttgttatctgttcttttgctttgaatggcatgtatgttagcaaacatagaggaaacaaaatattgcctcattattatttatggtcatgaattaatatagtcaatcaatgcaaaaacatactaattgaattttatcatttacatttatgtatgagtggaaattttaggtctctttcctttaaaactggtgcagactcaaagtagcaaatcagagaccatttgggctcttctgccatgtgcatacgtctaattggaaaccattgtaccttaaactcctactaattgctcaaacttaaagtcattatttcagttctttattaaaaatgagcctttgccctataaaatgcccataatttttagcagctatatatctgctgtgtaatttcctctctcaaaaaatgtcatgctcaatttaatattggtatgtcatttgtaactggctgggggagcttttggaagctattacattctctagtttcacaagagctggactctgaagcctgcatgcctgacatccttggtctgtttgcctgacactgtcccacagtgtatttctctcgccccatgggctgcctgagaggatgttctgttgtggaataagatgacatggattaaaaagaggagctgttcttctctgtgagaaagggaattgagagcccaaccacaaatacaacagacacgttaaatacaacaaaatgcacatgtctgtgtgctaggaagatattccacaaatggttcttataaagacactttacacataattgtaaactttatgtaccagctatttaaaaacaggatataaagaatacaatagactactcagaaagatttaaattcaaaatgatatgtatgagatttgcaacctctgtacaatgaaacacataatgaggacgtcttattttaatatccttttaaaatttcatgtatttatataatgtattttgttgatatctacccaccactacctcctttaacctcccttactgcctctcaccctgtctaccttccatcttcatctcctcctttcttttgtgtccaaacgtgttgtgcatatgcacatgggcatggggccatccactagaggaagggcagcctactagtgaccatgtcttcaaaggagagtgacccttcagacagccatcaaactgaagaacatatcagtgggtaaaattattaaagtcaacatactgactaccaagaaaagactgaaacttcagcagattcataacaattgatataaaagagatgtttatatcatcaaaatgagttgggctaagatacaaagactccatatacatattcatgaacactattattgtctttttgccttggttaccctgtgatctaaaagtgcctgccttgttttggactagacgatagttaaagagtactgtggggcaaacactatagcatattcaaatagcttattatgtaataggacatgttatgtgtcaattaaacctttataatgccaaatatcaagttgtcaagtaactatggcatatgaagtgggggcataaataattgggtagatgccctgaccttaaggagctcacgattatttagggtgctacaatttacatatccaaatggtatctctaccagtggaaggtggtcagtgatacacaatcagaaatgcagacagaagagcaggaactgggggcttttggcctcatccaagtaagagaacacctcagtgaaggcatttcacattgaagtcttgcttatgaagccttcatggcaggaaattctcatatctgggagcaagaaggcatgggtaaattgatgggagaagaaattacttgagaagtaatagaagataagatttcaagggaaggctagaatgtagcccattggtagagtgcttgcttagtacacaaaataaattaaaaagtaggaaaataaataaggaataaatgaaataagaggggaaaaaaagaacaaaaaaatgacattggggtcaacctgggggagccatttttatccagcctacgtttattatctaggtaggtgaaagggactttactctgtgtcatttatgaaggataaaggtgctggcctgtggtagctgtggcaaagcgaggagtgttaggcaaaggagaccagcccaaccctccttggagtcctgggaacaagcagttgcaagttagcaacaacttgacagagcagatgagcccgtatggctcagtgtactttccagcctcactctcctgttccccttccgatgtgacacagtgaacccagtctctgatattttctgtttggatttgactgtttgctcagaacacttgggacttgtttatttcattgtgtagccacccaaatgtcgttgtcttaaatattccttgtatacagaagagaattcgcagggacatagttatcttaattttgtgtgatattctctctctctctccctgaagacctcccacacaatagacaagctcttgtctgccagagttgtatttcagcatcctgaacagtttgcttcgtgagtaagctggatatcactgattgtcctgaaatgtgtgctttaaagggctgctacgtatttatttatttatttatttatttatttatttatttatttatttattttgctataacgttagcataacttgaaacaaagggatactaatattaaatggacacaatttaaaattcagcaatccaagtgaccatagtaaggaaattacacgagagttgattttgtattattaagagctatgtgcttagtgattatttattgtctggaacatgatgtaagtaaggtgacagtaaatgaccattttgaaacatacagcactagttgtttttaaaaaataaaatctctgctagtttggagcttctattgttaaataccatccccaactggagctcggtcttgtctctgggaagagtcagaaaagctgaaaaagtggatggtcctgctatgttatgaagcagagccattcgtccattacataaaaagaagatgatggtctatctttcgtgtcagtgtacggagcctcccaaaacatcattaaaagattaggatgctattcatgtttaaaatatgggaacctttggctctatattttctaagaacatcacttttcatactgatggtttctactcctgtgtctcatcctgtttaatattttaaatttggtgtgttctctgaaaggaattgctattttgtgatttacaaccttggagaaaaataacatactagtcataactttgcagttttttgtgatgcatgaagatcagattttttaatgttggttaatgctttgctaattaaagtgtgcatgttaattaaagcagaggctaatgttaattacctatattaatggaatctcatgtagcacctgcctgaagcaatgggttcaattttcaaaatatctcaattaaggctagaacttttgatttgcatctagtagggtttcaattaactgcactgaaaacttcaaaaacactcttaggggtgcaaaacagcagtgatgatatgaagtacagtggagtttgttaagttcatttacaaagacttttttcattagtctttttttttattatgtattttcctcaagtacatttccaatgctatcccaaaagtcccccacacccccccactcccctacccacccctccccacattttggccctggcgttcccctgtactggggcatataaagtttgcctgtccaatgggcatttctttccagtgatggccgactaggccatcttttgatacatatgcagctagagtcaagagctctggggtactagttagttagtcttaactcagtttcttctttactggcggagattgtattcacttaacaaaagtcagagaaaacagccagatgtatattgttgcccataattctatccaagggaggctgaggcaggaggatggtggattcaaaaccagtctgggtttcacagcaatacattgtctaaaacaaaactaaatctcagtacaaacatcagctcctgaggatctcactaatgttaccatctgagtacacctgtccttacccttgcgccattccaccctggatgacagtcttcatccatatctgttgctaatgaatgtcttattccttttatttaaccatatataaccactataaatttaattatatataagcatgttttatggcttataaaaccacattattctgtgtttgtaaaaaaaacacaaaaaacaaaaacaaacaaaacaaaaaacaaacccaaaatacatttgttggctaaaatggaagtgagtgagctactgtcacctagttatttcactgttgctacacacacagccatggcttctcttctttttctgtggcagctttacataaagtatcaagttactgtctagcatctcagtacaatgtcaaacaaaaggctgattttttgttagtaagttaaatatggctggcaatggagaagagggtatgtcaggataagtcattgttataacaccagtgaatgtgtattttatcctggtgtcaactgtattaacatttttttttcattctaaactttaacttgaatgttctacaagcaaacctggctcatgaccacaatcacagtagaatgcttgcattgtttttgaaaataatatatgagataatcatatgatagggaccagatcttaaaataattaattaaaatgtaaacagataactgaagataggtacattgtgattagtatgcatattgttagctctcctgtacccactgctctatttgctaaagtcccaataacaaccattcccggtgggtctttggaagggattatgagctaacagtgataacctttctgacatctagtataatcatggtttcagaaaaatagtttccattactgtgaataattgaaagagaagtaatcgtctcaataggtatatacaaatagattacaaactgatttatggtccctggaaatcagcatcattaactattattgtgccttagcagacattgattctgataactgactgttgatctcagagggccaagatttgtctccattcagccgtagagaatatcaaacaagcctaagattgccatgtgtaagggatgactatcaaggtgacacaaaaggcacatagctgttgctgctgtgctattggcatggtgataacaaaatatttaaggtaacagcaaatagtattggctaggcaaaaagatgctcgctaatgccctgatggcagaaagtgtggctgtcgagaaggatgttatgtgtttactaatgaagaacattgtagggatagacgaggcagtgaacactctcatccttcatctcactactgactagttagctaactggtctgttacaagatggaatcaaggcaataactagttgggtaatgtgatgaatatgaatatcagactttcctaggatgaggcagcgggccaggtcttcactactagaagaacaaagtcaccaaagcatccagtccctgttgtatcgccattaaggtggcagatggcaaagcattagcaggaagatattgagaagagctgaaaaacatctggtgggaagagacaacctaatgggtatccttggctgtgccaaattgaaaggcaattactgggaatcctggaaagaaacttctatgtgtaggtaatgggaagaaggttggctagaacaatcaattctagtttagggatttctaaattctggaaagaagtgactttagaaccctatgaatagattacagaacattaacttgctttctattttgcttctatcttgatttgcaatcttcttgtgttgcttcaaacctgatatttgaaacagggtctcccattgaacttggagctcactgattgtctaggctgactggccaatgaggcccaggagtgtacctgtgcaatggtgttgtacatggatgctgggaatctgaactcaggatctcacacttgtcgctctctgttcataactcgggattcaccctcctttgtcaagaggatcacctactttccaacgacctctctgtctgtcaggctcaatccaaagagaataatgtctcgattttggaactagtgattcctaacatagcaagaagcagtaaggggaaaattccccaacagactgataggtagaatttgggagaccaagtacactgacgcacatattattcaactaaaagagtcccttatagatgggcaagaaatcatcctcctgtggggtctgtaaaggactgtgcaaacttagacatgccatgaagatgaagataaatctgaacaggcactaggtgggtattgtgttacaaaacttcctgaggagtccaacttggtgagccatgagttctgttggggttacttataggaatatgggcaaagggtcatttacaggagcagaaatgactcaaagacagttgcatcaccaaggccctccacaacctgggtgacatctcacaaaggctgggaacagttagagattgtctttcccaagtgactcagtaggtctaaacctcttccaggaagctcagctagttcttgttcctgcaaggccttgttggtctcaggaacttcctaaagctagctagtttttttgacttgtttaccttgcaatcttggaggaaactgttacacagcagggagttgcttattttccaggcactctcctcatctgcttgttattgagaagacagattgtcaagtctttcaataaatgttaggccccatctcccttcattcaactccctttttaaccattgagccaaaagtaatctattaaataccttttataactttttgtttgcatttgtatttttcttccagactcaacaaacaaataaaaagaaaacaagcaaataaacaaataaacaaacaaaaaccaagtttactttaagcagggtctgatcagtttctaacatctagagcccagatatcctctttagagaaagcagggttattttgagcagaaagcaagttatttttgaggaagtggcagggaacatgagtgaagagctagaggttggaaaaggtggggtgagtatgcagtgttcagtgaggacagcacatgtataagagtcatgtctgagaaatggtagaaaataggcagaaaagaggttagagaaaagctaccagaaggaacagagagaagtcaaaagctctgcatgtgttccaagttgagcccccaatttttaaggagtttctacagctcctgctccactgaatcctacataccaaaatatcatgattataataaatcatgctactgattgggaaaaccaattagatgagcaagaaaatgatgccctgacagtgaggcctcattgctttctgtctctggactctgagagactggatgactgtctggtggagtggtgagctgcgagaagacaaagtaatcagagtgtacacagggagtttcatttctgaacaaaggagcaaaaacatttggacgaatctaacattcgtaggatacagggcactgggcctttcagaaagtggatgaaatacacaccttctgtagtagactaggtatcatcttcaagctgccagatgttttcttcactgacagtactagtgagggactagctagggaattgaaatcacggtttcaggactactgcctagaaatgatacccacgctgaagtggagttccaaaaatgaagcctgggacttagagtcagaagcaatgtgactctgatatctgatatattggtgctcagcataggttattgtgattgataaggaagatgttatgcatggaacctgaaaccacaaaaataatgtaatctattacccaaagtagctaactctattagcaagtgattttcgattaagctaaatgttactctccatcatttcagcattaatccagatgcccaatgaatatgccctgttctaggtgatagatagtaagctcaggattagacaaccaattaatttgtaatttgcatactgtgtcaaataatagggtaaagtcaataattatttcataggataatatattatttgaggtaggactataaaatatgaatgtctaattatgtaagatataaaaattatgtttctccctaaatgttctatgaaatgacagagagtgcatctccatcctgacggtggagttatgcctgaagtcaagatgtacattgtgttttctagagtatcattctcttaggtctggctctaaaggtacaaaacagcagtttaggtaaaataaacataagatagcagtgtatttaatgccattgtgaaaggaactatcttctcatagctgcctttgattctgactggtctttttgtttctgtctcaatattcagttcaaactaaggtcccaccagtctttaccaattggaagaagccaggtgaatttttgtgtggggagtttcatgcgctagattcatcctctaaatatctcataatttttttcttctactcctatttcttcccccagcctttgtttcttatatactgaaattttgttcaagaatctttcttggattgagatatgtatggttctggtggtatctggtcatgccagaatttctactatttgcggtgtcaaaggcagtggtagtggggaccttcgtccagttaagatttcccctctaacatgcagatactcactggagcatgtgcatcctgtggggattcaattccctgttgatgtatccattggtcatgtgtgctacaatcaattatttctttggaagttgcaaaaatggtggtctactaattgtaatgtttcttgtgcatttttagctggctaaaaatctctataaagtttgcttgtaccaactctgagaaggtacagattctctcataatgtgcaattatcctttgcttcccagtattcggaatgtgttaatgtaatcacaccttcttcaatggcattattttctcattttctggtttgaatttagttatatacaaattgttcagtatgtagccatcacttgaagagattccatttggagcatatatttaccacttttgccaaaaggactcctcatgatacagctgtgtccttttgtgttttagtcaatctctgctcctttgttctctgtacaagatgatattccaggcttatatatttttgtcttctataaacttttacattaattactacactagtattttcaactcttcttgggtggaagcaagttataccaaccctctcagcctcctccactcagtcagtcagtccttattgagtgtcttcttgtatcagaatcccatggttgatatcaaagcaaatttggttcacatctcttgggcatacttaaaatctaatcatatagaggagttacgaacatgaacatggtagaaagagagatccttatacaaggggggggggaattttacatccagggatttcaggtgagagaagaaattctgtgtcctagaggaatggggggaaagaggaactgcagaaatggagcatggctgagaagcagagatgcaaaagccttattcgtgaccaggcacaagttagtctgatgagaagatagggagatttttccatttctcagcaaggaactcatagaggatacatgggaatgtgcatcagagtccagtcatatgaggtatagaaacctgatgacaaagcatttagctttattgtgtagcaaatgataaccagtgagactctgttctttgtttcttggtttttaagtcagaacagataaatgactgaccaatcacatgactatggaaagactcttataaagttctttttctcttggggaccatcaaaggggacatttaatcatgtagtggatgggttagatgctgaatgctgagtaacctagcagtagttggcatggtgactcaagcaccaggatactaagtagtcctgtgatttgtgtctcacacaccaacagatcataagacacgttcagtgccacttcataatcagggttgcatcaactgtccccagccatgagaaattccactgcatcccagataactgtttcccaagcatgaagctcagttctccctgggctgcaagtcaaattctaacgtgtttatcttgatgctttggagtaccatttgtacacgaggtttaagctatataaggtacaacagaaaaacaaagacctaaaaaaccaagatgctcatgaagatacaaagactataaaatcacacagtaataacatacgatgtgttccttgtgaagttacttgctgggttgttgaatacaccaattggaactttggttatctagtttctcatcttaattgtggtggtttgattgagaatggccccctaaggttcatatgtttgaatgcctggtgcccagttggtgggcccatttggaaaggactaggaggtatggtcttgttagagaagttgtgccactaggagtgagttttgagctttccaaggcccacaccattcccatttagctctctctctctctatgtctcatgtctttggatcagggtataagctctcaactactgcctactgccatcatacttcccaccatgatgaaaactgaaactgtaagcaggcccccagtaaactgtttctcttatgagctgcctccattaccatggtgtttcagagcaaaagaagagtaactaagatatgcgtgcatatacaaacatatatatgataaaacaaactattaggatctaaacagtaaatgttctctcctaggtgtagaagagaatacaggctattaaatatgaaactggaatattaaaataattttaaaggtactctctgtgaagaaaagcaatctcagtgatactttttagattttcaaaatcatttgtagtacagattctatataggattgtgacatatcatatttaaaaagttggcattttaataggtaaattgttctatctcttccccttgaaaactggtggtcaaactgggtatgttgtagagtctgaaagtgatccgctaggctgaccagtttgtcggcatttgctcttccctttggctccattaggacttggagttctcctgtcctatttgtggtgatcaagcattattctctattatgactgcgagaattctattttctaccattgtttaaaatggggtaacatttcttcatgtcagagtttattgaaccttttatcttatttcatagagacctgctaaaattaaataacactttaaattaaaatctgtaacataggggtttactaatgtccaagggttttcatgtttgcaaatttcagagaatcccaatacattttttaaaatgcaaagaattttaggtgattgtggtcaaaatggccttttctttttttttttaagatttatttatttttattatatgtgagtatactgtagctgtcttcagacactccagaagagggtgtcagatctcattacagatggttgtgagccaccatgtggttgctgggaattgaactcaggacctttggaagagcagtcagtgcccttaaccactgagccaatctctccagtcccaggccttttctttttaatgctacaattcacatctcagattggtgttagttagactgacagcctcagatattgttggaaccagccacgaatctacttcctgaaagtacacagcttcttctagcatgactattactaagatatctcacgaatttccataaacaacccactcactcattcagcacacaattttctgggcactggagatgcaattgtgaataagaaacatgtacaatcatgtacagaattctcaaaaaaatttttttattttaaaaaatggagggggggcatagcccctgccattgtgaaatttacccgtctagtgggatataaattaaaaatgcatattctaaaaaaaaccatcaaattatcaagataaaataaaaatgagtccaaaccagtcataaatattagggaaatcaaggatggagtggtagagagaagaaagaaagggaaggaaaataattggggaggaaatgccatttaaacagattttgaagacaaatagccaggtgaaaaggaaaggcagaaaattccaggcagagggaagtacatgtctacagcacaaaggaaacagggtaattcagggagtgaaactgaaggaagatgtgtccagagaccagatggccaagcggtttagcaggctggagtgactccaaacgcagtcgggccctgaagactctggagaggcgtgtctacagcttgctggttgccaatataagaagtaagatgtcaaccaaaccatctaagagaaatgctcattccggccaagatagatttagagcatagcacctaattcctgttgttagctcgtctgctcacaatgcctgtaaactaaggcagaaaaaaaaattgaggacatagttttgtttaacctgtcccctacttactgtgtccaatagataagaatagagatatcaaggaagagaaaaaaagaaatgcttgtttctttttggttagtctattatggaggtgataactcagagacctagtgagaattttcaggaaaatctaagcagcatgtcccgctctacaaaatgtaagccgtcctaatggtcaacctgtgctttcatagaccacacacacacacacacacacacacacacacacacacacactcacacacactcacacacacactcacacacacactcacacacactcacatacacacacactcacacacactcacacacacactcacacacactcacacacacacatacacaaagacatacacacactcacacacacacacatacacagacacacacacacactcatacacacacacacactcacatacacacacacacacacacacacacacacacacacacacatacactcacacacacacataagagaattactactgtagaagtgtgaggggagcggggtagacaactattgtgctggggttttgttttattttgtatttttgttttggggggattttttaggttttactttaaagcatcttgctaactgccctttgctctatgacatttgcttgctggctgcccctggatcctcaatgcttcatttatgtcctgcaccctgtttcctcctgctgggggtctcctttcctgctgacattcaggagcctgtttctgaagagctgtgatcattctgggaaatcttggcttttcacagtctcttcctgtctgagaccctgacctccaaggagctgtaccccaatatgttgtaggtgtacaagaatgaacccccaagacttgggtgtacttccctaggctttctcacaccttttgtgcaagtagatttttcttgtgatatttttaagatttcaatttcttatttatttgtagggtggagcttgtgtatagagatcagttctcttctaccatgtgtgtctggggactgtcctcagcttgtcagaattagtgcctttacctactgggctgccttggtgaccctgcaaatagattcctacccatactttttaagaaatgttcttgtgggctagtgtgttttatcattaactgaagaaagttaaaaatatatgaaactggagagactccatgctaatatgctaatgcctatgcctttgtaccatgagtcagcatataagatgaccccccctccctccgtgaaatagctaacaagaattaggataggggagtaaacagggtagtggggactttccatgtctaggccattacatatggctttgtgaatttctacaataattttatctagcatgtagcaattcactcagtaagcattctctgcttccattagaatctcccaattaaatataagtacatgtctttgggtaattatgattaatagtcaatataataaagagcaatggtattttctaaaaaaattgatatttcctacaaaatatagctttaaataaaatatctactgtgagtttaaaaggagcttttcatttgtccctttttcttcatctccatatatttctcattaatcagcagctctatcataacataatttctagataagatgcattttctccttttaaatactttgatattgtcatctgtttttatggcatgttactgcatgtctccagaggcacgaagcatttttattttcaagtaaatttatattagttacagtatccagctggtttagatataggatcatttcctgttggtactgtttccaggacaattccttttttttttctcctcacaaaaatgaaaaatgtaatttaacaaagatatcctataattgccttcatatctagcaaggtatctagcaaactgaataccttattttatttaaaacatctgtctatataatgtctagcaattgtctaaagctacaccatccatgggaaacacagctgctgctattttttatttaatttatagggaagcaacaaaaatgtctccttaatactgtatcctccgctgttttattacatgcaagctattttcataaatgagaataacttaccttttgggtgcttacaattaatttagtctctttcaaatcaggaaagactattagccactgttttagtgtcaggatggaaacattctacatataacattacacatgtgtgtgggtgtgtactataaatattatatgtgtgcatatctaacaatacatcataataagagggcaccatgctgttccatttgtgtaactagtcttgtactcaaggcacatcttaattgcgaggcttcttgatgttatttgtatgttttcacgtataagggaagtgtaaagtcttttactgtgaagcctttctactgattatagcaatcaattgatgttttgttacttgctctcttgcatagagaaaggtgaagctctacaaaagctctttgtcatagggagggtgctgagtgttatgtaggagaaaacccatttgtaaattttatttattgtatatgacccttgaagcctaaaattaagcgcttaacttttactagattatatcaatttcgacttagccgactgtaataacaacagacacctagacttatgatatgtgcataaagagaaagcttaccttttccagggaaataatcaaaagattcccttttggaacaccaggcgtatgaaagggaaatggttacggtcccctagtgacacactgtgatgattgacaggaaaaaccaacatgcctgccacctgagacatcttgttcaggaactttctggagggtagtaaattggtgttggcacaaacacaaaaaaataaaatgacttgattcagcacttttcaattctaaatccccaaacactaaagaaagaagtaaatattcatcaaatgatcaaaatttatattgatttttattctacattagcagctcaaagtcgagactcttgacagggtggatgtcggcttgaatgattctctttgaaatgaggatatagactctgagctgagtgttaccatgcattcctgaactatagaccctgattatgggaaccctaggaggctgagatttcagaagaaagcataaagacactcttgtttggttctgttttgataactaaattgttattattagtatgtaaagtaattcttattgctcctgcctctccaccccacacctcctgtctccatttaaagacaactattctatggaaattcaatgggactgaagtactggtagtggccatggacttagtagtagcatttgccagcatagaggtaccaaggaaggagcttctagccctgcaggctgagggagtcctgactggatcttcacaatgtacaatttaaatttttagtttctggtggagaataaagagttttctgtaggttggtgtggaaggcaaggattaggctcctgcagctgagcataaacacagacttggtgcctctgtcacagtgcagagatctgctaagggaacagtaatggagaaacatcgaaaattctaatcatcccctccagtccacaccttgtaatcacacttcccccaccgtaactcatgacataaaatgctgaatttttaatgagtttaaccgcttgcattacaaagaggaaagcatgaacagtggatgaagggcccacggacacaattgtgtgtcacattggtttttgtctgtgaggtgtaggtggtttttgttgggattaataaacatttaatatgtcattaaaacagagggggaaaagatatttttctttatacataaatgcaaaagaaataatgaaaatagtgttaatgttaatttccccactttgtttgaatgttaccatttaacaagtctccttaaaagtacagctttaaaattaaattttctaaatattatactgaactttttaatgatttgtaatcaagtcaataagaatagaaataaacacctaaagatctaaaatattgttcctctgtcttttacataaagatacaaggactatcactaactctccctaatgctaggttttctggagtgacaatataaactgttgtatacttaaaggtagatcagtatatgcaatgatatttactgaaaaatactatttgaagagttgaacattttaaacttttacttgatatttttcacatttcctttgtactcttgtgtatatgtgtgccatgctcaaataacagcttttaagattttattctcattatgtggctccttaggactgaactccaggcatcaaacttgggaagttccattacccattgagccaactctctggtcctcttgttcatgtgtgtgtgtgtgtgtgtgtgtgtgtgtgtgtgtgtgtgtgtgtgtgtgtgtatgtgtgtgaagtttcaattatttttttatccaatgataaaaagaacatgctgacacatttttaaaggattttattagtctgatccttgaatgaatatttgagtgtttcttatgaaccataatttttctagttagattatatactccctgagggtacacacagtgtcaaacatacatttgtattttgtagaatgccttatatataaaagacattcaagatacatttgttgaaggaatttgttgaaggccaccaatcaccattgttccaaagagatgtctaatcctatgatcctcctcttactcggtgaaggaagctttggtatcttactcaggcctgtgtattgtctggcaggcgacgtaggttctcctgaattataacagcagtgtgctatttctgtgcagccagaatgtacctgatcataggtatgcagatgaatgtccagacggagcccttttctgtgctcagaatgtactttgaattcccaaagttaattatgtaagaaatcttgaaccactaaccatgtgaataaaaacaaaaagaaaaaataggggggacccccaatatatatgattaaaaagaaagaagaaatctgactcttaaaacgatgatgggaaactcggccacaggacatacacaggaagaactggatggcagacaagtcttcaacaaagagcagaggaggggagagagcattgagctgctccgccattgagagcagaagtcctgagcaaagtcctgagaacacgctccttactggagtagacgtggaggcttaggaggactaatgctcaacctgggtactcaagacaaaggaaaagaaaatggaggcagcagagatagataataaatgtaattgtggttccctgtagtgaaggaagacaaaatggggctagagccagaagaccgatcagtgttgacaccatcctggcacctgagagaaacccaatactggggagatggatgggctagtgtaaagagcacagagggtagagaacatagtgcaggagaaaaggtgcttttcatgatcaactctttggtcagttaagagaattctagcatgtaagtggaggaattgacttcagatagaaacagggagagcccagaaatgggggtgcggtggggggtggctcagagaacgcagatctagctgagaggtggatctgaatttggtgggaatgtggttaacaaagtccagtatggtatgaagtgagaagaaaataaacttttggggaagttactagttgctaaagatcttctatctaggttaagcataagaattaagagagacccttagaagaaagcagacatgcccaaaaggcatgtaaggcatgggtgtacatctgcatgtaaggcatgggtttctttaactgagggtcagggtgtcttttacagtagtcacagggcaacaaagggtccctcaggaccataaatgagatcatagagtggctcctgagagacgtgtctttgagtttctattgctccacaacctaaaacaattctgggaggaaagacttccagacaacagtccatctctggttaattgggactggaactcactaaaggtacaattggaggcagaaactgcttttacagctcagaggtggttcatccacagtgagctgggccctttgatgccttatgactactgtaattcaccaaccaagaaaatgtaccacaggcttgcccataagccaataggatgggagcattttctcaataaggttctctctttccaaatgcctctagtacatgctaagttggtttaaatctagccagcatgaggcacctaatgaaattataatcgataagggagaactctagatcacaggcatacaggagctgccttcactattaacattgttaactgtctcaggctctaagcttggtccattgttattctaatataagatatctgcatatgatgagaattctatctctgttggcaacagatgctaacagaaaatgcttactgggctggaatcttgcttctcaattggccaggagctttaaccagactcctggatagagcattgattgctcttccatagatcctgggttcaattcccagcaaccacatggtggctcacaaccatctgtcattgggtcagatgcactctttgggtgtgtctgaagatagcaacagccgtactcatataaataaaataaataaaaataaaatcttaaaaacatttccatgcttgtcatagtatgcctcagcccctgccccccccccagcccccaagactttggtccccaaatcttgagggttgcagagggctgaaaacagtctatagctgcttccatgcagtgtgaggtcaaagaccctacttactgatgaatcaaaagtctctttggtctgaagggaacatgagagtgtctgagcttggagattggagggtcaacatttgggagggacctggaagagatgatgtcattactcaagacatcaaagcttgtgcaaggaatgaagcctgtaatagattattctgaccaagatcagcacccaaaatgaagcatctgatgatgagccatgatgttagtaagttgttaaaacttcaggtagactccgacaaagatttaatttgggtatgtgaattttagagggccaagatacattgtcccactgtcaggtatatctactactccctgcttatagtgggacaagttcttctaatatgaacatttagtaccaccaggtcttaggtacagcaatttttttttcaacttaacttttgagtttaggagtgagatctcatgtactataaaaagagatctcatgtactctaaaaatgtttagagttactactaatgctatggcaaaatataaaagaataatttccaaaagggaatacatttaaaggaaaacaacatgaggttatcattactgagtatgtgttatgcaaacagagtctgaaagaaaacagtgaatcaaatctaaatgcaactgaggtgctagccagtaataagcttaatgtagctttgcattgttgttggagtggctgagacttgttcttcctggcatgacactggctcacacttagaatttaatgggtaggtttttaagatcagaatcatggtttgtccttttaaaaagtctatgctagttccctttctgttatatcattgtcgtcgtcatcatcatcatcatctggctatactttcctgctgagtttttgaggccatgcatgtagccaaaaattgccattttttttccttttgaccattaaggccagctaagactctttaggaagaaaccctgtggctcttttagttttcttttctttgtaccatcttcccttggaagcattgagatagtattctctgtgcttgcccatctctttgtagactgaaagatgaactgtagttaaatttatcggtgttataatacttaatatctgacaaagacttctaataatcatcaactctgttaagttttagttctctgatgagaaattcaatagaaactgtaattacttcattacaacataaagtatttttttgttaagcatgcttccacaaatatatactaattttaaattttagctttcataaaaatattgtaacgtactttaacattgattttgtcctaatctgttttgttttagtttggaataatcattttccttagaaaaactcttccaatatattttcatcttcttaaaatgagaaactttgttgttatctttgtttaaaccaaaaatttattctgtatctttcttttttttcatttcatggtatttatctgattaggttccttaaaacttttaaataacacttcactttaagtaaaatattgaaaacatgtgcaaaaaaatgttaagagtttggtattccacaaaatagaaacagaaggtactctacccaactccttctatgaagccacaattactctgatacctaaaccacaaaacacccaacaaagatagagaacttcagaccaatttcctttatgaatattgatgcaaaaatcctcaataaaattctcgctaaccaaatccaagaacacatcaaaacaatcatccatcctgaccaagtaggtttcatcccagggatgcagggatggttcaatatacggaaatccatcaacgtaatccagtatataaacaaactcaaagacaaaaaacacatgatcatctcattagatgcagagaaatcatttgacaaaatccaacacccattcatgataaaagtcttggaaagatcaggaattcaaggcccatacctaaacatgataaaagcaatctacagcaaaccagtagccaacatcaaagtaaatggtgagaagctggaagcaatcccactaaaatcagggactagacaaggctgtccactctcgccttacctattcaacattgtacttgaagtcctagccagaacaattcgacaacaaaaggaaaatcaaggggatacaaattggaaatgaagaagtcaaaatatcactttttgcagatgatatgatagtatatataagtgaccctaaaaattccatcagagaactcctaagcctgataaacagcttcagtgaagtagctggatataaaattaactcaaacaagtcaatggcctttctgtacacaaaggataaacaggctgagaaagaaattagggaaacaacacccttctcaatagtcacaaataatataaaataccttggcatgactctaactaaggaagtgaaagatctgtatgataagaacttcaagtctctgaagaaagaaattaaagaagatctcagaagttggaaagatctcccatgctcatggattggcaggatcaatatagtaaaaatggctatcttgccaaaagcaatctacagattcaatgcaatccccatcaaaattccaactcaattcttcaacgaattagaaagagcaatctgcaaattcatctggaataacaaaaaacataggatagcaaaaactcaaggataaaagaacctctggtggaatcaccatgcctgacctaaagctgtactacagagcaattgtgataaaaactgcatggtactggtatagtgacagacaagtagaccaatggaacagaattgaagacccagagatgaacccacacacctatggtgacttgatctttgacgagggagccaaaaccatccagtggaaaaaagacagcattttctttttttcttttttctttttttttttccattttttattaggtatttagctcatttacatttccaatgctataccaaaagtcccccatacccacccacccccactcccctacccacccactccccctttttggccctggtattcccctgtactggggcatataaagtttgcatgtccaatgtgcctctctttccagtgatggccgactaggccatcttttgatacatatgcaggtagagtcaagagctccggggtactggttagttcataatgttgttccacctatagggttgcagatccctttagctccttgggtactttctctagctcctccattgggagccctgtgatccatccattagctgactgtgaacatccacttctgtgtttgctaggccccggcatagtctcacaagagacagctacatctgggtcctttcgataaaatcttgctagtgtatgcaatgatgtcagcgtttggatgctgattatgtggtggatccctggatatggcagtctctacatggtccatcctttcatctcagctccaaaccttgtctctgctattataaataaggctgctatgaacatagtggagcatgtgtccttcttaccagttggggcatcttctggatatatgcccaggagaggtattgttggatcctccagtagtactatgtccaattttctgaggaactgccagactgatttccagagtggttgtacaagcctgcaatcccaccaacaatggaggagtgttcctctttctccacatccacgccagcatctgctaagacagcattttcaacaaatggtgctggtacaactggcgattatcatgtagaagaatgcgaattgatccattcctatctccttgtactaaggtcaatctaagtggattaaggaactccacgtaaaaccagagacactgaaacttatagaggagaaagtggggaaaagcctcgaagatatgggcacaggaggaaaattcctgaatagaacagcaatgacttgtgctgtaagatctagaatcgacaaatgggacctcataatattgcaaagcttctgcaaggcaaaagacaccgtcaataaggcaaaaaggccaccaacagattgggaaaggatctttacctatcctaaatcagataggggactaatatccaatatatataaagaactcaagaaggtggactccagaaaatcagataaccccattaaaaaatggggctcagagctaaacaaagaattctcacctgaggaatacccaatggatgagaagcacctgaaaaaatgttcaacatccttaatcatcagggaaatgcaaatcaagtcaaccctgagattccacctcacaccagtcagaatggctaagatcaaaaattcaggtgacagcagatgctgggaggatgtggagaaagaggaacactcctccattgttggtgggattgcaggcttgtacaaccactctggaaatcagtctggcagttcctcagaaaattgtacatagtactactggaggatcccgcaatacctctcctgggcatttatccagaagatgttccaactggtaagaaggacacatgctccactatgttcatagcagccttatttataatagccagaagctggaaagaacccagatgcccctcaacagaggaatggatacagaaaatatggtacatctacacaatggagtactactcagctattaaaaagaatgaatttatgaaattcctaggcaaatggatggagctggagggcatcatcctgagtgaggtaacccaatcacaaaagaactgaaaggatatgttctcactgataagtggatattagcccagaaacttagaatacccaagatataaaatacaatttgctaaacgcatgaaactcaagaagaacaaagaccaaagtgtggacactttgccccttcttagaattgggaacaaaacacccatggaaggagttacagagacaaagtttggagctgagaggaaaggatggaccatctagagactgccatatccggggagccatcccataatcagcatccaaacgctgacaccattgtatacactagcaagattttgctgaaaggacccagatatggctgtctcttgtgagactatgccagggcctggtaaacacagaagtggatgctcacagtcagctattggatggatcacagggcccccaatggaggagctaccgaaagtacccaaggagctgaagggatctgcaatcctataggtggaacaacaatatgaactaaccaatacccccccccccccctggagctcgtgtctctagctgcatatgaatcagaggatggcctagttggctattagtggaaagagaggcccattggtcttgcaaactttatgtgcctcagtacaggggaatgccaggaccaagaagtgggagtgggtgggtaggggagtgggtgggggagcatgtgggggacttttgggatagcattggaaatgtaaatgaaataaatacccaatttaaaaaacaaataaaaaaaggaaaaattttaagagtttggaaacatgttttacatcaataaatttaaatgaaccaatttgtagagaatagaatcctatggaagcagtcacttagaaactatttttgtaataaaggctcttcaacaatgcttcagagaaatcccagacacgccctgaagaagttatcaatgagggataggacagaggtatggccctgcatccctctcagcagcctatttagttttcctaaacctttagggacctcatcaaacgtgatggcatatacatttaatctcagcactgaggaggcagaggcagagttttattagtttgaagccagcccaatttacaaagtgagttccaggccagccaggactatgtagtgagacttagtctcaaaacaaacttttaggtaaaattgactcagaaccaactaggattcctggatttgatgcagaaaagaatttcaagactagccagtatgaagaagaatttgtttaataaagatattttcatatatatttaagggtgcagcttacaagaggaacatttagaagtaagacataccagaaaatatggctatgggcttctctaggagagttgtcaaaattaatgttaatgttttcaagaagcttagcccatcaaaagatgcagagagagaggggggtacagaggaaatttcttagaatgacttataggctgtggatcagttaattcaaaaatggctggctgggaatgacaagtccaagaaccccatagttgctcagtccataaggctgaatgtctcagctgatcttcagtctatgctggaattcctaagaagtagaccacatgaagctcaagaagaaagaagaccaaagtgtgggtacattgtccttcttagaacaggtaacaaaatattcatgagagcaaatgcaaagacaaagtgtggagcagaggttgaaggaaagaccattgagagactgccctacctggggatccatcccatatacagtcaccaaatgtagacactattgtggatgccaagaagttcatgttgaaaggagcctgatatggctgtctcctgagaggctttgccagagccttgtaaatacagaggtggatgctcaaaaccaaccactagactggtcacagcatccccaatggaggagttagagaaaggactgaaggaggtgaaagggtttgcaaccacataggaagaacaatatcaaccaaccagacctcccagagtttaaaccaccaactgaggagtacacatggagggactcatggctccagccatatatgtatcagaggatggccttgtcaggcatcaatgggaagagagacccttggtcccatgaaggctcgatgccccagtataggggaatgtgagggtggggaggtgggagagtgggtgtgtggcttggggcacaccctcatagaaaagcaggaggagagggaatgggatatgggtggccagaggagaagaaatcgggaaaggggataacatttgaaatgtaaataagtaaaatatccaataaaaaatgactaagcataaaaaagaaaaaaatagatctaatgccagtgaaggaacggacttgctagcaaggcaagaagagcaagcaggcaagcaccaaaagtttccttcttccatgtccttacatatggcttccagcagaaggggtgtcggggttagaagtgtgtcgtcccagattaaaggcccacgtcttctcacctcaagatctggattagaagtagatcttcttacttcaacttaagcaaaagaaagtcgtcagaagtatgccctcttttgaggggttttagtttagatatagtcaagttgacaaccaagcacagccattacactgagctcctctcgaagtggcaagagctgtgtgagcacaagtgggctgtccatgaggtaacagtcccatccgggtagaaggagggatcgtagaagaccacggccatcacacgaggctctgttggctctttgttatgctcagaatagtgtttgagttccctaacctgtgtcctccagtaccaccctttactctacactctttattcaaatgccctaaggctccagtctccattcctattgcactatctcctttcatgactttggacccttaaagaaatcaattattctgcctctggagatggcttcacctaccaaagtcatacttatcacctcagttctggctcagacaccacctctgtcagctgtgctctctcctctgccttcaggtggttattttatttccgattacagtgccacttggcagaggcctttaccttctacgctgtcctcccttagaggaagagaatgtgttttgtcttccttctacccacagcaactgtagctcctcacctgtgatcaactctcggcaaatgtacaagtgataaatgggtgggtggacgacacacgtcgccaacaattacttgtctaatgctagtcttggtccagacactagcaaggtgctcagaatgcaaaatttcaaggatgcagacacagccacttctaacatttgaaattcaaagacaatctgaaactatatcaagcaccaaagtcagaagcttacatatgcatgtgtggcatctaaagcaatgtaagtcaggtggctggtgtaaggctcagagggaggtggctaaaggcattgctatctagatgacacttaaagcaaaacttaaggctatgaagaaaagagtccagcccgagcttgggcacaccagtgatcttagctgtgagacaacacggtcagctggggaacagtgtatcagcgagtgcagggtgttggagaagacatgcatgcgggagaacaccagaggatttactgcacctggtgctgagctgtgctaacgcccaggctggaggggcggtgggtgtttcatcttctcatggtgtcctctgtgccaggggattcgaattccattctaatttcaactgttgcatctgagttagtatttaaattcaaatattcctacaagatcaaagatcttcctctgattgtcccaccagtgtctctctctagcccagttcactctcgcagtatctgctcaacatctctgcaacctggaaatgaagaggcacagccaccactgaagtctctttctttctacttaagaaaaaaagtcccagtcccatttttaacttagctttaatatctatcagtttaactgataataataaacttaatatctaagtttccatatgtgaaatacagggaagttttaaagtacccacagttatcctagatgataattaaaactcttttattcagagaaatagtggcactgattttaaaaatgatattttcttcaaaactgtctccttcaaggttctgtttggattaaagtatagtagtagtaaaaaacttgagagagtctacacatctataaaggaatttagaatggcaatgccactcaatcttagcaaaacaaacaaccaaccaaccctatttagttctatttccatcagcatatcctgaatgagttcaaaacggaagtggaagggagctggaatgtccagtcatctgctcatagtgaagggaattttctatgtaagggagaacttaagtaagaaactaattatattctgagttgttttctggattctttcacacactgctcttaggatgtttcatctgtatacagaaatgactgtggaccacgaaaggatgaaggctgactatttttctgagtggtgataagtctctgttctatcttctttatgagcctttttgtgaacagtggtgcacactggagagctcactgcccagagtgagccatggcccagcacatgacctaagttaacagaagcctccacacgtgtgttccgaatggcccagatgtgttatccacagaatacccagtctgggtcaacttcctcattgtgccccttgactgctggtggaggggaggttgcagcatttgggagattgttcttaaattctttgactactgtttactgcctctgtcatcttacttgtctcagaaaaatttgacataagctctttaaaaagatgtatgtatgtatgtatgtatctatgtatgtatgtatttgagtatatgtttgtatgtgtgtgtatgtgtatatatgtgtgtatgtgtatgtgtgtgaatgtatgcttatatgagtgaatgggctgggtggggggatgcatagaactgtgtgtgagaagcccagaagagagtgttgatccctcagagctgtagccacactttgtgttggtccaggcttgttctgtgggtcttggatccaaactcttaccctgacaattgtgaaacaggtgtcttcagcatgcagccatgtgatagtcctggtaggccctttacaacattttcaaatcattgattagcttttttctttaaaatatatttttagggggctggagcgatggctcagtggttaagagcactgtctgctcttctagaggtccttggcaacttaatatattacatgtagtttccttttcaaatttgtggtgcttgaaataaaattcaaggcttcactatgctgggtaaggggtctaccactgagctacatcctcagcccctaacataagttttccctttaatttttgatattacaaaataattacaacgttgctccatttccttcccttgtcttccaaatctccccatacattatacccataaagtctttccaacacaactgcttcgacaggagctgaacaagggcagcactaggtatgcccaagtgggtggggaaagcccaggtgaccccagtcctacacagagatctgcaggctaccaagggatgctggaagcaggagaaatgatcttcctcagggaaaagcacaccagttagctgtgcagtaccaatgataagccctgaaagcagtcatacatgcaacattatagagactgagcgggctctatgtaagaatatatgtatacacatatatgatatatatgtctataattcttaatctgattgaatctcttcttatccaagtcagttggtttgagcaaaaagaaaatctagatggacaaataaaaactggccttgaactttctgaaactttaatacacaactacagtaatttgaacgttatctctttaaattctccatggaaatttagagcattcacaactacctgcttgtgaaaagcaacaaacagaggatttctagtggttcaggccctctatgcaaccactgctttatgagactcctattttctccatagctgagtcttaaaaccaaagtccaggcaaaagggcttcattggctctgaagactaagattagaaggttatgtctagcttaagttctcttatatattaaagagttctggtcactacccaatagctgagcatgactgttttcctaggaaaatacacagtagaattatgaaatggtctgaaaattgatcagaactgctaatggatgtgtttgattttgtgaagcatactaaaaggaatccaagggtaccttggtcattagcacatgagaagtcagccctgcctcctctcctccatcacagagaagcttacccttgaagagacttcatttccagtctcagctgtgttctagggaacccaaagccacagggatgatgacagtgacaataaagcatctatcccacgcatttctgggcaaaaacagcttagcattctttaacctctggttaaaataataataatagaaaagaaaatgaacattaattgaaattaattactttctttagtgaaattacttagtttcttttgcagtgagcccccatgtgtttatgaaaggtaacaattcaagtctatgtgtaaaaaagccactatagtcatgatttaaaattattaagataatagtacagagtaaaaaaaatgcaataaatgaagtatattagcattattaaatatgtagtagaattaatggtaggtcttttacttccccccccccagtgaagaaaataaaaaggcattcagaaaagaaataaatatacatacatgaaatatcccagtgttatgaattggaagggcacttcttttaaaaggctatgcatgccaacatgaggaagactattattaaggaatttcacggaatttttatgtaaagttttattgtgccgtgttatgatctcggggatagtttgtgatatttactgagtcttctgagagttcatttattcaggtcatattttaagaaagaacttctaagattcagatctttaatgtaattctgtgatatgctcagctgatcccattaaatccaaccctgcgcatgcagtataatgatgtgaacaattccctttctttaacttgttacacctcgcttgaaatgcactccctttgagtggttcttcttcgcttctctctccaggctgaggctcagctctgctacctggaagcgcagagagacgctgtggagcagatgtccctcaagctgtacagcgagcagtataccagtggtagcaagaggaaagaagagtttgccgacatgtcgaaagcgcattcggtgggaagcaatgggtaggagactattctttctgtcattttaggctcactaagctgctttttcagtgacattcctccggcaggtgttaggcaggctttctttcccagctagcacacaaggcaaggctcagtcaagggctggagttaaggactgagggttttatcagcctctaccacctaagccaaaacttctgacctttgttactgtccgtaaaagacagccttgtgatttaggagtgcttttgagactgtgttttacccacaatattgccttttctccttcatagattattttcaaaatttatatcccctcctccctcttgacatcagggtttatgttaaagtctgtttatggaatttctgagcatccaaacttcatcagaaacttggaagaacataagatcgagatctagtaattgtttagcaaacatggtttagccacctactctcataccaagtcagctagaattatagactagctcttgactttaaaaaatatatatttggagccgggtagtggtagcacatgcctttaatccctgcatttgggaggcagaggcaggtggatttctgagttccaggccaaccatgcctggtctacagagtgagttccaggacaaccagggtttacagaggaaccctgctttgaaaaaaacatatatatatatattagggtatcatgtaattcagactagacttgagctcagagaagagtaataggtaactttgaactcctgactttcccacctctacatcctgagtgctgaggtaacatgctactgtgcctggaagcactaaccctgtgatgttgatagtgtgttaaaggaggaaacagtgtctataatccatgagcagttttattcagcctaagatatatggttccacttagatacgattagctacccagtcttaagtaattgtcatgtatttaggtatttctgaatgtctggaaagctatacagacattgcccagtgcatttatatttctctgttttctgactcgattctaatattgaattaatattgaataggtgatcattaaagaccaaatgtaagggtgaagttaaattatttcatgttttaataagcagtcatctttttcacttttacacttgggctggacaacaagagataggcattattctctgaggttgcattacatgtttgtagtatgatataaacctgtgcaaatagcactgcccagaatattgcccaaaatattctgcagcagaagccttttcttgtacttgggtgcatttttgtttgtttgtttgtttttgtcttttttgagacagggttttactatgtacctctatcttggagctcaccacataggccaggctggtcttgaacttacagagatccatgggcctctgcctcccaagttctggaattaaagatgtgcaccactacgccaggcttgcgttgatcttttgaagttcttagatttgtaatggacttataaccctcatacaaagttgagggttaaattagcccatagattagacattatgtcttattctaaaaaaattcagggtagaagaatataagataaatattagagacataattttgtttagaaatgagaataatccacatgatgttttctccacacaagacatgttatatatttagttgacttgtgctacttgactcaggagactcagaatttttctattcagtagagggtaagaacagaagcaattgagaagggaaaaggttaactctcagggcatgaacaatcagctgcttagggaccttaatgtgctttaagttccccaaatgcctgagcagtctccggtgtgcatgcaagctcagattttaggtcacattgtcatgttttctaaaagcctccggactgagcagcaccacgtgcttctgacctcagattccaaggacccaacctgtgtactcactctgggctccatgcatcataaatctaccctgggaattgcttagttagcaacaagcattgttctggcatgtgggaggaggtgaactttcctgatagcctttgtttatgctacttagggtgctgaaggctgttcattgtgcagaaatttaagagcacactgaaggaaagccagctatttaataactagaacagaaacctatactgccttgcagcccctgttgacacacagaaaagcactgtttgagaaatccctgtgggcgaggttatctgaggtgccttgcccccaagactctgctcccacagtcaattctgtagctcaaaagccttaaaaactcagccttgtaaaattatttattccaatgacagataaacctcattaaccattacatagcgcgagtattgtttctgatgagtgaacgtgggaatagtgtgggctttgcagtatctatattgcaaatgcacatatccaataggctaaagaggacattaagtcagtaacccaagccctatactctcattttctccccattcttatgtgcatgcccagatggtgtgtactaacatagttgtacaagaatacttcagagaaaacacaactgccacaatgaatggtgcacttaaatttctacaaagtttatgtaataaaatattccttttgaaatgaatttataatctttctggcttggcaagaagatggctactagagtggcggatcaaagttaatactcaactatcaattttgtgtttagcagtcctgggtgaatgtggtgggaggattttcctgaatgcaaaggcctatgttctggtgagagcgcatgctcacctgtgggagatatatatgtatacatgatggacttatggatcctatcatggaaccatgactcctggatgccctgcaatgtataggtctctgtgactcttcaaggaaataaacaccgtcatttttttttaagtgagaagcaatattgattgttttgttactttcaacaagcaattctttgcctagggcccactatagtttgatgatctaaatgtaactcatcaacaacttgcattctgtatgcttcattaaataggagccatctcttttttcaggtgtttcttcttataaagagattgtgtgattccacttctcaagtaaaatttaaagctgtagtctagtgtattaaggagctatgcacttactgagaaaacttagttgatttttagtcatgcttcttggtcaacatataaatcagggaattaaaacatcaaacagctaaatggttctctagcccaggtggcacatgcctttaatcccagcacttgggaggtagaggcaggcgaatttctgagttcgaggtcagcctggtttataaaatgagttccaggacagccaggactacacagagaaaccctgtctcaaaaaacaaacaaacaaacaaaacaaaaaacaaacaaacaaaaagatggaacttaaaaaaaaaatcacagctctgaaccttgggtcatgaacataatggctgctgggcatggctgcatgcctgttgggagagaaagacagatcgggtttgactgtgaaacagcaagatcctgtctggaaaactacaacagcaaagagcaacaacaaaacaaaaacctagacagtccaaaactcatattatctcctctcctctgtatcctggacaggttttttatcataaaccctgcattgtacaaattcaatagtatataaaacttcccatggaaaaaatgcagtagtctgaaggagattttattccacaaggaggtttttggtaaaaccctgcacaacggggtatatggcgcatgcctgtgagttcagctacttggggatgctgatacaggaagcttgctggagccaaagacttcaagaggagtaagacaatgtccaaaaagtggaacaaaaccctcagaaaactcaaattcactcattagtttgccaacgtttttaagtgttttccatagtcaagctcaatgggaagtggaaattggctgggagaaaatggggtgaactttacacttgaaaacacacagtttagttttaggaacaggcagatctatagccaaagtggtaaagtatcgagttagaaacatgggagggttagaggcgggctcctagacagcagaactcgatttggactttgtccaggagaacaggagcagatctgggaagacaacagggagggctctggaggtgagagaatttctcaatgtcacccgaaaagtgcttgctgaacacctacacagtcagatcatagctccacatttagctgtgcagtaggagaggggaaatggggttctctgaactgatgagatggatgcaggaggcatagcctagctgtgcccctgcaatccgtgcacgtctccttgaatctggtatgctgcctggcacatgctaggtgcccatatgaataagtagctgaaactgatgtggagcaaaggtctagagggtcagtcactagatgactgatggttccttactctggaaagcaagatagaatgctgaaggaatggagagacagatttgagaaggaggtcaactccagctcctggttttatcattgtgtgtggtcttagctatggtcaccaatggaaccttaaagccaaaagcatccccttcctccactgcttgccccaagtgcttaaaattcccattctatgggtggtttggagtgggcgtgcgtgggtggagtagtgattaggtctaaaactcattacttactaggagcctgtttcagtggtttttaaagtgtgttctctgagacagcactatcaatgcctatgaatttgctaaaataccctatctggatttcaattaattacacctataaatttggagactttgagaaaaggcagtatagacatcctaagtggacaagcttccaataatgatttctggaagtttgagaagcaccactttggacgatgaatttttttttcaggttaggaattaatgtaaagtatgctaaaaagatgaaaggctgaagatataataaattagacagtctttggaggactgtgggattcagagaatgagagagggagaggcactctgatgccccaggtgctcaaatgatgttggtgttactaaagacttaatgcatattgaaaacctcttaaacagaggccatgcaagacattggggataagaagtcaatggcatacaaggacttttgatatatataacacatataactcaatggaggatcatacaggcttggaaataacaacaacagcaaaaaacaaacaaacaaataaaaacaaacaaacaaacacaaaaccctgtttctccaaacgaggtagcatctgaaaagaactagaacagtcaagggagtccaccatgacaagaagtgacagtgtgctagaggctggggagatgactcagcggcataaagtaccagactggcaagtttgaggacttgagttcaaatccacagccgccacataaaaactgggcatggccttgcaaccctaaaaccccagcactgtgtggggtgtgatgtcagagacaaatggctctctgagaagtcccaggctggctcagctagccagaacagtgaatttcctgtgcagtgaggtctgctgtctgtggtaataaggtagagtatgatgatacttctatacctagaatttctaaagaataaagaatattttaaaatctgcagcttcttacccatgatattagatatactcagaatacttctaacgacaacaaaaatatctatctctagagaaagccgtgtgttctctctaatctaagttcaatgagaatgtgaatcaggttaaaaactaagactagaatttcagtggcaccatgctcctttatggctacacaaccttgattaaggcttttaacctctccatggttcattattggtatataaagtgggaatcattatcttagtgcattcattcaggcaaatttttgcagccagaaaatgtgacgattcataagaaaatacaaaaatatatgtgaaaaatcagttaatgaaatatttactatgcaaatattgcatttctgggagtagcgtgagatactagaaatgcaaaggcatacaaaagatttcatcttggatgtctggatagagcaacagagagacaaagaagaaaagagaaccattgacttagttaaaacattaaaaattacgggacgcaattccagatatccagcattacaggattattgagtctgactaatgcagcctgacttggaaggggaagggagatgtaggagagaaaggacgtttgggttacaagcaaagatgtgtacattgtagtaaatgggagagtggggcggggcgcagctattagacattacatacacagagggcagagaaggttcccagctcagctggcttggtcaggagggattcccaggggaggttttacatgatagctcattacccatgaggaaggcttcccctgcatctgggggaaattgaaagatgattgttggaaactggggtgtaggggtaaggggtgtgtagtcaagggttgcatcttatactgaagaaaatagacatgccattctctcatcatactagatgttttagcacaaaatttcttatttttaaatttttttttaattttaagaaaaaataaaaaccttaagaaaaatgtttttattttatctttattttaggaaatttatatttaagcatatatacgttattactgcacgttggtctgaatgaaatggcaaagggctaatagtgtgatagagaagatgaggaaaagacatgcctcctggttagttcgaaaacacataccaaatgcacacacaacatccccaaaaagaactgggattgacaagtgaaaagaaatgaatcaccatttaaaatattgcttgattaaagatcaggtttgtttctctaaattaattaagcaataagatacgctaagtggctttaaccacctgagaagagacagaagtgccctgggtttcagggcctccgggatcttcctgggtttgtactgagcaatgggtcacacagttctatcgagttgaatgcaactgtgcccccccccccccattcaacaccctgccctccgaaacacacacaaagaacatttttaatttctgcttgatgagtatttttggaacatgcttatataaattattttctatgggttttccactagtgattcactagacatagaaatgaagtactctgtcttatgtgtactggtattgaaattatccttacaaatgtgttaaatcactagacatcctcaataaaccatcaacctttcctgcattctattccttctgaatcttattctattccaatattacaagtagctgatcagtgtttgattcagtccttttggcttcttctacagtgagtaaaagtattattaaaatgcaaaatgtagccagagaagcagaactaaccaggctcagtgttatgtgcctgtattcccagctactcaagagactaaagcaagaagatcactggagccctgcagattataaaagtaggactttgggtgctaaagcctacagaaaacactagccaagagaaacatattcacttggtaccacaagtatatgatctttgaatatgcagattcatcaaatgtagagacttaggaatatgcagattcattaaatgtagacttgtatggatattctaaccccatccatatcaagggccaatgaactgcaaatcagggagggttggaagtctactttgtagggaggtatgacttcaaagttattagataacagtaaagtcaaccaataaggatttatgtatactgcttctgtctacagagcaggcatattgatgggtaatgagaagggtaaaatgctaacagaccttgagaagacaacttgggtaaacttaatctaacacactatagtgtgcagaacagaaatgttttaaagttactgtctttgatcattcttccatcttctccatcaaaggatttgagtcacattataaaattattgctaatatgacataaagcttcatgaaaataacttaggcaaaataaaataattataagaagaattaggagtgaatattttatgcatactttcaacaatggctgtggtttggcaccaagaattcaatcctccaaagaaaaatataaaatttcatttcattatcaatgcatagtcttataaataatatatatcagtttgaagcaatctcttactcatgaagatctgacataaatgtctccttgttatttgaatgtgaaatgcctttgacctgtttttgaacacttggtgtccagttggtggcactgttttgggaagctgaggaaacactgagacctagagacctagtgagcagaggtgggtcactgaggaagggcctcatatccaccattagttctgtactgattccctacttcctgggccagtgtccatgtgaggaattgcactccatgtccctatagccatggatgcattcctccatgctttctcttgccaggacagagtgaaatcccctgaaccactgggtgaaaatgagtccttcctctcttaagtcacagcaatgagaaaggatctaacaaacttccctataggtattctattgttttcagtacaagtatcgaacccaagtccttgcatatactacacaagtgttctagcattgagagcacctattgttccttaagtgaaaacaaggcctctgtgttacatctttataagagaactaaatcttagggcaggtttaggatgtaaactgcacagtaatgcctaaggatataagagtgttggtataagtagctgagaccctgacacagcacactttgaacaggatcagcccccatggagacagagtcctcttaaaagagcatttgctataaggatttggcaacaggttgtttaactcatgtcaggactcaaaggtaaatatttcctatttaacatttgataactagtgatacctaaagtagagttgacatttttactaagaggtgagctcctaaagccacaaccagcatgcatagagttggcttggatcctgagccccatcagtgtacacaataatggaaggctgacttctaaaacaaaacaaaacaaaacaaaacaaaaacaaaaactgaaaaacaataacaacaaatggtttgatgtctcttggtttgtttttagaaatataggttcttcctttgtttccccaattttttttctaaaattctccaggaagggttttagtttggtgacttatctgaaaatttgatcaagagtttgacttcctcttagccctacagaatcctaaaaaggacagaaagaacactcagagaaatatatgtgggcatttctaagtatacagattatatctgttatttcaatgataggtgtttgtgagcaggtgatttatgaggaaggaagaccaattataaagaagtttctagtcttgaatttacttttcttagatatttttatgtacacatatgtatatttgtgttatatatttaaatatacatacatatatgtatacacaatacacacatatgtatatatatatgtgtatatatatatatatgtgagagagtgagagagagagagaggaagaagagagagagagagagagagagagagagagagagagaatgaattactgttgctggaaaaactccatattctttttttttttatttatcaatggcaaaaatcaggcttcttgtctcctgaggaagttgctcaagaattttcattcaaaatagtaaattattgtccacactttaatattttcagagtggaaagggattctatatgcaactgtgcctatcagggtccacaccttgaaagccacatttgactctgtaatgatattatgactggactagattacactgttagagcccacttccttgctgcttctgtatggagcagagactcataagagatcctgagctattattagtatcttccttcagtaaatcacttatatatttgtaagattttcttaccactttcttatatgtcttttttaaaagccaggggcaaacatctctgctcaaataatgtgaacaatgaatacttggtgaatatctggggaaagaatcaatatgctgaagacattaggaaacttgggtcatttaataaaacttttagtataggcaggtaggtaggtgtttttagacatttgttagtgcaaattaaccaaataaaaagatatatgtatgtatacatataaaatacatataaatgaatatataatactcagcttaaggtagaaaagcaatagatatgttagtattatgttctcttcaacctataatcattctaatataatgatttcttaatttggttgtctgttttaatcaaaattcctcaatgggccaagttaaggcctcatatattcacacacacctcccattgatttcacttgggtgaaactgtaccgttaaagcaaagatttaagttgaaatgttgagttaatgatgcccactttaaataccaaaggctgaatgcatttgtgtattaagcacttagccagtcaaacagaattcccatcaggggtccaagaaaacagtatttctgaaactatgctagcctcacaaatatatactgccattctatctacaggggacgtgccaaatccaccaaatcaatgtgatagtctgtctttctcttctctctctcctctttctttctttctttctttctttctttctttctttctttctttctttctttcttcttttctttctttctctctctctctctttctttctttctttctttctttttttcttcttttcttttctttttcctttgaataaaaaaaagatatggaatcttttctaacagtaatatgggcagtcaatgcactcacaagtcattttggcaatcggctgtaattattaaacccaaacaggaataaatactgaagaagcatttgtacatttctcaaggtcttgcctcttctctctgtttatgtgtttgtgttaggttctccaactgttctagtcacagttctattgctgtggagagacaccatgaccaaggcaaatgaaataaaagaaagcatttaattggggctggcttacagtttcagaggttcagtccatcatcatcatggcaggaagtagggcagtaggtgtgataagcacgatgctggaagataattgagagctttgtcctgatctgcaggcagaaagagagaggaagcttccctgaatttagcatgggcttctgaaacttcaaagcccactcccagtgacgcacttcctctaacgtaggacgaataataggttgatataataacctcgataattaccaataaaattttgtaacaaaagtctctctaaaagggtattcatgtacttataggaatgtaattacttgtaaaaattcctgccacttaaccacaccatcagtaccccttcttctttaaaaagagaaacctgcatgattttgctagaaagtcaacaaaagaagctagttgtgaattcagctgatcaaactggtgtgtgcttccaggggataaagagctgctaactgggtctgtggtgccacgggaggaagtgaagtcatgaaatgagacctttccatataccacactgtagctgacaggctacttaaaatgtattacctcttaaaattaatcatatcctctgaaaacacgtatctttgaaaataatgtgaagaaggttttaatgacttccatgcctacaaggtttcctttgatagtgttcacatagaattgtagacatttctgagtgtttcctaaggatcaacaaaaaaaattcagcaatttctgatttgctacagagttatctatttgatttcactaaattttgaaaaaaaatctaatgttttcccataaatctacaaatcaacacatgaccagcattatgaggcatacatgcctccttaaaaacctttcttgttttctgtattaggactttgtgatatatatttttttgaaacattggtgctaactctacaccaaagaaccaaattatgttaccatagcatttacaaaattatttgtgaaatagatttcacaaatgcaatatcaaacctaaatatccttagctgcaaagaacagtgtgtcttgaagatctgcagagtctctttgtaaggcttgtccctcatgctcaggtgtggactaccagctcaaagctgggcccaatagcaatagagagcttgttctaaggcccttgatagggagactaaggaagaaagagtttggcaggcctagtaaaagccagtggataactttccatgattcaaagccttttatgatcttgcatatattctatatttatttcaagactatttagtaatagttgctcattcatatattttctttaacttttgtgtagaaaaaaatggatgaaaggaataagaaggtgtctaatcaattatatgcaatggtttaaataaacaaatgtttccttaaaatacattggggggggggacttagtaattccctgcaaagtgcaaattaaaattactatgagatttcattttacctcaatctaaacggctaagattaagaaaactcccccttggcttctgcttcagttcttcaggcttctgtcttgagctcctgtcctgccttccctttatgatggactgtaatttgtaagctgaaataaacaccctgcaccctggcaagctgccttcagtcaccgtgtttatcacaacccaaaccaaactagaacagctgggagaggaagaaaaggacgaattttaagatcagcatcgaagctttaaatatatgatagcctccttaattaattcattctccttagggaggaatgacttagtggatgcccaggttttcagatctcctgttcttttccatccttttctccaaaatgacagctgagccaatgaaggtttacacgaccttgtgattcttgaatagagtggctaaacacaggctttgggtacaggctagctggattctcaggcaagctgctccctgcagacagctgtggctgttttacttgttgttttctgttggcttgatcagaccgtagaggaattcttgctgactaagccccatctctgccctcatggatcctaccagttttctaagaagcctggcatcacatgttggatccccacctccctgtccttaggttcatggtgcctttgttgccatggaaacacctctgtccagtgtagccattaaactttcagagatcttggagtcttctcttggaggagattaggtaactaggatgtcaaagggagtcttaatcgtctccttccatctgcacacccctgcttgttgcaggtgcacctcgtaaggcaagctccttccatagttcctagtgggagatggagctgaggattctgcgctttctgcttccccctcagcctgccttagatgcccgctctcaaggatttgggccaatagagaaggggaaaagatacattagagtatccactcctcctgtctttctttggttcttgttctcaaagcccactgaaatgacaggctggccactcactcctccctccccttgcatttaattttcctctggatcctactctgcacagtttgtgggtgatattttacctttacttgattttattagtaaaatattggaaggtgttaggggaaggaaatgttagccataatttagactgcatttctaagtgaccatagacttagtagttattctttattattcacagacttaactttgaaatcctgatgatttatctttctacagtggttgatttgttgttgaatgggaatattaattcatatttcacaaatatactgggaataccttgtgcgatccaagcatcaacagcacttgctaggaacacagaattgcatcctccttcctatgagttagtaccttcattttcctagaatcttcaactgtgtttgtatctccactgagtctgaaagcattgtcacagaccaccatagacctgctgaagttcccgtgtgccttaggtacccatgtctctggcatctagtgtacacttactaatagttccacgatcaaggatctttataattatgctaaaacaattgaaacaaaatagacagctccagatctagttttccccctcccagatccaccttaaacttgtttgacatatctattaagattaagtatatagtatgcattttttctggaaaagcaatctgacaccgagagacaagaacacagcggtaatgaaatccccccattgactagtccacattcgcagctggggtcactactctatgagcactagcagggaatctacaatctgtgctcactgagtttgacaaaactgtagcatttctcttaggggtggtttggaggtgggaggacaaagtcatagtttccagcctgcactttcattttctgatcacagtgttttagaagaatctgggctttacttattcaccaggctttcaatagagaatcacattaatccttttaagctccttattctaatgatttattttgttgaaaaccatagtgatactcctttgaattttaatgatcgctggctattcaaagattcattgttttgacttcctgtccttacctttgtttcctgcatgtctgtggggaacacctgtctaatactggatctgccactggttctcgctggcttaccagagtcactcaagcctatctctgagtgttaagttgaaacgctagctactcatccatgacaataaatgtaggatgtatgtttgcagagataggcaggtagacaggcgagggacggatgaatgattgagtcattttccggagaaaagaatgtttttggatttgttagcatatgttatcattgttgaaaatctggaaaataatttagtaataaacactgaggtgccccatctaggaaattgaaatgagaaagcagttttgggttttgaaagtgctgtctttacccttaatctgggattatgaaactttggcaaattgctggccctccacttctcagtctgcgaagggatggcatgcttcctatcaaggacatagtcacggtttctttgtttggaaaggggcagtagatggtaatcaccatgacgtggctcaggagggagcataggaattatatgttgtgctttccaaacctgggaagtggctctgtcacagccctgcattcctgctctgtcctctgtgaaaccacacagaggattttccttctcctcttacaggtattcacccaggaacaccctgggttctcaagaatatattattctaatatgagatttttaacaactacactgtatttatgcataatacattttcgtgccttatcttcaggcttctggactttgattcagaatatcaggagctctgggattggctgattgacatggagtcccttgtgatggacagccacgacctgatgatgtcagaggagcagcagcagcatctttacaaggttagagctacccttcctgcttttactttgcggtggaagatctgattagcctgacaagtgtctctctcaggatagctttgtgttcattgtatgtatcatggtgtctattagaattccctcccctgtcctcaaactcatttccctccctagtgtgctgacaggccgcaccgacatcataattccaagaaagttccctttatcacatcctgtttggtgtaattctaaagaaggacaaagctttatcttcaagaccaatagcaataaacgaaactgcattaataaaaagactgaaacaaagcaaagcagagacgggctggtgacatttaacaggatgtgtttccattggagcactcaggtagatttggtccactcctcagagcttctcagagaagacagagatttgccttcattttgacttgttgttaccaaagcacagggctcatgcaatttgaggtatgttagtgatgcatacaacaggctctctcattaaatctgtgcatttcaggttgtttaagagttctcgcttggaattcatattgatctcagacaatacatctgataactatctatattgcttccatgtctgccagatcccccttaacctagagtgttttaccaattctacttaaatagctttagaaatccttacaaaacaatcatgtgatttttactgggaggaaaaatggctgtaagcctcagagtccctgaaaaggctgtgggggaaggaagagggacgttctactgaaatatcaggctgcagtaaatcttcctcatttaagcaatttttattggagtaattctgacagttgtcatccttgaattgctttgagcatatggcatatttcaaagagcagattgtgaatcataaaaaataaaattaataactaaccacagcatcagcaacagtataatgacaagaaacaactaccctctagctttttaaaaatccttatagaataagaagtatactcaaggtcaaataaaagttatcttcttcaattttaccattttaggtaaacccttctttcacaaagtattttaacttttttctcccttcatgagagagacatatactttaacagagtctgattgacattaattattgtcccttgagaatcatcttagttaagaaaagatataggctccctgtggactccgcaactggggacattttactctctgaagaattctgtatagcattgatgtcgttcattgacttttctgtttcctgtatggctagctgtccacagaacccaaattgttttccaacataccacttcccaactcacgtaactaaagccaggctatttcacatcttatgtcaggaccggaaattacatatgaaagatgctttagaaacctgtattaattcagtgctagaaaaatattttatttctgaagcatcatctcagaacttattggagtcacgttgccaaataacatttcttcttgaaacattttgtattttgcctataagccattatttttttttctgaaacagtgctgttctttgtcaaaatcacagccatataatttacatcacaattaataggaaatcagtgaatgaaaaaagcagttgtctttttttcttgtggtttttttgtaagtgcttttcctgagaattcccatcctggtgagcactgagtcattactccacccactcaggatgtctgggttaaagtatttctccaaaccttttccataccgtgtcgctttcatcggtgactcagcctttcactgtgcctctgcttctaggtgttcaacatagatattctctttgcatttggtttcgtaaagaaactataaccaagaaaccaaaggaaaatgctacaggtctgcaaggatcttgatgtgagccccagagaactgcagagatctagaaacttccaaagcaatcctggggatatggagttaggaatcctgtagaagtgtggcttttagattagaaaaaaacttaacgaggagaattggtttgaggtcttgctcaagaatttcgagggctcttcgggtcaagtcaacattgtcagtgctcgattcctgtgttcagatctgctttctggggaagccactttactgatgacttggtaaaggagaatctgtagcctgttgctcaaagagactcttgggagaccggagctctttggttgctccctggtcttcttaactttatcatgccacgagaccaccttgagcatttttatcatcggcttccagcacctctgccaatcaatgctttatcaaactttttattaaaagcaccattggtgttttgagttttgggaactatgtctcccagcagagagtgcttgctatccttatgcctgagctaaaagaagatctgaacccacctcagaggatttctaacctataatacttaacctatcttcatttctttttacatctcttatagttgtgtgtgtgtgtataccgctttgaatacatggtggtcaaagaccaatttatgagagtttagttctcaccttctaccaatgggaagccaggaaccaaattcatgaattcaagcttggcaccaagtatctctgtctgctgagctatcttgccggcttttgcatttattgaaagtgttaacatttaaccaggtggtagtggtacacacctttaatcccagtacttggaaggaagaggcaaatgactttctgtgagtttgagaaccagtttggtctacagagaaagtcttaggacacccagggctacataaagaaaccctgtctcaaaaaagggggtggggaggtgggtattaacatcaagagaaatgccttgcacttatcacacacacacacacacacacacacacacacacacacacacacacacacacaagccaagcatgagagtgtatgcctagtgcatgcctataatcccagctaggagaataactttatttgggaacattcttgatgccctatatgaagtgggttcaaaccccaaacaactatgaaaaatggaaaaaaagctcatcctgtgtggcataattgaaaaggataatggtgaattttctaaagcaactctcgagtcgagtgagggtaacaactaaagcaagcatgagcaaggacagctcttcatcctgcctccgttgtatctcaacatacacactcagcctttgttcttctgtccctgggtagctctgtattccaccacccaactccttcgctggcatagatggctgggtccagatttatgctttgctatggtcctaggtgagccccagcaacctagggaacctagcctttccagtgctcagaaagcaaagcttacttagcacttcccacgggagctgctgcttccccatctgcttttatcctctggtctctagaaagtcgtttaccctcaacttctaaatgtggcagaactcattcagcatacctcctcagtgggatgctccttgttttatgctgtttatctcaagccagccaaacacaaaggaacgtacacagggacagaagaggctaggataggcaatgcatgcattgacacgagatgacggagtttacctccctcggtacagccatgaaatataaagcacattttctgtttaagccatttcctgttttcatattgttagacatttaagagcctctctttctaattaattttacactgcatcattttgagaacaactcaattcatactaaaaattaactatttgcttgattacattttctttccaattttgggatggtaccaccagtgctttccctgcccccttctcttttttgccctacctctgaataggagccctctgtgtctattttctaataaacgctggcagcttcttcagcctagaaaatacgaacatcaacccttcttgttttttcttcctccatctgagaattgcctccaaggagaagttgctccctccctctcaggttctttctctccattctttctactctcctaagtaggacaatttaatttgtcaaaagtaaccaccgtgatttcgaaagttcagctcctatttggactagagttacggagccagaattcataatacgaggagctgtcattctgctggtctgtgtgtgcattaactattaatggagaaatatttaaaaacccacttgcaaaggaaaagccccattttttttccatttctgcagatcaaaggtgacattattcttgggctcgaggaagctctgtcacctcctcccatcctacacactttatagactgagtgatctggaaatctgtcatggatgggagagctggactctgctgcggctcctctcccagcagtcaccgctgtcttcacggtcctttaaaggcgcaccctctctggaccacctgacctccaccagttttatactgcctacaaagcacagaccacagagctcaccataatcctgtgttgatgtattaaccaaaggaagtgctagtctcagcactcgggtgcagtggttggagtctggtgattattattataactgaacaatagttactttcagatgacatgaataggtgtatgtcttgagagagtcccttagctatgccgcaacaatattagctcataggatttccaaggagctaaaagtaactctgccagcttgaaagcaatctcaaaacttacccatcaagactttcataccaggaaatttacagtggatttttttatatttaatttttaaattttattattttgtttattatttatatatttaccatatagttgtacattttaaggaaacaatacaagttttctgtatctttctccattagtgtctgatcctaatgtcctgtttgttaaaatgaacaatttgttttgcctaatagttactgaatgtattgattaattcttatatttatgaattttggattgttaagaatcttcatgaaaatactttctatatatatacatacaaacatatatatgtatacatacaaacatatatatgtatacatacaaacatatatatttatacatacaaacatatatgtatatatacatacaaacatgtatatgtatacatacaaacatatatatgttatacatatatatgtatacatatattatgtgtatatatgtatacatatattatatgtatatatgtatatatacatgtatacatacaaacatatatatatatacatacaaacatatatatgtatacataaaaaatatatatatatatgtgtgtgtgtgtgtgtgtgtgtatgagatgcagtagcacctccacagagtgctatgagggaagaaggttttaaagtaaaaatacaaaccagaactagggaaaatatgcataggccagcggcttgttctgtgagaagagtaagtatggctgacaagagctgcatagcctgtagcatccctctcagctaaaaaaatagaagtttgagtttcctggtagcaaaagcaaaaaaggaaatatgttcacttatacagtatgcgttttgtatgaaaaagccataatagtgcctttgaagaagctaaggccattggatatatatatatatatatatatatatatatatatatatatatatcatgtctacgaatatttattaagtagttcttttgtacaagtaaaatggcaaatacagtatttgtaacatctgaactaatttacagttcaatgacttagtcgctaagtaaatgttagagacttggagcacagacctcgccaagagactcctgttgatgaaagttaaccaagcaaacagaggcaacaggggtgaattaaagtactagacaaataaacatggttgaaatgctaagtaaaaacgacctggcaaggagagagtgaggcttagaagcaatgacggggaagggtgcacttggaggagctcaggaaaacaccatgtagaaaagtcgggtaggtgtgtaaaaagctttgcaactttaaatgtgtgtgaagtacgattatatattccaaggaataagaaatacagagtaaaagaagataaatgggacatacttggcttgttatcttacgacagctgatgccaaagtgatgttgtcattgctatgaactgatcatagaaaacagattaatcacgctatgcctatattttataaactcacgaatatcaaccccctggaatagattcctttcattttgctttggatggagctgttgtaaataatttcagatgttccttgatcctctcatggctaaactcgagttcctacaactggattgtatatctgcctcatggttcaggctgtgttgattgggcttagaattaaagaatatctactgaatatatattatttttatatgttggtttatagactagaaatgtgaattgaaatttgaattctgataattgggcattatatttggatttcagtaccaaattttacatttcaatattgattgtaccaaatgaaacaaattagcaatcattcaaacagttagggaaaatgacaccacacacacacacacacacacacacacacacatacacacacacttcttgacaatttttttttacctcattcttagttgattaattggatagcctaattgtatgttacatttaaaactccattaagaaaagaaaagtatgcttaaaatcattataatatttcaaataacattatctggtcatttttaaagtgacaagaactgaataaaatccacccatctccactactatctagaaatgaacttgcttcatttttattaaagttcaaaaagcccttagattaactgtcacattaatttgggcattgatgaatcactgtttgatatggatactcagatttatatttttctctttttaatttgagagagggcaaaactcttcatggaatgtttaggggaaaggccgatgggatgttcccaaacaacctatgaaaaatagttcctgctggagcttgtaagttctatttgattcaccttttttttttaaaggggagggaaagaagaaagattttagagactaggatgctaggaaacagttggctctgtacagaggtcgaggaagggaagccctgccaagagtctccaagagtctcctgtggtgctgctgtccggaaggtgcgctggctctggggctggccctgtggcattgtggcgctgttctctctctggctggccggctctggcctagagtggatcaaacaagctgtggggggaaagtttccctcatttgcatcacttctagacagccctgtcttactctttgctgacaggaaatcactgtctttgtcaccttttctcagggccctccttttggcagagatgggccatgtgaccacgtttaatcacaacagcagggctggctggaggctctgacaggttttcctccgcacttcaataaatggggtggaggagtcaggaggaaatgactacattaattttatagtgaaaaagataattaacacttgaaggcctgatgctctaacgctagaacctatggggttactattcaaaacaaagtaaatttatcaaaaacttgtgaaaactatcttattattatttattttaatcttgaatggtgagatctgggcacgttagagggaaaaggagcaggcaggagagagggagtgattgcatgtgaggaagagagaggagtgggggaaaaagaagaggaaatcctagcaggcattagctctgtttgcaaaagcaacttaactgggctaaagctccgccattccggggctggaggcgggagcgtgtaaagtgccgcctcgatgatatgaatagacacgggcaaacaaaagcagcagtgtgctcctagaaaactctgcttaaaggagtttccctggcaacagaaatgccgttccaaaagtagacagaactttcctcagaaaacatactattaataacaaccttccggaacaacttggaacaatttgacgacttggcaataatgctgccaagcgtcgagcaaattaatctcacacatagagtttatatttctcttgtctgtggttctgctggggcccgcctagacctctgcttttcagtggctcaggggtgaaaagtatttctcagtgctgccatggaaaaaggaaactaaagagacctcagtgtccaacatcactggccaacggttgtgttcagccttgggaacctaccaagagattttagtttgaggagatgagtgtattccagtgagaactgctacaggaaatcacacactttaatcgccctcttgaatatctctttccaatagagatgcttcctggaaaaagacttactaagggttaacagccttagtctgcctctcacgtgaagcacctctgaggccatagactatataaacgtaatatataaatgtaatgccaaatataggctgactgttactttttaaagaaccattatttcttgtcagctcagaatggactcatcttgggtctacttagccaaagggaatcatttgaattctcctaaaggctgcttgccagctgagagtcgaatgctcccctcctccgacctttctcgaatccttggatgtaaaggttaaaagtaatcaatatctcattgtgctgcttggtttcagggtaataagtaataaccatcatgttaaatccaaatgatcccagattgcacctaaatgagctgacccgttagagaggtggcgttaattgcaatcaggataaccaggagagtttgctaataaaagtttgatttaattgtaaaaggaacaaaacaaaacaaaataaaacaaaatttaatctttaactttttgaaaacttttacttaattaaatagaaatgcattatctgcttctatgttaatctgagagctttggctccgtgcccagtgtttgtaaatttccttccgatttctataaaagtccttacaagaaagggcactgacttctttgtgtcccaatactaaatgaagcatatgaattttattatttatttatttatttatttatttatttatttatttatttattttgagacagggtttctctgtgtagcctgggctgtcctggaactcactctgtagaccaggctgtcctcgaactcagaaattcgcctgcctctgcttcccaagtgctgggattaaaggagtgtgccaccacgcccggcatgaattttagataaatggaaatatcatctaccaatttttttagcatcatctagttttaaactacttatatctttacagcttatattcattctattttgactaatgaaaattagtctaaataatttagagctagaaaattatatgatgtgtgattaaactttatagactgctatgagtttgggcttgctattttgttaaaaattagtaaagtgccaaagcttaaatacgaaaatcaagtattctcattgacaaaggaatagtgatctgcaaatgataagaattaggtttaatgctccatgtaattatatcaggaagggattgtctataaccttaatagaaagtgttgcattagacatatattccgttcaatataaacacttgtctttattatgattctatgaactgtaaggtaggaaccaaatctatgggaggggcagtattttagttatttcaaaagaagttggagaatttgtttagaataggtggtcagccctgggaacctgtctgaatctcagagctgtcagtcatgaacttgctaccctggttccatttgtctaactgtacaaggaagagagtttgtaggttgtgatatgcaagacatgtcatcttggagcactaggagtgctcctgctctactactccattcccaagtgcccatattccttccctcttagcccgcagtcccatgtctttgggaatgaaaaaacgaactctgctagatgctgatattttggtgtgggatataatattgaatgaaatgctgaccttaaaaatctagtttaagtggggactgtgtagtagttgctctgttaatagagtgtctagtgtgcatgaagctccaactaactgggcatagtaatcccaaccttgacagaatagaggcaagaggtcaaaagttcaaggtcatcctaggctacacagtgagattaagtccatacccttgggctacatgaggctctgtctcaaaaacaaaatgtcctttagttgggagggccttagaaaatgaagtgaatattgaaaggtcaacagaagctatcaggaagatgggtcaagtgtggatttctattttatcacacgataaaaagggactgtgttcacaggattgcatgtgtgcttgagtatattcatataccatgaaacaggagtaagagctgaggatctatgagcctgtgaggggccattcacatccacaccatagcaatcttcaaagaaaacatggtgggtctgagctggcctttcattcatcagaagccctacattttctaaggtgtctttgcactccagcaaagttctatattcggtcagattctaagggaaaaaaaaaaaagctaaatttgaaaatgtttatctgtttgggagatccactaaaggcaggaagatgcaacctttgtaaatccggttttcaccaaagaaagttccctagtacaccctaggaataccatttgtgggaaaaccaccttctagtgctgtcaaggaagcagttttagttctcagaaataggggcatttctcagcaactcttttaataatgtgggctttttaaaaagcgcatacattcttaaatgtgtatgaacttgggtgccgctgtgtccctaatgaggtaggtgcactgggttaggataagaaagcagtgccagttacacggctgattcagttgtgactttcccaagacacaacacacacacacacacacacacacacacacatctacatatgtgtatgtgtacatatttgtttttctgaaagaaacacccaccaagtttatagcctattgctttcaggtttatttcagttttattgctaaacgtccttatacagagctaggacgtttctctgagagagtatctctccatcctgagattcatctgaacacactactcagctgccttccctagttgattccatatgtctgtagatatttgcataaaaaatttatgattgtgatattcctcttgtcatgttatccattaaaacctgagaagctcgtggcagaagtatgcacagaaatgcatttatgcacacacatttacatatgggcacacacgtggatgaggtattaatttgtttaattaaaaaagtctttcatcagaattgaatttagatgaaaccagagtccttagactcaagacatttaaagcatgcatatataaataaaaacacaaaattccttcatatatgccaagttttcagccaggaggacatttctgggttataaatcttagcacattggattttactgccttttttttttttttacaacagagcaatgccttttaatactcaaaactgcatcccaagaaaccttccttccaaacaccacaccgagttctttgttatgaattaaatacatactctaagcaatgctggtagatttaggcttggtggataaagaatggacaattcgtggcaggtgagatgcccatgggttgtgggggtgatggtccctgcttgtcaagcctgaagacctgagtttgatccctaagacctatgtggtagaaggagaaaactgatctacactctgacacacaccttggcacatgcatttgtgcatatccacaataaataactataataaaacttctaaaagaattaatgattacattttttgttaaaattttatgtgccaaaagggcagacttcatgtctgtggtgtgtatggcttgtctccagtatatggcaatatgtctggggcatttagaaacaataattatacttccaaaatatttccagcaacatttattcaattgttaaactctgttaattaaaagtatgctattatttcatgactttatcaagtaagtcattgagtataaaatttcgtgttttttaaatattaaatataaaaccaaaatctttatcctggaaaactaaaaacaggaaagacagttgttaataataatcatcactgtgctgtcaattgaccaaattactatcaggagaaaagaagaaaagagggagaagaaaggaaaagacaccattataattgagttgtaaatagcacctccatgtaaaactgataacataaatgtggaggcaatctctaatctctcagccaatagcattcagatagaacgttcattattaatattaactaagggaatatttttaaatgctgactatagatttagacttggtagctcaaatttaagaatgaacagtagagaatagagaggtggattaatagggagaggcactttgtgctgaacctgatttatatatatatataaatatgtatatatatatgtgtgtgtgtgtgtgtgtgtgtttgtgtatacatacacacatgtatatatacacatatgtgtatgtatatatgtatatatgtgtgtgttgaacttgattttatctatctatctatctatctatctatctatctatctatctaatgacatgcactgtgcaaatttgagtataaaagtcaacagtatatgcaggtgagaacatggttagcaattagagatgtttggcacatacatcagcaagttttgcttttggaactatggtaacatgagagcttacccattttcattttcctaattatttttaatgtaaaaatgaatggattttattagaacattttcaaatacacaaatcattgtactttgctcatattaataacccccccattgccatcagttgtcattcctgtaagacctaggagagttatttacgtagtacacatcatagaaaattagaattgcaggctggagaaagacttagtggataaagttggttgatgacctaagtctgaggcccagagtcaacatcgtggaagaagggggaccgactcctataggttgtcctctgtgcttcacttgtgcatcatggcacacatatgcctatctataaataaatacatctaggaaaaaaagggggatttggcttcacttgagataagtattttcaaagattgtggtcaataagaaggtaagacaaagaatgaagaacatggatgggcgtagtctactctttaatcctgaggtcaatcctttttagaagctgcttccaggtaaacttgactattacatctctcttccatcgttctagaggctgacacatcggttttattttagggtttctccaatattttcattttaaataacatttacgcttttcataatttataaaatgccaattattatcatacgtggtattttatatattccacctagcaattaattgtgaattttttttgaagaatgaaagtatttaattttactgaggtgccctaaggaaaccctgaggtctcaattatgttccttggcacctttaaaagataatagcttcaaaacacaacagagttctgtctgtgactctggtagaaacactgaggtagaactagactggccatgcttctgttctcaatggcctactgccttcttcccaagtgcctattccttctcattattaataccaaagatatttatttatagattaaatgtgtagtgtacagaaattcacattaaagaaaaaattaatcccacagcaaggtagaaatattaatgtaagaacatttttcatctgaagggtggggtatccttttttatttactggtatggaagactacaggacaagcttatgattgagtgatttaattttgtcattttcctaatttgaataggttgcatataatcttgatgctatcaaagaagaagaatatgtaaacacaaaattgtgaccaaggtagaataaataattactattagttgtgttgtagaggtatcaatttgggcttatgcagttatgaaaaggctaaactatccatcattgagaattagaatttggttggtagttgtgatgaacttgtattttactcttatttatgtccaccttgagctccactagggcttactatcttctcactgtgttcttacttcctgttcctgagctgggacacactgagacctgaaaacttgcaggaagaatgttgctgtccatatgatttgcttcctcctcctcctcctcctcctcctcctcctcctccctctccnnnnnnnnnnnnnnnnnnnnctcccctcccccttcccctccccctcctccttttcttcctccttcttttcactctcatctgcctgatggatgcctaagacccgttccgtgagatgttggttgtcttatgaaccacaggggaataatctttatattcattgaacctggcagaaataaatctctacgactgagctaattggaatattttctatgacatggaagtgcagcagaagatctccagttcagctagcatttcataatccatgttttgataatacttccacaagtttccattcttcccagtttgtattagaaaaagaattaaaatacaaaaccaccactgggagccttttctgtttaaaaataacaacaagagtagggctgctagggtcagtgccacaaatcccaggtatcacccaactagagcactgagtttagcctttaaaacactttaacagaagtaaatcattcctcgcccactgcccacgctgccgctcagatctgtgtcctgcaagggtggacgttcccagggttgagtaagttcgctcagcaacactctcccacttgaatcatcatgcaatcgctgtttcctcccaaatattacaaagttaactcttagggggtttgtacagctattcagttctatggagggtgaggagtttagtagaactttatggactaaaagcgacctcaaaggcatctttatttcatttcttcccttcgaggattttaaaaaattcatttcagataagaggaaatttatccttaagatctttccagaaggaattctacaacctcccattaaaatgtttaacaactttctctatcctggaagtcttcttatatccagtgtaaacgccttctgttgttaggtttaattgtcaaatcaaccagaacctatgctctataattaaatatcttcacgctcttctatgtagtcacattttcccaagtttttgcagttttcttctcacactagcaaaaccatatttttagatcatttatttcagttttgtctacactccatccaactaagactactcccatgctcttttctaagagaaaacacgccaacgccagcagagagattactggcatagtcatatatgtgatgatcatagcaagctccatggattttacaatcggcattttcagctctttcattggcagctaacaaagggcttcatgagcaggatgggacatgtcaagggatggttttacatatagtgagcaccggaaaatgagagctcctgtctctagctgcatatgtagcagaagatggcctagtcggccatcactgggtagagaggccccttggtcttgcaaactttatgtgcctcagtacaggggaacaccagggccaagctgtgggagtgggtgggtaggggagtggtggggagggtatgggggacttttgggatagcatgtgaaatgtaaatgaagaaaatacctaattaaaaaatgtaaaaaaaaaattttaaattgatatttcataaaaaaagtgctgcatatgacctatcaatgtttgaagaaagggctgatgaagcattgtgctgcaaaagaaaaccccataaagctcttgttttctacagagagctggtgtatattgggcattatatggttggtttagagcagtggttctcaccctccctgtgctggtttgagtaaaactggactccgtagcactatagaaagtggcactattaggagctgtgatcttgttggagtgcccgtggccttctgggaggaagtgagtatcagtcttttcctgctacatgccaatccagatgcagaactctcagctccttcagccccacatctgcctgtgtgttgccatgcttcctgccatcacaataatggactaaacctctgaacttgtcagctcccattaaatggtcttgtaaactttatgccccagtacaggggaacgccagggccaagaagtaggagagggtgagtaggggagcagggcaaggggaaaagtataggggactttctttgggatagcatttgaaatgtaagtgaagaaaatatctaataaaaaattgaaaactaagaaatacaaaaaaaagttttcctttatgagaaaaaaaagaaaatgaatttaaaaacaaaatgaatgcaacataaaaatgggccctcaagcaatcctctttccatgtggggacagagacatgtcttcttgctgctgatatataatctattatttatgaaggggtgaggcatcatggcttggccccagttcccacctagaacatacacagtatgtcagtttctttggtttattgtcatatatatggctatttttaatacattatttctgcctctttctcaagcttggttacgcctagtattctaaaaactattgatgtaaagttttaagtataaaagaagctatgaaagaagaaatggcaagaggcagtattttaagggaacatgaggtggaaagacaggagtactttcgcccactaagaaaaaaaaaacgcagtctgcaacagaaacggaaaaggggtcaaagcaagtgtattccattctgtctccgaggcaaaggtgaggctgtgcaaagcatttccaagttagaaagagcttcttatattttaaaccattggaagcaccagattgtaggcttaggccctagggatgatgatcctcaccttgaatggttcttgttaaagttcaatcaaacactgtatcgtctgcaacagaaatctgccagtagatttgacctctcatttttaaataaagctttattgggacccagccttatgcatcgtttgtgtagctgtggctctttatacagtaaaggagcagagctcagtacattgagcattgatcacacagctgacatccctaaaccatttataatttaacaccatgggaaccatgtgttaatccctattgtaaacaataataattacaactgcgctttatgaatatactgtgttcctcaggtttgaatgatttctcagttcaattttctgtttgttatactgaacgtcacctctttaccttcagtcagtgtttaaggttctaatcatctttttacaaagaacccaaatttttcttgcttttccgtgcaccgctaaacagttagttggctcatttcgccaccaggtggcctcctatgctctgttgtgcttggaggacctaaagaaagtgagaaaatggctctttcagctctttgaactttagtcattcattgtctctagtacttcacagacagcttggctgctctgtgactccttgcattccatgtttggcccaagaacataagtaaaatcataccaactgccttaggaaactaattctacttcagagacgaaaatagttgagacagtaaataataaaaataataaaaagattgcagtgtgtgtgagtgcgtgtgtgtgtgtgtgtgtgtgtgtgtgtgtgtgtgtgtgtgtgagagagagagagagagagagagagagagagagagagagagagatgcccccacagtggagtcctaatgcagatgacctgttttgtttgttttggttttaatcaccttaccttgcctcagccccactcatattgcacacaggagtagttgatagaagcttcctcaagagaagagaagactcgctcagactcagatctccatgtgtaactctcttttgaagagaatctatatgcctcatcttagggctctagtctagtttttaatcttatagagacagactcttgtgagtctttggtttacatcactaaagacactattaaagaaatcacacgatcaagtcccgaaaaagtaagccagagatcattatgcattgaccaatttttattattgttatttcatttgtttgtatgtgtgtgttgtgtgtatgtatgtaggtaggtatgtatgtgtatgtttgtttgtatatgtgtatgtaggtatgtatgtaatgtgtgtgtgtgtgtaggcacatgcatgccatgcagctcatgtgtagctcagaggccagtgtgtatgagaggccatcaggatcagccatggtgtttcctctcctggctctctcttctcgggtctcatttttctcattgtgaaatgaggagggcttggactaagctgctctagtgtgggttccagctttgccattctctctggtgtagaactacaaacgagtgtttcaacgcttgacttgggtcagttctgtgacatcttacttcccaccttaatcttcttgccttttctgtttagcaatgcctactaactgctcctctgtgtctcacaacatctaaagatatagttgttacacctttgaaaaatgtcccatcatttgagcaaattgttttcccttctgtttgcattgtattattggtttagacctgagttattacattggctctcagaacaggacagctaaatgcacttagttttctatgaatgtccaagtttgctttttgttgctgtcaattagttttctatgaatgtccaagtttgctttctgttgctgtaacaaaaaccatgaccaaaagcaacctggggaggaaagcttcaattccagcttacaggttggtctgtcacggaaggaagttaaggcaggagctagaagcagaagccatagacgaactcagcttactggctccctgagtggactttctttcacaggccaggcccacctgcctagggaaggcaccatccatagtggaccaggtgactttacatgcatagcatcgaagaaaatgccctacaaacatgcccatagacctgtctgatggagccaattccttaataagtgttcccttttcccaggtgagtctaactgacaaccaaaattagccatcactttgagggaaagacctacagggccctaaggacattgggtaaagatctagctcagatgtgggatcaaaaatgttgatttcactcaacagtgatttgttgaggttaggttaggtaaagggagagagtaatggggtattatgggaaaagatgcagagccacacttaggcagaaggaatactttttaaatgttcagaatactctaatgtataaaggcagaagtagatacggcacacagagagaactggggtgtgactgctagctgttatagtgagttctgaatttatacagtgaggcctgcacaactccatgtacgaagtgaaaactgccatgctgtgcaccttcagtgttaagttctattagatattaattatatctcaataaagctgaataaaagcagactataactgaatcaaagcacttcagatgacctagtgacaggcaatcattctacccccagattcccaattgcagagtcttctctggaggactgtgtggctggacacaaatgggctgggcttagaggctgatcacaagttgggttttttttttttaatttgcaaactgctttaattaatatcaaacctggttaataatttaggaattttccatcactttctgtttgccaaaaatacaaagatacatcttaccttagttcatactttttaaccctatgttttgaaagttgtgttaggtcctaatacaaatattaagaattaactggaagtaggaagctggctcagtcagggtctgggttcgagtatcctgaaccaatgggaagcaaactcaacatgaatctgtaatcccagcactcctagagccagctaggagctggaaagaagagtgtccctgaagctggggacaagctatctggtatattcagtgacaaataacaaaagactttacctcagaaaagatggaaaggaccaatactttaggttgtccttgaatttccatcacatacactatggcatacacccacattcacatatataagcgtggacacacacacacatgtatgcacatgtgcacaccatgtatacatggtatacacagataaaataaaaagaatataaagcatgctatgtattgtgatttgctatagaggacccaatacttttaaaggccatcccgagctagtgagtaagtgaaggtacttgccaccaagcctgcaaccaaaatgatggaaggagagaagtgactactgccagttgtcctctgactctcaaacgcaagccttggtgcacatgcgctcacaaataagtaaatgcaatttttaaaaatgcaaaggccatccttccctttaagtaatttataatctactttcttgagaaaagtaaaagcaaacagcaggatataccagcagacagcaaatccatgtgcattcagaacatacgtgagctttctcatagtctatttaagaaatagtagtggaactggcatttgctggggagaaaaatgaaataagggaacagatgtagatcctctgagaaaaacaacaacaacaaacccttagctctgaacattctcttgacatgattctacaacttcacccaaaccaggaaatcaccctagagaggagtagagagcccacaatgcctcacaataggtttatccagtgcgttcaatggacgttattaacaggcaatgtcttttgtctttctactgataatgcagtgttctacttttggaagagaagtcatgtatacaagtatataaactgtcactaggaacatataaataggtgagaacaggagcgcacaggcacgcaagctggcacgcaacatttggatcaagtttgcacaaacacttggatagtgcttattacatagcaggccttagatcttacacgttagttcatccaaagtcatagcagctttatggagtattaacattattcttgggcagagaatgaagacccaaagaagtgctaagctgactatttgtttttagggtctgtgaagttcctagcactggataatatcaccatgtcccctcttcccttcctaagaggagagaaaatacttataccttaccttgtagattctgcaagaaaggaattgaatgtgtatgcaatatttactttttcaatgatttttttttttaagcctacagcacctggtattcccaagtggtctcccatccaagtactaaccaggcccgaccctacttagcttccaagatcagacaagattaggtgcattcagggtggtatggccatagactcaatgattcttctttgatgtgtcttattttattgtctaatgaggccagagaagaattataatatattatttctcagatagaaaggggagggggatttgcagtcttgtgtgcaaatatataataggccaagaccaaaaaaaaaacttattagaaaattcatggtgttaaaaattgaagaaattctttgaatgatgcagtttatatagattgtggaattctcacaaacgtggtccgattgcatcttcaaatgtgagtggctaaaaagggcaagcctgtcatctttgttttgctggtggtgaagccatgaaaaaacgaaatgacttcccttggattctacagcatggcatcatccataggacgaagacaggaagatggtcccagggcagatggcactcagcaagatgtgctaactctcagtgatgcacagagacagtcctccacaccacagctttagaccccatctcttctttagaactcagccattgttgtggcaacatcctgcttgaaatatccacatcccacacttccctttcttagacttcttgtctcctctcagtgagtgcttagcctttctcggccatcacactctcttctgctgtgtgactatttctgggactttattcacggaagacctctccagctatactctccctttcctacttgctactttctctccctctaactggcttttttattttgttctgtgaacctttaacatttcctctttattttattactctgcctcttgtggttgagactcatacatataagtgcttgtacacgtgtccctgcccctctctttgtctctgtctctgtctctctgtctgtctcagtctcagtctcagtctctgtctctctccatgtctctgtctctctccatgtctctgtctctctccatgtctctgtctctctccatgtctctgtctctctctgtctctccaatataacaattttaatgaacttccttggtcacttatggtagattcctctctagtagtggggtcttggtgtgtgcatcaaagtatttaccagttattatgaccaagatttgcatcttggagtcttagtttatgccaagaaatgtctactgtaacccagagcgtctttaaactcggaactgtcattctcctgagtgacaggcatggctatcactgagaactcttctatctgaccttttagcctccacctcacactatttaaaatatatgatttttggaggacaagcaacatggaaatgagaaccatcaaggaacacagggtggcttcctcagtgtattttggctacttcaaagtctctttgaatggcattcttgaccttgtttgcatttaactcctaggacccaccattttcctcagacttctgggctgagtctaaagaagcatttttagagagcaatactccagccttgcatgctaagccacaatgctttctgttgctgggcttcagcacgacctgggcgagcagcttagcattgactctttcttttttttctttttttcttttgccatttaggtttccattttttttaaatattttttattaggtattttcctcatttacatttccaatgctatcccaaaagaagtaccccatacccccccctactcccctatccacccactcccacttcttggccctggtgttcccctgtactgaggcatataaagtttgcacgaccaatgggcctctctttccactgatggccaactaggccatcttttgatacatatgcagctagagtcaagagttccggggggctggttagttcatattgttgttccacctataggattgcagatacctttagctccttgggtactttctctagctcctcaattgggggccctgtgatctatccaatagctgactatgagcatccacttctgtgtttgctaggccccggcatagtctcacaagagacagctatatcagggtcctttcagcaaaatcttgttagtgtatgcaatggtgtcagcgtttagaggctgattataggatggatccctagatatggcagtctctagatggtccatcctttcgtctcagctccaaactttgtcactgtaactccttccatgggtgttttgttcccaattctaagaagggacaaagtgtccacacttttgtcttcgctcttcttgagtttcatgtgtttcgcaaattgtatcttatattttgggtattctaagtttctggtctaatatccacttataagtgaatacatatcctttgagttcttttgtggttgggttacctcactcaagatgatgctctccaggtccatccatttgcctaggattttcataaattcattcttttttatagctgaatagtactcaactgtgtaaatgaaccacattttttgtatccattcctctgttgaggggcatctgggttctttccagcttctggatattataaataaagctgctatgaacatagtggagcatgtgtctttcttaccagttggaacatcttctggatatatgcccaggagaggtattgcgggatcctctaatagtactatgtccaattttctgaggaactgccagactgatttccagagtggttgtacaagcttgcaatcccaccaacaatggaggagtgttcctctttctccacatcctcgccagcatctgctgtcacctgaattctttgatcttagccattctgactgatatgagatggaatctcagggttgttttgatttgcatttccatgatgatgaaggatgctgaacattttttcaggtgcttctcagccattgggtattcctcaggtgagaattctttgtttacctctgagccccatttttaatggggttatttgattttctggagtccacattcttgagttctttatatatattggatattagttcactatatgatttaggataggtaaagaacaataggtaaggatctcaatctgttggtgacctttttgtcttattgacggtgtcttttgccttacagaagctttacagttttatgaggtaccatttgtcaattctcaatcttacaacacaagccattgatgttctattcaggaatttttcccctgtgcccatatctttgaggcttttccccactttctcctctataagtttcagtgtctctggttttatgtagagttccttgatccacttagatttgaccttagtacaaggagatgggaattgatcaattcccattcttctacatgataaccaccagttgtgccagcatcatttgttgaaaatgctgtctttttccactggatgatttttgctcccttgtcaaagatcaagtgaccataggtgtgtgggttcatttctgggtcttcaattctattccattggtctacttgtctgtcactataccagtaccatgcagtttttatcacaactgctctgtagtacagctttaggtcaggcatggtgattccaccagaggttcttttatccttgagaagagtttttgctatcctaggttttttgttattccagatgaatttgcagattgctctttctaattcgttgaagaattgagttggaattttgatagggattgcattgaatctgtagattgcttttggcaagacagccatttttactatattgatcctgccaatccatgagcatgggagatctttccatcttctgagatcttctttaatttctttcttcagagacttgaaatttttatcatacagatctttcacttccttagttagagtcactccaaggtactttatattatttgtgactattgagaagggtgttgtttccctaatttatttctcagcctgtttattctttgtgtagagagaggccattgacttgtttgagttaatcttatatccagctacttcaccgaagctgtttatcaggtttagagttctctggtggaatttttagggtcacttatatatactatcgtatcagctgcaaaatgtgatattttgacttcttcctttccaatttgtatccccttgatctccttttgttgtcaaattgctctggctaggacttcaagtacaatgttgaataggtagggagaaagtgggcagccttgtctagtccctgattttagtgggattgcttccagcttctcaccatttactttgaagttggctacttgtttgctgtagattgcttttatcatgtttaggtatgggccttgaattcctgatctttccaagacttttatcatgattgggtgttggattttgtcaaatgctttctctgcatcaaaggagatgatcatgtggtttttgtctttgagtttgtttatataatggattacattgatggatttccatatattaaaccatccctgcatccctggaatgaaacctacttggtcagaatgaatgattgttttaatgtgttcttgaattcggttagtgaaaattttattgagtatttttgtatcaatattcataagggaaattggtctgaagttctctgtctttgttggatctttctgtggtttaggtatcagagtaattgtggcttcatagaatgagttgggtagagtaccttctacttctattttgtggaatagtttgtgcagaactggaattggatcttctttgaaggtctgatagaactctacactaaacccatctggtcctgggctttttttgtttggaagactactaatgactgcttctatttctttagggaatatgggactgtttagatcgttaacttgatcctgatttaactttggtacttggtaaatgtctaaaaatttgttcatttcatccaggttttccagttttgttgagtatagccttttgtagaaggatcttatggtgtttttgatttcttcaggaactgttattatgtctcccttttcatttctgattttgttaattaggaagctgtccctgtgccctctagtgagtctgactaagggtttatttatcttgttgattttctcaaagaaccagctccttgtttggttgattctttgaatagttcttcttgtttccacttggttgattttgcccctgagtttgattatttcctgttgtctactcctcttgggcgaatatgcttcctttttttgtagagcttttaggtgtgttgtcaagctgctagtatgtgctgtctctagtttctttttggaggcactcagagctatgagtttccctcttaaaaatgctttcattgtgtcccataagtttgggtatgttgtggcttcattttcattaaactctaaaaagtctttaatttctttctttattccttccttgaccaaggtacattgagaagagtgttgttcagtttccacgtgaatgttggctttccattatttatgttgtcattgaagatcagccttagtccgtgttgatctggtaggatgcatgggacaatttcaatatttttgtatctgttgaggactgttttgtgaccaattatatggtcaattttggagaagataccatgaggtgctgagaagaaggtatatccttttgttttaggataaaatgttctgtagatatctgttaaatccatttgtttcataacttctgttagtttcactgtgtccctgtttagtttctgtttccacgatttgtccattgatgaaagtgaggtgttgaagtctcccattattattgtgtgaggtgcaatgtgtgctttgagctttactaaagtttctttaatgaatgtggctgcccttgcatttgcagcatagatattcagaattgagagttcttcttggaggattttacctttgatgagtatgaagtgtccctccttgtcttttttgataactttgggttggaagttgattttatccgatattagaatggctactccaggttgtttcttcagaccatttgattggaaaattgttttcaagcctttcactctgaggtagtgtctgtgtttttccctgagatgggtttcctgtaagcagcaaaatgttgggtcctgtttgtgtagccagtctgttagtctatgtctttttattggggaattgagtccattgatattaagagatattaaggaaaagtaattgttgcttcctattatttttgttgttagagttggcattctgttcttgtggctgtcttccttttggtttgttaaaggattacgttcttgcttattctagggcgtggtttctatccttgtattgatttttttctgttattatcctttgaagggctggattcgtggaaagataatgtgtgaatttggttttgtcgtggaatactttggtttctccacctatggaaattgagagtttggctgggtatagtagcctgggctggcatttgtgttctcttagtgtctgtataacatctgtccaggctcttctggctctcatagtctctggtgaaaagtctggtgtaattctgataggcctgcctttataggttacttgaccttttccccttactgcttttaatattcctatctttatttagtgcatttgttgttctgattattaagtgtcgggaggtatttcttttctggtccagtctatttggagttctgtaggcttcttatatgttcatgggcatctctttctttaggtttgggaagttttcatctattattttgttaaaaatatttgctggccctttaagttgaaaatcttcattctcatctactcctattatctgtaggtttggtcttctcattgtgtcctggatttcctggatgttttgagttaggatctttttgcattttgcattgtctttgattgttgtgcagatgttgtctatgcatctgagattctctcttccacctcttgtattccgttgctgatgcgcgcatctatggttccaaattactttcctagggtttctatctccagtgttgcctcactttgggttttcttcattgtgtctacttccctttttaggtctagtatggttttgttcatttccatcacctgtttggatgtgctttcctgtttttctttatggacttctacctgtttggttgtgttttcgtggttttctttaaggacttgtaactctttagcagtgctctcctgtatttctttaagtgagttattaaagtccttcttgatgtcctctaccatcatcctgagatatgcttttaaatccgggactagtttttcaggtgtgttggggtgcttaggactgggtggggtgggagtgctgtgttctgatgatggtgagtggtcttggtttctgttagtaagattcttacatttgccttttgccatctggtaatctctggagttagttgttatagttgtctctggttagagtttgttcctcaggtgattatgttagcctctctcagcagacctgggagactagatctctcctgagttttagttgtcagagtactctctgcaggcaagctctcctcttgcagggaaggtgcccagatatctggtgtttgaacctgcctcctggcagaagttgtgttccactcaccagaggtcctaagatttcgtggagagtcctctggggaccttggggttgtcctcagactctgtgccctaggtgccctggtgctgttcgactctttcttaaaacagtaacattcctactatttcttgtgggctttcctttgggggcacagcagtaataacaatagaacaatgtcctgagatgctaatcaagctttctgaggctagaacagcaaaccagcttcaggttggaaactctaaaatctatgcactgataagcatgagaaagtactcccttcttctccaaaagaaacaagagctggaatgatggaaggatttgaagagaagaactttgaaactgggaattagaactagcctcttgtgtgctggtaaatgttgtcctaagaacacgctgctgtgtaaagggttcccttaagtgtgaataagagatgcctttgccttcctcttttcctacacacttcataggtgctaaccactcctgatcatgggaagcaattaacttcatgtctatctgaaaactgaaaatatttctagattggatgttttaccaagtaaaactcccacaggggggaaattcaaagataaacaagacagtcgtggccttttcctttctgtgcactaattttgcttaacatggatttccacaactgatttaggtctgtctgatctctcttttgggagaaattcagatgaataaatattttccaaccccttccatctaaaccataatgtcaatacttatagtggataaagggtgaataatatatggttcttgtccatttgttgcagaatctatgatctaattcttaaagcacatttatcctcatctgaggtactttttaaaatgtggccccaaggtatcagacattttaccattcaagcattggtccaagaccactcctaacccattatagatctattgagattatgggtgtggccagttaatgaagtacttgctgtgcaaggatacatatatgaatttaatcacagaatccaaattaaaaaaaaaatccaaaagtggttgcccatgcttgtaatcccagaactggagcagcagaggcaggccattccccaaggctcacttgccactcagcctaggcttcttgcaagtttcaggtcaatgagagaaactttctttaaaaacaataacaaataaacaaaacaaacaaaacagaaaagagtgggtggtgctcaaggaatgccattcaaagtttttgtgacctctaaatttacacacacacacacaagcacacaaaagcatatgcacatacatgtgcatctatgcacacatgaacttacatacacaaaattatcgatacgaaaatcctcttgtctttataaaaaagatttatttgtgtgtgtgtgtgtgtgtgtgtgtgtgtgtgtgtgtgtgtgtgtgcatgtgtgccacatatgtgtgggtacctaaaaaggccaggacagggtgtttggtcccttcccagctgaagtcataggcagttgtgaacatcctgccatgggtgctgggaactgaactcgggtcctctgaaagaacagcatgtattattttttattctgtcttctctctctctctctctctctctctctctctctctctctctctctctgtgtgtgtgtgtgtgtgtgtgtgtgtatgtgtgtgtatgtctgtggtgtgctgtgcttgtgcatgggcatgtgtaaccatggctattttggtccaggctggcctcaaaggcaacaggcctgcctctgcctcctgagtgctggaattaaaagtgtgtgtcaccatcacccagctaatttttattttaaacttaggtgtggtggtgctttttctcccagtattgtgaagtcagaggccaacagatctctgtgagcttcaagcccagactgatttacacgatgaattctaggtcactcagggccagtgagactttgcccaatatgtgtgtgtgtgtgtgtgtgtttgtgtgtgtgtgtgtgtgtattcattctttgagaacttattacatgtatctaaagcatcttcaatgcactttacttcactgtattcccccttccaacttcagattctcttcattttctttccttgaatccaattagagctacaagtatgttcctgggcatggggacagtcaaagagagaccacatcactgaaaaaagctgagcccatcccatcagccaacaaagtctagtagctctcagggtcagggccctttaccacctaagctgaaatattgatagacttcatcatgcatacgttttgtgtagtgacaagtgctatgattttatgagcgaatggttgtcgtgttcagaagacactatttcacagaacttgtcgctctgctctggtgcttccagtctgtctgcctcctcttcaatgatgctccttgagattttgggggaagaggttcatatggaagtccttttggaggctgggcttcccactgttacttcatctttgccctttaattagtagagagtctctgggttagcttatatctctgtaataaaaagcatttccagtggaggtgaacactgcattaatctatggttaaatgttttaaagacaatatgatgctatgtccatttagcagaataaccacatttgattcttctctagcgcatatgatctttctagccatgagttactggccaagtttacagtaccggatatgaatttcttcttttggagcagtctttaaattgaatcaggaacctgtcagttatcttcatcacattcaggccactatggcaccaataggcattagatatgaaaacataaaaattgagcattaaaagtcaccatgaaggacatatccattggatggcatttccattttgttttgtggagacatgaccctgaagaaaggtttgtcatgtgttaaggctatcaccacatgacaaattctggatgtggcttctctgtataggagtctttagtccctgggaaaggcctagtgcacgaatcctgaggaaatgaagtttctgtgggttttgtggttactgtttttgtcatgtctatattcatgtgtgttatttaagacagtgtctcattgtgtaactcagctgtcttagaacgtacaaccctgctacctcagccttcttagtgttagaattacaggtttaaagcactacaccaagcttgagaaataaggtggtgaaaatagggtcactggttctagagacttcaaaagtcaccatgttttgtaccaacatctttctgatgaaaatagctacagatttcacattctttctccccccttttttttcccaaagaggaagcaagatattcccttttggggaaactttatcaccaaggttaacctaacaagtacatatttttcccttatgaaattaatttgactttcttggcattatttttgaggtgtacaacatcttggcaactgctttggtttgaaactacgtgattttagaaaagcacgtttcagaatgtttaattcagcgatacaaaagcactaatgaaatatgcatgtatgaattttatatcatattagttccctctttcttaaaatctgaataaaagccaaacatctggattatgtttgaaaagcctgaatttccagtttccagagagatccgatctattttgacattgcgcacttagccttaacatttacagcgtgctattaacattacttgcaattgtagaaaaaaaaatcctgtgatttaaacaaacttggtgcctcctaatgctaaaaatatatctatatttcaactggctgctgctgcacagccatacgcatccacagtttaggcttcatcagcatttccatgataaatacttatactgagcaggcctgtaattctgctataaagatatggggtaagctttgacatatgaattctcctgttgttgtatatgaagacaacaaacagcagttcatctgtcacttagcttgagaaactattcattgacttagtgctttctaacagccccaactattgaaaattcttcatcattacccaaagaagacatgatagccatcattctttgggggctcctttctccaccagtaaccaagagtcagccagcttctgttggctattttgaggatattttgacactcaagcaaagtaagtattaatggtgagaattttggggagtagctaagaaactgattgttgtatctaatttaccgtcaccccatatgtagtagaatctgattggtaaattgagttttagaggagaggacatatacacaagaggtcagtgcagaccatgtaggaatgtggtgtgtttgaagtttgactttagttaagtctaatgtgaggtttagtttatatgtttgttacagtaaagggtaaatttgttcttttaactacatataaaagactgctaaaatctgtaaatttccttctcaattcttcttttgtttggcttaagaaaatgcaatagcactgtactcgattacatgaaaataaatgtgtttagcagtgtcttttggtaaggggttagaaaacaaaagaaactagactctaaaataggaatgtctgggaaaaagaagctgggtttgttctgctaatttctcctcacatttcccatcctgcactgcatcctaacagatagtgcatatctgcacaactattcttactacatgctgacatgccattctaccatttcctatacagtactgcaaaccttaattagaacagttatgacccgcatcctcactgaagtacacacaaaggtggagacagcccagggtgatgtgcagattttcagaaaactatggcatagcctaagacacattgccattgcaccctgtgtgctctcctctctcactctctctctctctctctctctctctctctctctctctctctctctctctgtgtgtgtacaaatgtggtcaacataaaatgtcttactgaaatcagggttagctatataaattctggaggaaaaaaatctctctgatatgtatttatcaagtaaaaggacctgacaggtttcactccgtggttcattagtgtgaattgaagatggctgtagaagttttgacttatttgctttgtctcttgtatctctgtgttctgcccagcttagtttgcagagcttccttttatgcggttcggtatcttctccactgcattcccaggtttgcttgcactacaatcttttaatcctattccaacaagtgacaatttcttagttggtagtttgggtcttggcttttcttctgcacacaatagtgtggttattatggaagatctcatgaatgctggtgaaaagaaattctaaaacagagaaagcctagattccattttcaagccaacattcactcaaccctgcagaatttttcagccagctagacagctctctgcctggagttccggtgacttggaaggtgttctctgccttctctgctgtatggatttaggctttgaacttggagctccaggatacctttcatagaacaggtgaaaccaattattttctatgtaaagttctccaacacccagtctgcaaacaagtctttttttgtttgtttgtttgtttgttttttgccctcagaactaaatactcattgccccttcagtggctttctactctggaagggtcaaatctactcaattcttttagaagtttcctttggtattcaatatggtgtcccagtctcctttgtctcagcccaacaaatagttatttgttggtttgtctctttagcatctctcttttagtgattgctgactcaaattgaaccaagaggcaagtggaacccttgtggcttccgttctgtatgcagtttagtttctatcttctggtgaggctaggcagggaggaagggatgctaataactctgccatgtttgacatttgtcattgctcctcagagttaattcattatgctagcatctttgtttcttttagagtctaatattctcatccaaaatagacagcatgaagtggtccccagtggattcagacccaagacacagacattgtttggtttatatactaaaagtttcagtgtaacataaaaattatgagacttttacataaacatatgtattcctggcttcacttaaaacaacatattaatggtactgaagccatattgaagccacatttccatgcgaggatggttggcttagcatagggcagttgcttctgcatccactgcagacctcactaccatctcccatcttctgtcactggggtcagattctagtaataatcacacctgtaggttgttttcctttcatttgagaaatggctgttttttaccacaatactatcagtcatttaatgtgaatgagagaagaggacatgtgctgaccttacactagtctttggcatcaccttccaagcaattgggtatatgagccagttattgctagtttgtgctagctggatagaaattcatgaattttgccaacagtaacaaccattggcagctcagaatctaccctgaagggagtatttatactagagaaatcagcaaacactataaatcaacactttttttcctacttgaggatcagttcattggcatatgatacctgcaagtatttgaccttctggtctctgagctaaattatttacaattttatcaagtagtaagatcagtataatctggcaatctgatcaatctgttcttgcttatgttttccttgtttgtgttattaaagcattgaagaagactggacagaacaagaggaggctgggtacccatgatgatcattacagtctgtagtccactggttctctgcagaggccttgcacactgcttctgagcatctgcagccatctgctcacttcgcaccgaggaaaacctaatggaagcgcacccatctaaacaccgactcacctccttgctgtagggatttaagtcattagattctgggtgtttgttgctagaaatttaatcatgtttaaaatctggctggcagtgtagtgaagagctgcccattctcgatacaaaactgcattgagaaagtgaaagggccgaatttctacacaagttgacaattaagatttccatagatgcagaattagccagctcctgtaggggaactggagccaaagcctttctgagcacttcaaacagacaaaattataatagagtcaaatcaagactaaatacatcagctgaaactggagtttagcttatcaaacccagatccaaagcatagagtggagagcatgctggatatttcttccttaaattcctctatttttttttttttattggcactggagaaaaaaataacacattaaaacctcctgactgaattactgtcctaaaccaatagatccactgggcttgtttagctaaaagccacaacagactttgtaatgcaatgatgtaatcttggctttgtgtcgtttatattcaacctaaatttttttttcctgaatagacaggctgacaacaatattgttcagtgtgggtttttatttggattctttccaaatggctcacatgccttcacagtaacacatcaggctgcttacgggtttccccccctttgcctgaattctaaactttccccctcttactagctttctatttttcttttaatgtctcagttatgtttgtaaaactaaccagcaccaccacaaaattaggatgtatcttgcagagagcattcattttactttttgcatatttttccggaggtcatgtcaaggttagtttgaattccatcctacattaagacttctttcacagctatttagctcggcagcctactccccgctggggtctgccccttgggcacgtcaaagcttcagacctgacaaatcacacacagatgaagctgtacagttttttaaacagtttgatcagtaacttttttttttttcctttttcactatccttcatagtaagattctttttccctttgaattaccgtttcaggaattgagggtttctacttgagacagtttgctttacatgagcgttgtcagccagcagtggtttttattacactgtgtcgaaagtcttctgctcacaagacggcagacatagagacacactcttaactggcaagattggaattgtgttcttaaaacctacttggagtgggaaggttagtgttgggatatcacagatttccttgggatcagaaaataaaaaatatacccagtttttatcctgttatgagttgagcctaaaaatgcctctcaaatgcttcccaggatgctcttatcagtattttagcaaattatgtaactgaccgcctgcctccccacctccctttcctgcttaattgatgaacttaaggtgcttgcctgtaacgagtgtatcagccaacggtctcctttatcactgaaggagatcacaaattttgaaaatcagcatactgcccatgtttttatgagttgaaaaatattaactgccacaaaactgccacatcaactgaagagatggtgtgattggggctgcggttatcttggcagtgccgtgatagagcagagttgctgtttttaaaaaaataagtcatatccacatttcattacattttcacacaggacagacaaaaaccaccggaaggtttttagctttgggctaagctgaacacttacagggaagagggggaaataatatttaaatgactctcagcaggaaagtacacaatgaaggtcccataaaaggttgcctggttgaaactaattaaagacaggtctaaataagaaaagagaaaaagagatcaaaggaattacattaggtgtcactatgctatttggggggcatttgatgtaatttaaaaaattttggtttaggaaaacactaaattctgaaaatgtccactcctgtcatcatgccgttatttttgcaacagctacacgtcagcaggcaaacatcttgcagaaatcacttcagcactactggcgcattcgcacattatggtgaaaagaggggcttgtgcttttcacgcggtgcgtctcagccttcaattaatgtgaaagcactacaatgcccatgcaacttctcttgcctagtggtgcaccgtttatcattgcagttttacattgaccttgacacccacttcattagaataaagattgtctaccatttaggttacattgttcctctgcacagagaccccatgcaaatttctgttcagagagaagagctgtgaggctgtcagaggtcatctgcattaaatgattgcagctattttccaaccgcttcttttcattctactcaattcaggctaggaggatcaatcaagttttctgcctgaaacagtaggactgcagggaatataactgtttttggtaggagtggatatgccctaaacagtgttaaatatttaatataaactcattaaaggccatgcaaaggcttgagaaagatgccacatttatagaaatatcaagggggacagggcacccttttgaaaaaataaacaacagtaattatcaattttataattccagaagatgtaatcacaatatttcttagaattagtgactcttttctgctgttttttttcccccacccttgatttgggttaggaaaaggggaactgggagacttcatattcttatatagtattttgcaagaagttgacaggaaaagttttcagtttgttggtgcttctattttaactcagtaacaataaatcctaacctggctgcatttgttttaaaacacatagatattctttatgtaaaagaaaaaaaaatgattggggaaataagtcgcctcgtctcctccttaagtttcctgagtgatataattggaattaaattattaatgggagatacttttaaaaagattgttttatgatctcctattagggaatttgcaattcattttaatatttgtagtttgatttatattaaagataatgcaatctatgttcaattaacaatacatggccaatgtaatgtgatttccagatcatgcaaatggaataagctagaagtgtgttggggggggggggactccattcttaacctcagatgtaatttgctgtgcgagttctggcaattttaaatgacattgcactttttaatttttccaaaggctcagcagcaaatttatcccaatcaagaaagcctattattaatttacaaggacaattgtaggagtccttataatttctttgtgcaattattcaccataaattctaatggtaaaatacaaatagtttgcaagaaataaccaccattacttgtcttgcgcttgagccttcttcttgaatcttgaacatcctttctaagtgttagtgatactgactccttgtaaagcatcccaggcttttgtgggaagctggacattggctgtcttaaagagggcagcaccagagccgccgcagaggcagtcctggcctctaccagtccagctgagctgtggacctggactttcctataaaaagattctttgttcaccactgaatagcattaggcatgggctagctgaggggccaccatgaagcctcaaaagaggagggcaaacactagctagagaatacagtgtgagagtcacagacatagccttgcatttgtgagcaaaatacatatttttacatattattttgcggtagtttggttagtatgtgttccctgaatatactttcttattgatacactaagatacattgtgtcttcacagtgtgttttcttttcctgggggatttggggtggcagtgggggtggggggggaataatcaccacaaatatacaggtgtttgagatactaatttgcacaggcaaagattcaaatgtgtcattattataactagatcatttgccttgtcttaactcttctaaatataaagtcacctgatggccggtttaaaacaacatcctcaggatagaaatactcaaacgctcatgactcagaattggacagccgttattctttaatcaggaaaattgtttgctttaattcgtgtgttcctcatagccgaagcttcgctctctccgtttagtaatgtctgctctcttttcagcatgaccaccagaagcaccatacaaaagtcttacaatgaacgtcttaatctctctgtgtgcttttagagcattattttgaattccatcatgctgcctttttttctcccctcttctgatgttttattacaacagcagaattcccagggagctttgggggcaaggttcacataatatagccctgaagttttgctaggtgggagctatcccccaggcctggccatcttttggcaatcttactatttcaagaaagaaaaaaaaaaagattctcggggtagagtctttcacagcgttagctggataggggtttatgttttacttttttttttatttactagagagtgaatatctacaaccctttcatgatgctttctttcgctgacctcaccgtgacaaggcatcttgttctttaacattgagggaggcagaaaaatgcttgagtttctcaatgtgtgccttctataccagtttcaaaatggcttattcttctggtttccatggtgacaattaacactgtttcaaggcattgttccactctccatttgggcagaattttcggtgtgatttttaacaaaaagagagagagagagagagagagagagagagagagagagagagaggaagaagaaaaagggggaaggttttaagagaaggaggaatgtctggcaaaagtgtcaaaaaagttatctcaatcaagcctgtatttgctactaaagtcatttatttttataaatccatgttttatttttactggctttgatagttcagttttagtatttgtgcgtttaaaatgtaaattataagtaagaattccaattttaattcttagttgaaacaatgaattactattaactctgtatttcctttaacttttctttatacccaaagaaatagcttttaggacactagtagcctgaatctttaatttagatcattcacaaatctattaagaggattcattagaccaaattgaattggccaagcaaatacacttaataatgtaaatatgctctttgaatagagtatattttatttttgaccagacagcacggcccacagcaggagctgtggaaagttaaatatgggatgtttatttaccttagcactcaagaaagccagctgactttaacttggctaatctcatctttggctattgaaaactcgtctgtatcatagccttcccacaccacggaacatgacggggcagcttctgctcacttactgctgtgggtgaaatgaagatgaagatggaatgatcttctcaccacgggatggagaagccccgtggtagggggatggagagcagataaagctggtggctggttctatccatctaatgcttccgaagagatgctagagacagaagagcacacgtacagtagagtcaacaaaaatgaagcccacctagcatttacatacacagccgtcaggccctaaaccttattggattcaacctcatgatgtctcaaaactcaaatactttcaccttaaattacacgccatgctagtactctccactcacatatcaacatagctaacaattaattaggttctctagcttttatcgtttgaaggcattgcctatcaatcacctctttccttgggctgttgatgcagtaagcatatccagtgataacgagggcatacataataacaaggacttttcagtctaataaccgtcttagtagctattgccataactattcataccacattccatagggaaaaaatttcccaatgtctaaaatcaaattaattgctttttatattttcatgattccaaggctcgaatttttaggaaacgatctaaactgtccacctgtcttacaaacttgcaacggaggagatgtttaaagttgggaaagagaaaagacgagtttgccacaaaaaagtccaataaccagtaaaagccactccgagaaggcacaactgaaggattctctgtgttgattgatacatatgacataggggaaagatttgaataacagtcctctgcctggctgaaatacgccccccccccaacatcatgtcagtcttacctaattagttatgtaaatcttacataggaatctgattacataaagcagattgcctctcctccagtcatcacactgacaaatcacacactatctgagtttctagaatacttgttgagtattgagttgaaaaatcttaagtggacagtgtgttttctatactggagaaccatggtcctggtaattgtctgtagttagaaatgcaatcagaatttccaggttttcacagtccaaattctgaaagtgctctaaaacaacccttgattttcttcagtatgcatattcatgtaattttggatacttcgacaccctgatcaacatgcattaataatataaaatgctttaaatcacctcatttaaaacattttgttctgtgatccacaagtgcctaacatttggggaagtttacataatacaaatgatgtgcatgtttagtgtaaatggaagattaaaatatgaaacagaaagtatgcaaacacatgcacacaagcgctgaaggtctattaactgaagcagagccgcacacctttctttctttcaagctaattccaattctagctttgtttagaattttataaaaagtgtttttgaggggacttaaatcatccaactgtttggggatattatgaacctatagatctgcaacgctcttcccccacaagagctttccttgtgaaatctgatagagtttaccttagggcagaaggcaaagtagaaatggtgctgtagaactcagaacttgacttcattgtttcaaagaaatatattttggcaatatgttacatttaatattttacccacatcctaaattttatactcagggatattttgatgcacacctccccataagcatgatagtcatttacagttgtttataagattctcttactgtgaactttcccaaatacaggtatgtgaagaataccaccacaacatggtttttactgagaggctattacattgtctccaagaaatgtcttttaagagactcacttgccatttgttagaatatagtgtgcattagttggggcaggagggttcagtagttggctgagaagttcagggtagtttatagtaatcaataagcaattgtaggtctgtatctatcccagggaactggtgagcatccttcctctttatgggtgttctttctctttagctttcaaagagtttttaagtaaaagaaaaataaaaacaaaatagtgacttaggctttaattaatagggaacttaaaagaaataagtcatataatacttatggataatgtttttctttccaagataactttgccagtttgtttgtaaataaagtccaaatacattagaaattaatcagcattgttttaacttttataactcacagtccaatgtataggttgactttgataattcacagtccaatgtatggattgtttgtggcacaaacattttcctctaccaaccaccttcatttgaaaagtgcttctccttaaagaagaaaggctcacctgccaggaaagtggttgatacatgtgtgtcatgggaggaaaaaaaaaagacaaaatactttgacctcttctaagatagatctgctgggagtgagggttctatagccaagtggtgacccaagctaacttaaatggtaagtccttccaggtcaggcactttcttgtttattatattttaaataataaaaaaacaacataaattgtgtgtgagaacttagttttaagacaaaaaaatcactgaatccagcccaatacaagaagtatctatgccgacgtgtgtggtaagtgatgtgtttgcagcagtgttactgggtcactcaaggtaaccaggcttagcctcccaggaaattgtattgtaaacaaaaccttctagttccataaacagtatgcattctgcctatagaacatccccgcacactaacgagtcatccttctcttgccatttcagcgctacagcgtggaaatgtccatcaggcacctgaaaaagacagagctacttagcaaggttgaagctttgaagaaaggtggcctttcactaccaaatgatatcctggaaaaagtggattcaattaatgaaaaatgggagctgcttggggtatttgcatttttattactgtttgtaggttctgtgtacgtttttgtgtgtggtgaagtactctctctgtctgatttctaatttgaggcacaaatctctctctctttcaattcactccttacatctcaagcaagctactcatgttattatggggaaaacattgcttttcctcttctgatctgttctttttttaaaatttattccgagctgtctcttctcagattttaataattttggttctttaatacataaagaagtaagtaaaatatgccatgtattatgagtatgcaccaagtcaactctaatacagtatatctgatatacacggcctgtcacgcttggatgaatgttaataggatttgttctgaaggtacatgttagagacagccgctgtttaactgttcagtgtgaccttaagatgggaactgcagttgccactgaagctttcaggtcacactgaagccaccaaatcaagtatgcaaatgtgacctgagtatcattgcaagactgatctgcttgtgtgtgtgtgtgtgtgtgtgtgtgtgtgtgtgtgcacgcgcgcgcacgcctcaatttcctcagcatttttaacaaaagaaaaaaaaagttttggtagttcatttcttgcgaagatggtctcagccaaagaaacaaaaagacaacatatagatatcctgttatcagaagctcgggggtggtgtgtgtgtgtgtgtgtgtgtgtgtgtgtgtgtgtgtgtgatgcaggagtctgcactgtcctgttgttggaagacagcagagagagaagttagcctgtacttgttcatcagcttctcgcctaaattgccttcacttcaaatcaagggtaagctaaatttgccaattacctaagtgattaattataatagctactatgggtggtgtcagttacagagcataatttttcaagccctctatttttctgcctctttaattttttttttaaataatactctagaaatattttgaattagaagcgctccaagtacagtgatgacttggagacatgccagtgttccgtttatgccaggcttaatctaagtgattaaaaacctgcacatttaagcccttgtttctcatctaaattctctacactgttgtagttgttcaaagtaacttcaaatgttaaaaattcttatttctagttgttatggtcttaccttttaacgataattaatgtaacctgctttaaaacatggtggtttaaattaggacctactaaattctacagcgttcattgatctcagaagaaattactgtatgatattctcaaaggatgtttacaaaacagaaaaatggcagctttgttggcctcacagataaactgacagcctgttgacactgcatttaaaggtatctttcctaatttgataaataacagtactcgcttagaaaactgtttaagctctgtcatgattatcaattcctcacccaaaaattctaaattattacaccgaagacacagtatttagttaatctgtatgagtcagatgcctctcaaacacttgccattttgacaacatatcaaatcccatatagtttttagagtcactttgagagagtagtttggggagaagagtttagtaaagctggagccacgctgaccccaggaggcaggcggctttaattggcatgattacattttaattggcatggaaaaaaattacagacaaggactttaacttctaacaatagtaaaatagagggatatggtttttaatatttctttcatctaaggtgaacagtgtagaatggaaatacattagaatgaaatgtcagtggtgcgtacagtctaatctgtgaaattctgtcccctgtgctgcatatgactctgtctcgattgcatattaaacaaccctatcaaggcagccattggcatctgctgcgctgacacaaattgtgaattaaatgaaattgatgtcctctgtcgtatatttatgaagacggaccattctctgaagtattctgtttataaagaatttatgattgcaaactgttccagaacaaaaaaagtggcaataaattcctttttgtgaccctagcctccaagggcattgatttcacctcctgctgctccttttgttacagcataaaaacaatagctaaatctggattccactgagggtcttcaaattatcaatatttgcaccatgaaaatgcaagggtgttgccaagacaggctatttttctgtcatgatctcctaaagatactatttacagagcactgtggagcagatgaatgtttgttgacttaattttatttgtgttttaaagcgtatttttttctaggtttaatttatcattatagattaaatcctattgattcagtaaagagagtgcttctaccaaagagggagaaaagaaaacacctctatcccatagtgctcagcctacataggtttataatacagcgaattgagtattattttaacatatatattaaataatccacatccaaaaggaaaagcaggaagaaccttggagctgaagatctctaagtcaggtgaaatggacagctgaacctagtacatctgtcatatcatttgaggaattgtactttgcagaaccaatgtgtgtgtgtgtgtgtgtgtgtgtgtgtgtgtgtgtgtgtgtgtgtgttatttatacttatatatttctctgtactcttggtctctgattaaattcaggcctctatctcctgaacactttatatagaatttcttactgtaaaatttttgccaagagaattcaaattaatttttgtccatgattatgttgaacttggaccaaacctccttcctgttaaagcaatgtctaaggaatgaagttttgcatgtgtaccctctggtagtggggataatgcttactaaataaccaaaaaccaaagtcacaatcaagccaatcagagttgcatgtcagttccgaggtccaggcacttccttggatcttccatgatgggttttgagcgaattggctaatctatttttgtcttgtttttgtttttcttcttcctttttaatctgatgcattagaaaaccctaagagagaagatacaggacacaatggcaggccacagtgggtcgggcccacgtgacctgctctctcctgaaagcggaagcctggtaaggcagctggaggtcaggatcaaagagctgaaaaggtggctaagagatacagagcttttcatcttcaattcctgtctgagacaagagaaggaaggaacgagcgccgagaaacaactccaatactttaaggtaataaaaatacaatccaagttgataaaaagctttatttatgggagagatgaaatatgtatcaagtacttaaattgttgtgctcctgcatctatctatggctggacccttaaatgcttccttgaatttacagacattatccacacttaggctaacctctatgtatcaaagaagaccatcaagcacatcaaatccacactgtatgtagaggaagcctgtgctggctctgtgtttgtgcaatgtctgttaagagagaactctgatgaattaaaagcagattggcaaacacagaagataactgaggactccaaaagatctaagtgttccctaaatagagtaacaaaatgtccttccataaattgatgtgggaaaaatgcacatggtttaattgatatccataatgctaacaaaagaaaacataatttcacatatgaaaaagtcaactattcacagagtaaaggaataaaagagatcttgcattacaagtgtattccattgtaaacaaatggtgcttaatcttaacaacaggatcaatattgttttggtggttttgtgcatggagaagtgttcttccagtttgtttctgttctttatgaagcatcaagtgattgaggtttaaaaggctttttagaatatttatttgtgtttgcgtttgtgcatgtgtgtgtccatgtgcacttgcatgaacccgcacagtatgcatgtggtggtcaaaggataacatctggcagttggttcttctgtcacagatgttccagggattgaacttgcttatcaggcatgcgcctttacccactaaactatcttgctggtccatagaatgcaatttaacatttgaatgttttacctcaatgttcagaagagcctatgctatttccataaataaataaaagataattatttggtctttgtgtgatcagtttgaggctttggggttatggaatgaattagtagcaatatgccttatagcatggaggaacttgaaaaggaggaaaagaccaactaagaaggaaggaactttctggaacagacaaacatttcttctcaaagtcttctagaagcaggttttattcaccggttgccatctagcaatccactagaaaatgtagtcaccttctgtcggccatacattcttgcttaccttgctcactgctgtaacaaaagtcagggcaccctcaaaggcagttgccagtaaactgcctgtatcgcacccataataattgttttagtcaaatacttcatctcctgccattgcactgaaaagttcagatcatcaatccccaagacagggagaaagcagagtcaggcatgcatctctgtgtcatttgaacacagcgtgcattttgcagattagctgaacaactacaggggtagatgctgcaaaataatttttcacttctgttgtaacttcattgccatgttagtgaactgaccagtgtccccagctttggaattaggtcacattctagtcccattggttgtttgacagatggtcatatttcttgcgcaatcccatcattgcttgatcactttctctgtaaaatggccttctaatgttatgtattttgcaattacatatataagttactattttattgagctttatgtcatgccaatagtatctaggcctaagtaacacattttaaaagtgtgagagggaaataaggagaacacgttggggaaggaagaaggagaagaggcgagagaagcagggagaagtggagggaactaaggagggaaacagaaacaccaggaagtggactttggacttcagatcactccagcatcctagtctttctaggtcactatatccctaacctagctcagtgtttacttagtaccccaaagtaacagagcagtgctgctccaggacactaggagctgccacatgctttcccccattttatttctgttctctaatgatgtgtctttgcagagtttttaagtgtcactatctgttgagctatctgtatttacatctcattctctctctctctctctctctctctctctctctctctctctctctctctctcaaagctatttttaaatcctataataactacagagaatcacctatcctaaagaaaacgcaaaaaccttaaccaacaatgtaaacctaactctgcggctcctatccatatcctgtccctgcctccttccgctaaggcaatcaggctcccaagcccaatagtcattctagaatgcttcctatagttaaattgaattccttaatgttagttgcatttcattttattacaaagatattcatgctgtaagctaccctttaggacttccttcttcattcacgattataatgcaaagatcattcacagtgttggctgtggtaataatgtgcttcctttgaatgctctacgtctccattttgaatatgtaaatatatctcatttaatcctaacagcagacctatgaattagctatgaggatcttgatttgggttataggaatcagaggcaaagggaagttaagttttgtgtgtccaaggtcatctttaatgagcaatgcagcattatattgaaatccagggctgtctggctctaatgatctttggatgaattactgtgtaaaattgatcttaactgatatttcctaagtattcttccatatcaggtgactcaaagggaaggacaggacagaaatacatttcattgtgtctttattgtagccttgttaccctcttcagtttttagccctaaaccatagctttagctattgtacataaaatgtgtgtatgtcaaggttggtttgttgttgttgttgttgttttctctatgggtgtcctttgccatcttttaagctgaaactctttaaacctttggagatcatggaaccctgatgtgtttctttatcacttgaaagcagacctttttctctttatgatgctaggatagagcatagttcttgtgcatgcttgacagttctacagctaagctaagttcccagccctaaaattggccatcaggagtctgggtagacaagttaaggatctggcataacactctttttgttgttgttttcttttgaagaaaaatttatacatatctgttggaataaatatatttcataaccaagattttaatatttataagctatttgcaagtttttcctcagtacttcttgtataattaatcaagtgttctgggccttaccagattcgttggaagaacagaatcaaatgtttgtaatttagtataaaaatgtaatagtgtgtatgatgcctcaaaaatcataattttaataagcacacacggaataaaagcttttgcttacaagaagtctaaagaaaacatacattaaaataacccaggtcagggaggggggaatgaaaactctttatgcagaggagcaggctccactggtggaggagtgtgctctgcctttctgctgggtcccccgcatgtcttctaccttcgctggctgctcagaagacaccattacctccaggccttatctctatgactcgtcattctctgaaagcacaggctgtactgattccccagcacatgatccggaagacagaaaggtgctgtatatgaaggataacgtccatccctttggagacagatctgttccctactcagactgatatgagacaagaaaagagatcgggattttaatgtttcctttgggggggggggaagcaattctagattatttttctgtaaggcagtggggtggtttgaatttacttggcccattaggaagtgtggccttgttgaagtaggtgtggcctgactggaggaaatgcttcactgtgtaggtgggttttggaggactacagagctcaagctctgtccagtgaggaggagagagaccatcctgactactttcagaagacagtcttgccttggctgccttcagatcaagatgtagaactctcagctccttctccagcattatgcctgcatgctgccatgcttcctgccatgataacagactgaatgaatctctgcaactgtaaggcagccccaattaaatgttttccttattgagagttgccttggtcatggtttctcttcacagcaacgaaaccctaactaagacaggtagtaattgtagtagatgactgattagacacaagagaaattctatacaatgaagagtctaagcccagcagaggggtgtcatgaagggaagactccaaagccttgggctagaaatataaaattattgaggactgaacacacttttacaagaaagcatgtgggcacatgtcgaggacttaatgaggccaactggcaaagggcccttaccactcagagagtgtaacatcaatgccattggctagaaggcactgccttttaaccataactcttcagagagaaaggaatataattacttaatcatatgttccttgtattccaaaaccatattcatttattctaaagactctaaattaggaacaaattgtctattaccagctaaagaaacccacagcattggcctagacccagaaccagcctgggaaggggaatgagagtaggcctgctacaaagctgtcacccagaaggggacatgaaagaaatagacctcagcatttaatgctgtagatttgcatagcaatttaagtctgaccaagcactttcatgtttgctactaattaccttcttatatgtgcacttatttattttcatgaatgaagaacttgagctgtaggaaatagatatgtcttgtttgagtgtacacacagacagcaacaggggagcaaaagcaatgctctgtgcgtgcaaattccaggagttacccactgtgtcactcattgctctttcagggaactgtggaaacttggttttcttcccaaagcgcttttttcacaaaaactaagtaatatagtctgtcagttacacaactgatgctatggtccaaaggcagccacacacaatacattaaataatagatgttggctctggtggatcaattttagcactctttataaaagcaagcactaaacttgatttaacccaaaggccatatttatctgaccatgtgttagactttaacaactaccaatgtggagatggctgcttctaaatgcctaagaaatagaaaccaggatggagagatagccatggatgtaagagcctgggttcaaattcacagcatctttatgaaaggttcactgtagctttacatcagcaatcccagagataagggtgggaacagagactataggaggctcagtgggcctccaatcctactgagaaaggcaaactcaggttcacggagagactctgccttcagggaataaggctgagagtaacagagcagcacagtgatgtattcctcacacatgcacacatacatgtacctgctacacacacacacacacacacacacagagagagagagagagagagagagagagagagagagacggacagacagacagacagagacagacagagacagaaacagagacagaatatggccatagcattatactatagccacaacttatacttgttgagtgtttatactcatgtcgccatttctaagtgttttgtctgcagttgcttacttaatcctcatcaccctcctgaggcaggtaatggggtttgttattccctacttatagaagataatattaagatgggatctattattctatattccatctctaaatactcaatgactatctatgatgttttgaatgtgaaaggtccagcaacacctggtggtattgttttaagaggcttcagagtctttagaagatgggctttagctcagctacgcagccctgagtgtacagcctaacccagctttatgttcagtccctgattctccacccttccccttgggagcaagcacattcatggtactacagccatagcctcaagcagtccccaccagcatgctttcactgccaacacaggtggaagcgttgattattttctgtaatagacacttctttctattcaatgtttattcacagaaatgagaaaattagttaatacacataatgaaaggaaatcagtgacaatgttttatgtcgtgggaatgaaaagttatggagtaaagcttctaaaaggacttaagattaactatgaactgtgacgcaataacaaatggtcactttgaaaataaatgtcactctttctgaatgtgataacatatacctgtaatcttggtactcaagggaccgagtcagaaggttcacaaatttgaggtcaacttgggcaacactgagagaccgtgtcttaacatttctaaacaaaacaacaccaaagaatcaaacaaatgaagagacagaccaaaacaagaaatactactcttgcatagcagtttcctccttgataaagccctctatcttggagtgaagttaattaagatgcaggatattccaagagaagacaaggcattccgtcatttggggaagtttattaagcacaagaagaaaataacccaaaggcttcaggaagtctctaaagttgactggcttctccaggatctccctccctaggcactctaagtaagtagtaagaactgctaagagatactgttggacaaaccaagctccctagaagaagatgagctacctaaaaaggttcagaccaattgtgttctgtgaaagaacactctccaacatccaattctaataaaactcactgtaaattaggcaaccactatggaagaagtcagtatgcagattccctagaaaatactaaaaactaaaacaaggaagataacataataaaattttatcactccttctctagaatcatgggattaaagccagcatgcaatagttaacttgaaaattgcatgcctgtgttaattgtgacatggaatcagcctaggtaccatcaataggtgaatggataaagaaacatcccaaagtacttttttcagccataaagaagagcaaaatgatgtcattcaagggaaatagaagcaattgaagaccctgttgagtgaaccacacaattatcaaagacaaacaccacatattttcgctcatatgcagaatctagactttataaagacatgataatacaagagggatgaaacagaagggagaatgagagtggagaactaatgaatgagaatgagcataaaggaggctggggaagatgattgcaatcaaagtacatttactcatgaatgaaaatgatgaaatgaaaccatttatttttacaattaatatacactaacaaaggaaataaatatcactaaacagaccttgagaatgataaagaagaccaacataattgagacatttggggaaattttttcatagctactataagtatcctaaatggcactgtgagtaaatcttatttcctgtgagcctcaaaagtcaaggtaacaaaacaggagagaagggctggaaagatggcttagtggttaaaggcaccaactgcgcttcctgagttcaaatcccagcaaccacatggtggctcacaaccatctgtaaagggatgtgatgccctcttctggtgtgtctgaagagagcaatggtgtactcatacataaaataaataaataaatctttaaaaaaaaaaaagaaagagagaaagaaaggaagaggagagaatatttgcagtatatggagaactggccatggttcttactgctgcctgggtcatcctgatgcttgcctgggtcatcctgagacactcgcctgggccattcattctgatgctcactcctctaatgatactatagacaatgctgtgagaatctgtgttcaataagacccaaagcaagccaacatttcaaaccaactgccacggtgaaggtttgattctttcaaggggcttagatatattttagaggcataatattagccaaaattatgtgctagtcaaaagaaaacaatatatgtgcattaaaaaatgtgtcagattctctatcacatattaagaactcctgctacttaataccttaaaatagtttaagtagttggatacaatctaaaaaggacttgtgaaaataactgactgattaaagttgtaacccaatgatagaattaagtaaatcctgctcataatagtaatcttttgaggcacagtctagatagtccaggctagcctcacttgttgtgtatccaagactgattttaaacttctgatcatctcgcctatgcctgctgacagttgggattatacatgtgttccgccatgcttatctcagccaaagaaaactttacaggtagttttagtatatttttctaaagtaaattgatgcaacaggaggtcaccctattaagcatgataaaccagatccagaaaaaggaaaaacacacattttctctcatttgtggatcctagattttatatcattacagaaatctgtgtgtgtgagtgtatgtgcgggggacgggggaatgaaaacaggtacagataaccctagtcacaagggagcagaaacacacttttggccttctcaggtagcaggcattcatgtggtacatagatatgtacatattcagttaaaatacccagacatataaaaataaataaataagtaaataaaaaaagatatgcattgtaagtctcaatattgtaactatcttcattataagtactgagaaactacctctaatagatttttaccttttaatttttatcttttaatcatttcttttcgtttttgaggttataatacagctgcaccatttctgcctttttctcccttcaaacactctcatagtatcctccgtgatgcctttcaaattcatggcctcttttctgcattaatgtttgtccacgacatgtatacaaatatatattcctaaatacatagatacatcctgctcagtttgtatatacctgcgtgtatgttttcagtaacccattggtgtgcttttccctggctgagactatttcttcagctctcagcatctcttagttgcccatagttctttgtgtacggttgaaactgtatagtcttcctcccagtcacttgacatgcctattgctattgtcatggttcaactaatatttaggcagtcatgttcttgaaaagttttgggtgtagcttttgacatttctaggaaatacagtctcacaacaaattccccgatcctctggatagtacaatctttcttcccctccccccctcccccccagtgttctctgaaccttagatgtatccaatgagtctgggccccacaactctgtattttgattggtcatggttttctaaaattatatccatctactgcaaagagaagttttctttttttaaaaaaagatgtatttatttattatatgtaagtatattctagctgtcttcagacactcaagaagagggcatttgatttcattacggatggttgtgagccaccatgtggtttctgggatttgaactcagaacctttggaagagcagttggtgctcttaactactgagccatctctccagccagagaagttttcttaatgagagattgaagactatacttctctgttgggtatgagggcaaatatttagaatattgttagggattatgctgtgaacatgcacattttaggacatttatgtgtgaaacattgaagacatgataaagcaagtcctttggagtttcagtaactttggttgaatttaatattaaacattcatattgaattgtctgttatcttccattacttcattcactcttacatcgttccttcataattgatcagtttatagtatcaagtactacaaataggttctcttaattgttaacattaagatcttgaacttttggttgtctaacctccagtgtgtaatttcccgtcacctgatattctttgtttatattttgatttctagttttaaaggattctctctaaattttgcattctatatcattgtaatagccatattttcccactggtaaatttataaaattatagatgatgctatgtaagtcctctaaacatcacttctagcgagaaattgatgaagtcagttctgcagaggattctgttgcatccccactgagatgatccatgaagaaggaaaggcatcttttgtaccaaagatgcagggctattgcctctgtcatcatggtggcaaccttactccttggctctacaacctttgcaaactctatctttaaaatttgaagactgattctgaaagtcaaggcggaagtagtctttctagtcacaaattctagcctagatggctgtactgataacatgaatatattttattggttttataagtcatcatgatcttgtttgagtcatttctaaaatgcaaagaatcctaccaataaactgttagtgcagaaacaaaaaacattgaataggcctataaaaaaatcaaagatgaaaaactctggattaaaattaatgaccaagctgataaataagctcatcttgctaatttcttaagtgacttcaagtcccttacccctctccctacacacacaggcacatatgcatgtttgcatgcacacaaacacatacacacacacatatggcttaggatatccatgtctgtccttgttactcattttgttatcttaagtaagtttattacactttgcattcttaacaaatttgggtgcatatcttccaataagcaaactaaatctgttcatcacactttcttgattagggtcgctgatcatcccttgcattccattccttcatatcctcattcaataaatagtcatcaaacacctaccatgccgcaaggactaggttgtgtatttgcaaaacatgaagcatacagtgttgtcatgtttaaacatgttggagcgtagagtgttgtttgtagacactttagtgaattggaaggcttgataaactctttgctttacttacagggttgtgaataaactaactaaaatatactagtattaaggtaaaaacattgagctttgtttccatatagttttcattgtggttgatgtatctaagatttgattgttagctcccaatgttcattctagtaacacaattagatcttttttcatatgttcaagaattccttcttagcaccttattgcattttataataattttaaaagtagagcccgatcagctgggtcagcctgtcaaaacacgtcctagcaagcctgatctgagctgtgtccttgggatgcacatggtagaaggagaaaactgattatcatatgctacccttttacctacatacaagcaccatggcatgtttacacaggcacacacacacacacacacacacacacacacacacacacgcacgcactacactgtaaaaaaacatttaaattattttttcttttaatttttaaaaactgtacatgtgtgttttgtctgcgtgtatgtatgtgtaccacttgcatgcttggttcctgtggaggccagaagacagcattgggtcccttggaactagaaccagacatggttgtgagtgctagaaattgagcccaggtcctctggaaaaagaacaagtgctcttagcagctgagtcatctttcttactcctatacagaaaaatttaaagtctatttttgatttcacttacttatctaagacttcgggtacaattcttttctatttcagaaataccttgctttcagtgctttaaaaaatatgcatataaagtactttaatcaaatctcctccccatctcttccccttcaagccctcccttatccttccaaccatttttcctcccaacttcattgggtatatcatatcatatcatatcatatcatatcatatcatatcatatcatatcatatcatatcattctacctatcatttgtgtatgtgtgtttgtgtctgtctgtctgtctctctctctctctcttttttttttttttttggtttttcaagacagggtttctctgtgtagccctggctgtcctggaactcactctatagaccaggctgtcctggaactcagaaatccgcctgcctctgcctcccaagtgctgagattaaaggcatgtgccaccacgcccggcttctgtctgtctctcaatacctactgaacctattcagtgttgtctgagtgtccacggatgtgggaccatctgttagaacatgtgtatcttcttggggtctgcatctctgaagccacagctcttcagaaagggatgggcctttatgaactcatcctcatattcatgctggggcttttactagcttgatcttgagcaaaccttgtgcctgaagtcccagccactgcaaattcgtgtgtgcagctgtgcttttgtgtgccctatgtcctgctctatcactctcatattattcccttgagactgggtctttccctgaacctgaagctaggctagtggccagcaagccccaaccatcctgtctctgctccaccccacactgatacaagacttttagcaaaaatacatttttctcttgaactaatttgttgtctttgactaatgtcaggagtatgttgcttaatttctatgtatgagtttttttttcctatttctaatttcttatgtcacacccaaaagttaatataaagacatttgtccaatttcagattgcttcaattggctgagagttgttttctggtctagtgaatgagctaagggaacaatgtttctgtgtacttgagtacatggtctattgcacatcactgtggcctttcatgtaactcaagtccactctactcttactgattttctgtctggatctttccactgttgaaaaggagagtgttgaagtctgtgattgttgatgcattaatatttcacatttcacttctgttacattttgcctatatatttagctatttataattgttacatccatttgagcaattaactgttgttattaagtgacactgggtcacttgtcacagtttcctcagatctgtttcgtatgaagtactacgtgtagactttctcagtcctcttacatcaatgtttctgagactggtttcttccaacccttcacttccttccttttgtatgtttaaagctacagcgagtcttctgtaggcagcaaattgttgcatcttgttttccttaatctatttggccactttgccttttggctagataatttactttaaactaattattgatataggtaactactcgctgctcctcttttctcgttgtctgctttgttttgtttttaattgttttgcagttcctttgactccatctttcttgttgtcttcctctgtgacgtgcattttgtaatggtttgcatggatacccttttctggatcttttatgtctgctacaggtttttctttgttattggcataaagctcaaacaaacatttcagttacggcagcctacttttaaatgataattttgttcccatataaaaaaaattacacattttaaattcccccacattttgtgttgttgacatagaaataagttcctggttgcaaagaaagagactaccactccaaattacagtgtctcaacaagacaaaattatctctgatcaaaatggtgccctacacacaggagggaagagtgagctcacagaggcagggatttggcagatggtgacagtatcttttccttattggctggggtccaacctcatagctttttttgtgattggctagtctcagaagaaccagttcaaaggaaatgaaggaaagcggggaggagctggccacatcagtcatcagagaatgcagcaggggaaaagagactttatagggtcggggcattaaattattttcataaaagttttacaaagcgagtgagaaataaaaaaatttaaattctttgtcttaagcaaaagttttacagtgttagacagaaaagactaatatttaatgcttcttaaaatgtcacaatttatatcttttacataattttcaattaccaaccaaatcattgtagctatagtaaattttaggttttgtcatataatttacattagaattagaaatgagttgccaaagtagttagatattcctaatatgagaatactctgaactttatagcagattttatgctgtcatatggtttagcattgctaccaccttttaatttgaacttgaagatcccctgtagcattcaagtaaggtaactgtactggtgttaaactcctgggcttttgtttctggagcctgagtccctaaggtcaggctaaccatgggcttgagtgctctgagatgagttctgctgctcaggctcttgtgactatgtggaagttagcctgtgctgtgaagtgtccagagccatggaaacagccggagccatagtacattgggtccacccaatcctagagcagtcctgtaacgtgggttcataagagttcaaactggagctagaaggctagggtagaccagggttgagtaagacccagaatatcctagagtgatcctggatcctgagtctgttggaacctctaatgctttgggtgtcagcacaggacctgtgtctacaagtgcttgtctagcctctgggttagcatatgtgagaccatggtgctaacatggaacctatgctaaaagagctagtctaggcctaggtagtcatgaaatatatgtcctagatatctctctgagacaagggcaatagcctatggtgctgacctgtggactgagcctctaagaacaaaccaatgccagaggctgtggtgcttagggtccctgataaagctggaggttaacgtcactctccttcctcctagcacacagtgtttctctatgacatattgattaggttaaggggaacaatgagactgaccatgagattctgttcttactctgtgtgtgtgtgtgtgtgtgtgtgtgtgtgtgtatgtgtgtgtgtgtgtgtgtgtgtaatagaagtgctataatctctcaccaattttcttagccttacattcatattcttcttaaatgataaacatattcttcaacaaaattcagtttctgagaattacagaatgaagggattctggtatttggaaataagaattagttcaaggttattctgaatatgtgaatggactctttttttttccatttattgaaccccgtttccttaagcaaatgcatgtgttaagtactatcttgggtcctagacaaacaatccatacttctcttagaacatataacacatggtctacagtgggatgcagataagatctgccatatgatttgatagacattaacacggtatgcatatgtacataggacacttctgggaggtaactgttcccatgaggggaagcagagaaattcagagtaagtgactggttccccgcctaattttagatatttcctttaaaatatgttttattcattctttgagaatttcatgccatgtatttgtcctagtcactgttctattattgtgaagagacatcatgaccatggcaactcttataaaagaaagtctttaattgaggcttgcttacggtttcagaggtttagtccattatcagcatggcagggagcatggagttctatatacagatctgtaggcaacagcaagagaggaagagggagggagagaaacagagagacagagaaatggagagacagagtcagacagacagacagacagacagacagacagacagacagacagaaactgggcctggcatgggtttttgaacctcaaagcccactccagtgacacgtttcctccaacaaagccatccctagtcctttctaaatagtgtcattccctgatggctaaagcattcacatgtgtaaagctataggggtcactcttatttaaaagaccacaatatttcccatttcccctctccctccctctaactccttccacattcattccctcttccccacagatacttctttttgaaaaattgttttcagtaagtacagcatataatgggtatcttcatggcacattcatatgtctatcattgtaccttgctcctctttgtcctccatgacctttattagacctgcctcccactggtaccctgaattagttccagtctacatttcatatatatatgtatatgtatatgtatatgtatatgtatatgtatatgtatatcacatatgtctaagttctgtatatgagaaagatatatttgtgtgcatatattttttgtccccattatcctcacttgaccctcccaaggcacctttctcctcccacataagtgactctacactgagatctgtagtaaagcaaggtctgaggaacagaatagcctatgcatgtgtagaattctagaaagaaagaaaaaagaagtaaaaaaattcctggtggttctgtgtacttgctttttaataaactctgaattaaaaggacaccatagtatgtgctattagagaggaaaaacttggttttgttttacgacaatgtcgtcaataccttggactcagtaaatcttcaacaagggcagaatgagctatagcgctttgcccttagatgagatctgagaacacctccctctctgccttattccaaagagagaagccaagcctttgatgttgtcagtgactctctcaggacccaacaaccagagccataccagagcctgcgtctccttaattccaactcaggctccaatccaataagttcaagccaatggccttttgtacatcatcatgtatgtttctgcaatattcaaattgctttgtttttttttgtaaactatgaataagaagccaatctgatttgacaaaaagaaataaaatgatcttcacaacagacataatgattaatgggggatttagaaatgcttattgcagctactgagtgcctctttaaacagaagtaaacatatgacacacacacacaccaaggttcccctgacatcggaactcagagatttaccatcatgacccccaacagcttctacttttcagggttgtatgtactcttgggagcccgcgcttgcatagagtgtgctatcatttttcaccttgcgttgcagctccgtatgaggtacttaaagagctttagagacattagctcattaatcctcccaaaacttctctaagatacagctgagacataaatcattattctatctgaaaaaaaaaacattttttgttcattttactgatgctctaaattgttggttaatcctgaattatacactgcacatgtagaataccacacattctcttctccaataagattttttttctttcttcttagaatttgatttcatgaggctagtataaaaatagaatgataggcctcatgttgaaatcacctctgagagtcatagattaggaagtggcttggcttttaagctctgtttgtacctttttcctttaggacatcctttattgtcctttgttcatgactaggaaacatgattttgaggaattggagagaaacttcatgatccattcagtgttctatcagctgagaacaccaagaaagccaatgagtatccattcaaccatgtcaccctaattcccaataaaataccagtgcaacaaactccaaagctttatcaacaaagcaatggaagttaaagctcttcactttcctgtgtgttgcttagacaaatggcgttcactgtgaagttatttagagtttgactttgaagatgctagaatatcatcataatgtatagaatctgaaggtatcgaggggtggctttctagagatggctgcaatgtacatgggctagatagggtttctattgctatgatataaaccatgaccaacagcaacttcaagaggtatagttgtctgggagagaatggcctccataggctcatatatttgaatacttggcccctagccgatggaactgtttgggaagtatggcattgttggagaaggcattgcattgcattgggggcaggttttgaggttttcaaaaatgacaccattcccacttatccctccctgccttctgcttttggaccaagacataagctctcagctactgatccagcaccatgcctgctggcctgctgccatgctccctgccgtgatgatcatgaacttaaatcctctgaatctgtaaccacccccacccccaaactcttccttctataagttgtcttggccatggtgtttcatcatgacaatagaaaagtaacctgagacttttcttacttggtatcaggaagtaggttattgctgtgatgggcctgactttgctgtactgtttctttaagaaagacgaggaagactttggaactttggaatatgaaaactgttgaatgctgttagcagggcttaatgagccatcatagtaggagcttgaaggagagcaatgtggactatgcaggcccagcttaagacgtttcagaggggaagaatatcatcaactgtgtcagagaccactctcctgataatatgtcaaagaatctggccgtttttttctcttgtcctaaaaatctgtctgaagctaaattgaaagtttttaaactaatttcatcgatagaggagattttaagatagcctaatatcgactctgccctgtgtttattagtaattgctcttatacagagctatggtgtaaaggaacaaatgaagaagaaagaaatacaaaatgtgcagtttgaggagaaaaaaagccagaggaaatttaatgttggtgtcaaagcttatgctggatgagataagagaaacctgatttgaaatggaataaagggactggtgccctgggggtaagaccctacctggctaagcttatgacttataaaaaggaaaactcatgtaacaaacaaactaactaacaaaaagcatgggcaaatgtaactcaaggagaaagccaggttctactccaagcagacacctgaacttggaagcatcagccccgaggttctggctttagagtcatgaatgatacaggtgtacaggggttgtggaatcttcctcttaggccaggtgtatggaaagggagtccttgcatggaggcctggagtagctactgttgaagctataggaataaactctgaattacaccggagacccaaagaggttaaagatggcagggctaagaaaaatatgtcagaccaagatgcagacagggggtgaaaccatcccaagagacagaagtgtgtttcagtcagcaaagctgagaaggcagagccatctaagtcctttgacatcagacatggaactatagaatttaaagtttgccctggtcagggctttgttttggtacagcttttcctcatgctccctcccccatttccccttttgtaatggtaatgtatattctgtgccattgtatgttggaagtgtgttatttgctttttttgattttacatgaattatagttatgagattttctttattctcataagagactttggattttaaaactatgttgagactgaaagactacagggatttttgtagttgcactaaatacattttatattatatagtcatgagcctgtgggaggcagggagtaaaatggtagtttaagtggaagtggcccccgtaagctcatgtgcttgaacatttgttacccagttgatagaactgtttgaaaaggattaggaagtgtggccttgctagaggaggtatggcactgggatgggctttgaggtttcaaaagcccagccatccccagttaccactctcaatttcatgcttatggatcaagatgtaaggtctcagctatcgctctagctctgtccctgccttcctgctgccatgctccctgccatcatggtcatggactctagacatctgaacctgtaagacaatgctttcttttataattttccatggccatgatattgtatcagtagaaaagtgactaagacagaaggaaagggcttatttcactttatactttcaggtatcagtcattactgtgggaaatcagggcattaatttaagcagggcagaaacctggaggcaagagctgatgcagaagccatgaaggaacactgcttattggcatactcctcactacttgctcaacctgccttcttacagtacccaggaccaccaccccagaggtggcacagcctacagtaggctgggcactcctacatcaatcatcagtcaagaaaatgcctgacgggcttgcccaagggtcaatttgatggaggtattttctcaactgagaatattttttctgaaggaccctagcttgggtcaaattgacataaaactagccagcataggactttatccagaaaaagcaactgtagttatagccagaggaagtgaaaataataagggcatagtaaaagttaaagaagttaatattataatacctctatgattcctcatgaaagatgacaactaccttgtaacatttaattgatagtcaaagtttattttataatattttcaaagaggctaccataatacatttttcttaagtataaacttatgtaatactggtgccagaatatgttagagggtaaaagatagtttcctttcagaggaagactatcaagtggatttattttgtagtttacttaaggtgacaaaactggactctgttgaaccaggagactatccccagatgtggatagtccacattcctcattccaaatgacttttcaaatattaaactaatacctcctttgtggttagacaacttatgctcttttgggctgccaacacatcaaaatggaatatctctcactctgtttggataatataccctgtatatttggttcttcttggaggagcatgcagaaaagatatgtggtacctcttccaagaagaaagtagattcctttaaaaggaagcttaattttatttaatagaggtttctggacttctgtactctattttcttttagttgttaaggtaaataatgtagttcttacattttcttttcacaaggttctgagatgttttaaactaataagtcatagtaatttacaagttagctaaaacttgctgtctctctaccaccttacataataaatggagcctgtttgattttacttataagttaatatttccaaatgatcccaagagtgcagttgatattactaagtttctgagaatactgaaaactggactaaaaccattaaatttttttaatacactggatttctacctcagatgcaaagtaaaaaagctaagaagaaaattagaaatagtccaaattcacatggaaattgtctgtttaatttagatgttctaagaataaatgggggtctggagtctaatgatgctgtttctacctctatgcctgcaggtcaaagaggaacagaggataaagaaggagcttttctattgtgcaatttttattccctgcacaactttccctttgttagagtttccccagctctattctcccttctttgtcgttttactatttgagttcttaaacccctttattccccaccagtaggcttctgaaatgataaaactgcttttctaaaacattaattcctagatgttgtatgccaagtaacattaagtctgtggtgagcccagtgctgtcttcatgagaagcagcattaaagtctaaaatgtagggcttgatacagggaagaggtagtgaatggtcaactatcatgtggatggaagagaaaggaaagtactgtgctttggggctaagcaagatataaagggaaatagtctaatatgtctctcatgaatccggttgccagtgtgttccatgttttccctaagaatgtctcttggtttgcatggtccacatgtgtgccagctctcctccttgatattatatcattctttaggtatggcctctacgatgaccctctctgtcacagagtttgctaaataggtgtatattgctgggtcacttgccacacagcattctttcctccttcccctctaaactgccgtgggtatcctttgacctaaagatctgttaaaaagaaaagatgatttcatgtagctgggaccgaaagagaatgagagaagaaagctacccccacccatccagaactgcctaaaatgtttcccatggaatcaacatgacagggagcctcagtgggcattgtaaataaatttcaaaatgcaattatgtaaaaatctattataattactccctctctgcttacgaaagaacggctgtgggagtgtgtctagtgttctaatggctaagtttcatatacaccccgcacacccccccacattgctaaaagttttctttctgtaattgcagaatagtttagcatcttaacaataatggacatgtttttaaaagattattgccaaaagtgcattctttattccagggagactctgtaatagatactagcatttttagtaatgatacaggcaatctgtaagctattacagtttcctttagagtaacttaatcttcatattgttttgtatgtctagaattttaatagtgtttttaatttagaaaaggaggtttataacatattactaattacatgtgaatatgaactaaatacacaactactgaattttattctaaaaacaaacatatttaaaaagtacttaacctagtataaagaaaggaacaacgaaattaaagaatgccacataggaagaacagcagtgttcgtggtataacacagtgagggttagcattttgtggaacgcttgaattattttgatctataactaaaacattaagagaaatgaagatagcctcttctaactaatattaatatattttataacaaatgaaaatatgatttactaaacataactatgcatatttgtccaagacttagtaacaccatccatccaagggtctccaggaagttacagcaataattaataatacccctggtatcccttagtgattcagattgcttagtaagcatgctagatagcaaggccacttgaaatcatgtccaggttaaaaagccaggccctggatagacggctgcccctggcttttctactgggcaggtgaaagaacagaagggagatggattttcttaaaaataaaagtcgttactggaaatacttttagtttatatggttctaagacgcggatgagtatctgaatcttaaattatcatccatgatttcaacactccttgggcacagcacccagctcctctctaaggagctggcagagatgtgcttggtgagctgattcgggaaaatttagtactatttttaaaaatctagcttttatattaaacaaaccactttgctattttgaaaggagttataatctacttaaaactgtcactccctgtttctgcctcgcaattagatgatatttccaaaatgtcagaccaagactctgtttcttccatcaccataattgaatgtgacagccaagatattatatcaataccttttccataattagcaataaggatcctgccaagggttaaccagaaaagtttcataaacatttttctacaaatggtcctgaaggcagtattatgcttttaaaatctgctaatgtagcaaagacttgtgacaagcagaagacgaatctatagggagaactgtttggcaagaagagttttgtggtgtgtgatgtatgttatgtaaatgggcttattaggactctcatctattttattattggtgaccaatttaatagaggcatttaaaaaacaatatttctgcctgactcctagaagtgaagaagatacattgatataattgagagcaaatgattgcgtgtcgtgccatttaatcatgtcatttttcaattgctattttttgcactccactgcatgcttatagaatatttagcttcagtatagattgagttccagagtttgcaactgagcttggctctccatattggctagcattgttttagaaatttggaatcagttaaaacactcagacatcatttattttattttgtttaaaatatgtaaatcatcagtcacatgtcatttgcaatgctttaaattttgtctactttgagtaattatttatacatctaggatgtaaattctcatttgcaaagaactattgaccctttgtgaatgttgataattatttatataaaggacatttttttaatctttgtttagtctcttctttatcatttgtggaatgtacatctttttcagaaaaggaagtactttcaattgtctgcttggttcactggtgaatctcagacacttaaaacaatgtccataataataaacatttcatacatatttgtttaattaataatgtgtatttttccatcaatgctatcaaaaccatcctaggttcaaatatagtatattttacacatttttatgtcttaaggcttccaaataagtaaaagattggacttctaaaggatggaggttgttggctctcttagcactagctttatgtttgtagtcacttctggttaaaagcctagggcacgacagtttggaaatatcgagatcttacaagttaatgtagtgatcttacaagcaatcaagctttcttcttaaatgtcattgtttttcctgaatcagctttcagttccacggagctgagtgaaagggcctattgtcaagccttgtgatccgagtccagtccccttaacggacgtggtggaaggaaacactgacttctgcaagttgttcttagacctccacacacacacagtggtacacacacacacacacacacacacacacacacacacagaaagagagagagagagagagagagagagagagagagagagagagagagagagaggagaggtgaatactaaaaatgcacccaaaaattagtcagtgctatctgggattagggaaaataacccacaaattgctgtaaagaatagtacttgaacagttgacaagcaatcctaatgattattaatttatgttcaaatgagtatggataaactcattgaggcgaatatggcactgcttttattttgtgtttgtccagatatgaatgatcaacaggattgtctttggtgcaggatggggttatcatctgtttgtcaagccttccatttttgtaacgatgcaaagttgtatgcagagttgtatgtgaccatttcataagacacataagaatggcatcactgtaacaattggattcaactaatagtctttattttccagatttttttcacactcttctttcagatctagccttctccctattcttttctcttgatatattatggtatttttagaagtgggaggccttgatcaaagtcagacggcattatttttaccctagaaaaaatgtctgatctgtcgaatgacgtctgtaggtctgtgtcagtaattccatcccagtagaccttttagctattgccttagaaatacaaactgctcctggccttgcacatatgagtgtattggtccttcactgacccagggttgtacaatataagtttccaagctttaaactctctacttaatcacaaacttttaaatgtttttattattgttagtgtatgtctgtttgtagtatgtgtgtgtttgtgtgtgtgtgtggtgtgtgtgtgtgtgtgtgtatgtgagagagagggggnnnnnnnnnnnnnnnnnnnnnnnnnnnnnnnnnnnnnnnnnnnnnnnnnnnnnnnnnnnnnnnnnnnnnnnnnnnnnnnccaagtgttccagaatttaatgttgatcattaggcttgtactggaggtgctttggcctgctaagtcgtcttaccagctatcaaataagtcttttatggcataaaagtattcttgacttagacattgtctcaagacttacaacgtcagaacattaaattacactttgttttttttatatcagaacttattacaagatctcttctcagagaagctttattgatgatccaatctaaagtcttgcctattttattctacagttcttgttacatgacaattttgagtttgcatttatttccagcctcttccatccacacagagaaaattagaatataaattatatgaaagcaaaaagtgtgcaccttgtatactgctgtatcgatcacttagaaaagcacttggcacacagaaggcacttcagaagttcatcggtgggtgggcagaaaacttagtaattatcatcatcatacccttcgttaccttctagattttaaaaactgtggtcaaatttgtggttttcaacttttcttctattacgctaatcctctcctccacctgccagcattcagaagcctcatgttagtcctatgactcctagtcagtctcttccagccaatggtgacctttcttgttcctcaggccaaatgccagcactgagtgataatacagaacacgtgaatcatggcctcactagtcttacaacttcttgatgaattaagcattatcaaaaacctttgccttgtattgatatcctttcctttgaagaatcagccaccttagaagctcctaggaggcactgcatcttgttacacatctggcatcctccaatgttaatcctgtaatggacagtacaatgcttggcacataactgatacccataaagtgcttactgctgtaataatatcattcatacagcctttgccaaactttgctccctgatatcgatctagaatcaagcagcaaaaagcctcttctgcagcagagattcgagctctaggtttaaattggaatttaggactttgtatttttatgtttctaaaaataatctactcaagtggcttctccaatttgtaaagtttaatctgctttgtctataatactattttcaaactttaggctgcaatcaggctttgttaaactgaagctcacagggaatccctgcctcataaacatgtgaacgacacccaagaatctgcaggctagcttcgttttatttccttccttaagatgctacctaaccatgtagccccagctgccctgcaatttattattcattcaggctgaccctaaacttacgacccctttgcctcagcctcctgactatctgggattatacgcagggcagaatgtgcagttctaagttcctggatgatgcaaatactcctgggtctggggagtccacttctgttctggaaaacaatactacatatagcaaataggaagaaaattaccagcccatgaaatcaagatggtaaaatgtaaagtatccaaaaaaaattaacataggcagaagtataggaaattgtcaaaaggagattttctgtcctggggccatttaacctagagcacacctgtgtgtggctgtcgttttccctttaccattctgttgcttcattcacattgggttgaaggcagccataggtcctatatgcacatcactctctcattcctgagcttgtcccatacaaaagataccacattttgtaaatcagttgatcagtacagaaggcgaagtaatgtttgcctttataaacagcagtgactgtttcatagctctttgttttaacacttgatccaacctcacgatttgtacctcatgtggacctagtcagtagagttaacacgttgaacaaaaaattgtgtgagagatactggagatgagatgctttggagttcccccagttgcatttgcttctctgtgttcaatattcttagtttggtgtatttttagaccctttatcttacccttcctctcattcccctagttagcatatgttttaatataatagttcttttgataacacttgttcttttagtgtgtgtttgttttcattcatttgcattttgtgaggtagagaatgcttgtttgacaccacgaaggtgtacatacacataaatgcttctttttatgtgatacgttctcatttaagcaaatgtttaacacagtgagaatggagtggtggcattgagcgtcttccctccaatgctgccaagagtctaggtccagtgaaaaatgtcgaggtaggcttggtagagaatggtagcgcactgcttaccatttgtgaggctctgggttcaattcccagcactacaaaaggaaaagaaaagtattttctttctttctttcttttttttttaaatcattctttgactcactaatatgagtgatttagacatgaaaaggttgattaagtcagaagatattcaaaacaaagcattttctccaaaaatcttgtgtaccgccattggtgaattgaaagtcagattggcagttgatgaataagggaaaaggtgccatccacttatttataactttcttataatgtgacccaaaacaaatacattcatctggccattttaaggaaagggggattacttctcaatcttaaatcatgaaagtttgattattattattattattattagtagtagtagtagtagtagtagtagtagtagtagtagtagtatcatcatcatcattattttattaccttttcatgtttattacaaatctgccttttttagaaacgtgacaaaacttggtgaaaactacaaaaataaataagagagataggaatttgagaggagcattgcagcctgtatcctgccagccctgctgaggggagacagtcaggtactgacgaagatgggctttcgcagtagtaaaacattgggaatcccttgttggacatactgacaatcgcgtctaaaaactgctttcctggcctcttcttactctatttctcacgaaggcggtgtggctgtgcatccaaaccagtatggcctcattagaacaagcttcagagttgatgtaattgctgcactgacgagcactccacatggttctgtgtcctctcaccttccccagctacattatcactttgtctcctctaacacagtagtatacactccttaccatccaaggccgcttgcttgtgttccaccttaacatgtctcgggactctctaccccataactccatcgctcctcttggaccaccaggttcccaccacttccttaacaatgcctcaacttccagcagcaacctgcttgcacacacttttcatttctctctgtctgtctgtctgtctctccctccctctctttctctgtatgtgtgtgtgtctttctctccctctctgtcttggtctgtctgtctctctctgtctctgtctctctctctgtctctctctctcatacacacacacacacagataacatatttatttatctacttcatctctactagactctcaactccttgaaagaaagaatggtgacttggccacagtgcagtcctccattaggaggctcacaaagtagactatacattgcagatttgaggaggtcctagaagaacatttgtcttattctgtgccttaattacctagctatagtttctgttttcaaagtatatttctctaaaacccaaggcaaaagttaataataatcatttgttcccattagctatatttaacatttctcagtacatatggagaatgtgtatctcagtttgttataaaaaataatgtagaatatggattctaaaaaatgttgccaacaaactaccgattttatttagtatgtatgatttataaataagtacattttgatggttgtcagagtaacacatttatgtaggagaatgttatcaactgtatctaggtataaaggaatattgaaaaaaatgttaagtatagaaagtctctattttccttctcttttgaacagtgcacacataaaaaaaattaatcgagaatatacactaaacctttagatatttaaagtgaaaataacagaactgtaaaggcaaaaaaaatcagattgtaaatgttaacactatctgatttttttagttaaaatttttagaatattatttatatgtgggccatggtgtgtgtgtattgtgagtgcatgccatcatgagggtatgtgcactcatgtgcttgcacatggaggccagaagaggataccaggtgtcttctactgttctctgtcctaattccttgagacaaggtctctctctctgaacccaaatgcagcatgtgctaggctggctggcaagtgagatttaagaagctacctgcctttacattgcagtgtgtgtgtgtgtgtgtgtgtgtgtgtgtgtgtgtgtgtaaggaggttacaggtaagaatttgaactcgggattttgatcttgcagagcaagagctctgacccatctcttctcccttgcttttctggttttgaagaaaatgtgtttatcataatttgcttgcattaagatgtagatgcagactcactggatttgtagatacattctggtcacggtcagaacatcgtggtcaatttcatgaaaattgattacatcctcagataccatatttgagaactttgtgaggtacaagaaactcatctgaggtactttgcgcatgtggcttgagccatgtacaaggtgaatgtgtagtgccattcattgtgattttttttccttcagctaaaaattttgaggcttcctgttggcttatagatatgcagtttatatttatttatttgtttgtttatttattcatgttattttatttatattatgaaatttatttatattattctacttaactttaaggagaggtttgcagaatccattttcataaaaccatttccttatttttcttagcccttttcttttaacatccacagatcaaaaccctaagtcattaacattcacatcggtaggtctcatttgaagcaatttcaactggctataaccatgctactttctttcattagtcaatattgagcaaaattttggtaggcacgaggtgaacttcatcatgtagatgacttaacagttataaattaagacagtaagttgaagtgagtgtgcacacctgtgtgtgtgtgtgtgtgtgtttcatgatgggctgaggaggtagttgggagcactgccatgggagagggaaacagtattattgctttcctaggctctgagtttacctttgcttgctgaggggtttcctctcctcagcactgaactacctggtgaatagcaccaggaaaggaatttgtcaggcccagtgtggtatcaggagttagataggaaaatagtaatgcaccctaggaaaataaataagaattagttcaggaaacccaactcaaacagctgcactggtaagatgtgaataataaaattcctagtcatattttgccataaatagaggtttgggaatttgtcattcaccttatttaaaattcagaaatattaaaggtacaggttctctcattacggaaataatagaattccagctattaccaagttagggtcatttaaatggatatagcatgcattgtatccataagtggaacatctgtatcaaatgtccacctgctgatcgactactctgctccgcacacaattcagtgaacagcacttaatcattttaagacttctcctaatgaagccttatctagattaacattttaagcacaaatactttcaggcattaaaaccctcacactaaatgaaattgcattgtcttgtttacccttgttgattaataagcaatctgttaactgttagaagcgtccaattgtggcagtagagggagattagtaattcagtgatgtttgtgggtataatcatcgtttctcctgaaggctttgaattagaatatcacttacacattatccataggcaagggaaggatataatatttttagacatgttgtacccactattttgcttcgattgttcagcttagggtcagtgcagcaatacaaatgtttctggggggcaaaatgctatttttgatgcatgcatatcctttttaaatagtgtgagtgtctattaaaagacacagagcagacagcaaactgtgcagtaataatccagtatcttggatgctgttataagaacgttattgctttgttaatcaagcattggaagagaaatattgcccagtgtttcttgttttttagataatggagtttgtatatgaagattctttgcaatattatttacttttgccaatgaaatattgaacttttccccccaaagaatctagagataaatgtagaagaataattacatttgggggaaagattttctgcttcttgtgtttcctttgaccttgaaacaacactccagtttgtttgactgggactcatagaacctaaatgatttcatttttcaccatgtgagaaactcttcataccaaggtataaaagaactagtttagaaagataaatcagcggaaaggggaagaggacacaaaaggtcctaaaatctctagcattggtcaactacgtattgtcggccaccaatctcaaggaaactgtaggtctctttccttgcccttagtgttacaagctgagcatatccctacaacgtgaaattatggtggaaatactcacttcatggtgtcagaaagtcagtcctacaaacacacacaaactgatcttttttctgcattgcagtcgctctgtcatgagatcaagcagcggcgtagaggagtggcctccattctgaggttgtgccagcaccttctggatgaccgggacacttgtaatctgaacgcagatcaccagcccatgcagctgatcattgtaaaccttgaaagaaggtgggaagccatcgtcatgcaagctgtccagtggcaaacacggttacgaaagaagatgggaaaagaatctgtgagtgtcttctgccagcagaatcagctcgctctttcacaaacacatacccctaggatttgggcaatacattcaacatataccctggggtttgggcaatacagtcatcatataccctagggtttgggaaatacagtcttcatcatataccctagggtttgggcaatacagtcttcatcatataccctagggtttgggcaatacagtcttcatcatataccctagggtgtgggaaatacagtcttcatcatataccctaggatttgggcaatacagtcttcatcatataccctagggtttgggaaatacagtcttcatcatataccctagggtctgggcaatacagtcttcatcatacaccctagggtttgggcaatacagtcttcatcatataccctagggtttgggaaatacagtcttcatcatatactctagggtttgggcaatacagtcttcatcatatacacttccttgcaaactagaggcgtgactatgcattaaccaaaactccattcattgtaacacagacagttactcactttactgacattcattttagcacatctcattgtcttttgaaaaaagccacatgcatgttttggctaatgttaccactaaggatagtaatccttttatttattccttcaccaaacatattcatgaagtagacaatcctccaaggatattttggtaggaggtatattaatgctctgagtgtgtggagcagtgtgcatgttctgtgtgcagtgtcattgctgaatatctattgtttatctttccctttaatgaggagatgacaccatctgtacacctgtccccactggtcctgcttcgagtgtcttctgatggattactgagagctgtcaagtttcttcctagagtttaatgcagtattcatagtagggggtagtcattcccattaacaattttccagatttgacagtgcaggtttaagtagtttttagaagaaagaaacatgtagaggtaggagttgttttactatactatagaatatacattttctctggaagccttcatattcttaggaggagagatagtcactgaaaagcatatacttctgaaatgaccttgacatcagtgtttatcagttgtagggacaatttctacatttgaattacataagcgaaatacatatatagaatggggtgaggtgtgtgtgtgtgtgtgtgtgtgtgtttcagctcagcagggaaagttcagaatgaaaagaagggaaaccaatataaaaatcttgccattgaaaatagtttcacatacaaattctattcttaacaaagccataggatttactctctggtttgttttatattgaggacttgggtcaggaagacagcgaatcattcgacctatgtgtctgccccctttccctttgaggcaatgctgaatctaggagataattcctctcaacagctctcttcaagtgatcttagctgaggttaaatgtcttaagatctccaaattattgtccgtaaccagagtcaacataatgggatgtattttcttgaaataacatttttgttgtgaagctgtttaactaatatgttttcttccctcccccttcctcttctttttgataatgtttgtaaaggcaaaagaggttgttattcttccctctacttttcaatgatgatgataatgtgacttaattaagcactagtggcattttagagtattcaactggttgagcaaagacaagtaatcgtcttccagggtttatttgtttatttgaatcatatgattaggaatgctagattgggctgtacacactatatgtagagaatgggtatttgcttgtgtgtgtgtgtgtgtgtgtgtgtgtgtgtgtgtgtgtgtgtgtgtgtgtgtgtgtgtgtgtgtgtgtggtgtatgagggagtagccacaagtgtccttgagtataatatatgagggtttgtgcatgtgtgttatgtgtgtatgccagtgagcctgcttcccatggggaggcaagagaaggacatgtcctactgtcactctcttattcccttgatacagggcctcacagaatctgtagctaagctggctatcagcaagccccagtggtcccttttctttccactcctcacagtactggagtcataggcacaccccactgtgacatgtctgctggggatctgaactctggtcctgtcacttgctcagaaaacatattttttgccaaggcatctcccagtcctctggaatgttttacctacatctattataaaggcaggttgcttcttggaaacaagaagaggttatatactttgcagagaggagtggtgtagcatgatgaaggtagtaaatgaaattgtttatgataaaataggctgaaagttactcccaggaaaggagtggaaaggtggtgagcagcctggagttaacaacacagtgaacttgggggactggtatattgtgggtgtttctttgcttctggaccctgtagttgagtgaggaatagaaatcgtttttatgatcacacaagtatttcaataatgcaagaggtgacctttgccaaaggccaaaggtctgcaagtggcctgttcacctgcccacaataagccaccactcccctccatttcctgatttctactgctatatttccaaaacttgccatatattttgcatacataggccctgggtgaatatttgctgaataagtgaatatatggctttgtttatgaaatttctttcattcagcattggtataactatatactatacctattctacattttcatcttttacaaaagaagtcagtatatttctgagagtcatgctttgggaatcatcttatttctgtaaggatattttaccttcataagctaacttttaaccttcttttcttatctaacaaggctttctcagactccttagtctattttctcaattcaaggaaactttcagcctctgcatgaaatatgaggaggccaacatggcgaaatcactgtaagtctttagggtgccagaaagcagaaggttccacagtcaggaagctccagaactaacaaaactatcatctgaggtctccagcaggaagaaagtactgaaaaaaatcaatttgtgacacttctatgaagctaaaaatagttccctttttgttcagttgcattagaaaatgtcactatcagagtgtgatgtgtcatctcagttgtgaactggatgggatctaaagtcacatgggagatgggcctctgggcatccttttgttttccatgacagggtttctgtgtttagtcctggctgtcgtgggacttactctgtagaccaggctagcttttaacccagagatccgcctgcctctaccttccaagtgctgggattaaaggtgtgtcccacaaccggtggcctctgggtatatttataaaaagtgatcttgattaagttaactgaggtgggaagacctactcagtgtggttggaaccattccctaagctgagataaagtgagctgagcactagcattgctctctgccttgtggctttggacacaatgggatcgtccatctcaagctcctactgccatgactttttccttgttacatgcagacacgatcaggttgataagaaccagtgttgggacagcatcttcaggcagctagaggagggatgagagagaggtgggtttaagaagaatgactgccagcttcttgtcagaagcaatggatgtcaggagatggaaaaggtggagatggaggtgaagcagcgatgtaaggaaataacctagacttccctaacagagcaaatgacatccagaaaggaaaagaaagacgggttctaaatatctatggggaaagcagtcatcaccagtttacttatactactagaagtgttaagggaaagccatcaaccaagcacaacttacacccaataggaacctggatgcgcacagaggaataaagaacatggaaatgataactgaggaaatgagaagcgctttccctattatttcaatctctttaagtgttaatagactgtttaaatcaagataatagcagtgcatggtacgattgatagcacagaggataaaatgtacaacaacagtatcacaaaggccggggagcagaactgccatggtgctttgtaccgtttttattttatgtgaggtactagaacatactttaaagggaggccgtgataagatcaaatgtgtatgtggccattacaccttaaaaatacagcaaaacaaaacgctagagtaagacacaaaaggaaatggagcaggatcattttttaaattcccattttaaaaagaagacgaaaataagaaacagatgtaataaggttttttttagaggcaagatgaagatttaaagtggccgcatcaatagtcctagtgaatgaaacagactggaaactgcttaaaagaaagtaattgttaaattaggtaaactcaaccacacactgcctccccaggaatggttagagtgagtatattaatattaaacaaggtagatttcagagcaacaaaatcacaatgtataaagaagggcatgtcttcaccatgggagttccaatttaccatgagcacaagacatttataaatgtctaggacagcttacaaatacatcacacagaaaaactacagtgctgtgaagaggcaaaaaaccccagaacatcaaacagggtttccaacagtttgtctcaataactgatagagcagaaagtcagtatgaacagaagaagacatgaatgatagtttgagacagcatgaccaaactgaacactgcaagtcttaagaaaaaggcaagatggtatagacaaaagctgactccgtttaccgctggtgggaaggttgattgctgcacctgtggaatatgatatgaaagtccttgaagtatttgaaaagagaattactgtttgagcccaaaacctctggcctgggtatgtgccatcccctcatttaggagcctgtagacccttgttcttcaaacattatccaccatagtcaaagtgtggaatctgaggtgatcactggtgagtgaattgaggaaaattattatgtttatgtttattctttatagattctgacatttacaacaacatggaaaactctagtgtattagtcagagttctctagagtcaaagaacttaagagtagtctctatatagtaagggaatttgttgatgacttacaatctgtagtccaactcccaaacagtggccagcagcagctgggaatggaaatccaaggatctagcagttgctcagtcccacaaggcaagcaggcaaagaagagaaagtgaatcttccttctttcaacatccttatgtaggtctccagtagaaggtgtgtcccagattaaaggtgtgtaccaccacacctggatctgggacttgctttgtcccagatgaccttgaactcacaaatcttcttgccttagtctcctgggattcagagccactatacttcaagatctccatgccaagatccaggtcagaaacttgtatctcctagccccaagatcaggatcacaggcgagccttccaaatctggattgtagttcattccagatacagtcaagttaaaaaccaggaatagccactacacctagacagcaccataatgacatttaacaagtggacaccaaaaaaaaaaaaaatactagacaatctgatgtgtatgtggaatcttagtgtaggaacagaggagaatggtggttgccagggcagggcacaggaaacatgagaagacatcaaagaatacaatttcaattatgatagaatgaataatctggagatgcaatgtatgaaaggatagatgtagttagtaatattgcctttcatactctcttggtggtaagagagtaagttttaggcgttcttaccacacacatatacaaaagaaactctgagattatggatatgtaaattatattgactattatattcgctttactgtatgtatgcatatcaaaatggttaaactcttatacacacacatataattgataagcatgtcatctaataacaagatgacattattttaaatgtatataggacatgtatcaaaactcttctaaatcacaaaccaatttttaaaagaatttatattacacaggcataaccaaggtattgtagattacagctgcaatgcttacttaacaccaagtgtgctccttgtctatcacagaattagtttaaaaatatacctgtatttttcacataaatgtaaaataacatacttaaagtttctaccatatccttgtcccatgtttggaagatctttgtggacaatccctctcttggttttccaattcagtggtacagctatttggggataacaggccaaatcatgatagaaacaaagccagaatcttctacaacttggagctgtctgaggatgtaatttcagaagagacgagctggaggagatcaagatatcatttcagaatggccctgacagaatgctacatcatcatgaccactgggcacttcctagatggctccaagattttggaggacagtgtttgggagttgatcgtgaccactgagtatgctgaccttgaatgaagcatcatcctatatgggttttcctacaaatgccagtagtattccccctgggaaacacttcattctgccaagattcggactatccttattttcatattcattctgaggacagatgtcttaaaatatgcctctgaaagacatttactctagctttgcttagccttgctaagagatgcaaggctttttctacagtgcaacaaatattttttgtttgtttgtttgttttgtttgttttttggtgttttttgtttgttttgttttgttttgttttttttgagacagggtttctctgtgtagccctggctgtcctgaaactcactctgtagaccaggctggcctcgaactcagaaattcgcctgcctctgcctcccaagtgctgggattaaaggcgtgtgccaccacgcccagctgcaacaaatcttttgtctatagaagaagttgtgaattcaggaggggcgaaggccctggggcagtgggaagagggagaagaatgataagaaatggtataacatatctgtgtaatgaactctcagaaattaaaatcagctaaatatttaaaagaagaaaaggagaagggggagaaggaagaggaagaggaagaggaggaagaggaggaagaggaagaggacttgtcttgacaggcatggtagcatgagttataattctagcactccagatgcaaagacaggaaaatggagagttagaagccagcccgagctatatagtacactccaggcggcctgtgctactcaatgagagattgtctggaaacacagcaaaaacataagaggaatggaaggcagaagaaaattttctttagtatctgttttcctatcagttttaattttttctgagagctgtggatgattctatcactattttcttaggcaacgtcatcgccaagagtaaataagccacacttgcttttcaaacaaatgtttaagcagaaataatctagggtcctttgaactaccttgctgtatggaagtgccccttcaggttcttgatgggttaagggttgaggttttattttcacctgcacagttttcttgcttctgctctgatcctccagagctctgctgagaatagaactttgcgtccagcaacaccttacacgtctaatggccttgaaagtatacaacacatctagccacataattgaaaataataaggccacgataaatgggatggccccagggtaaaacacccaagggattcaatcggtgtcactttgcatcaacgtccgtgcatcatggtaattgaggtaacatagccaattaccacattttaattagagttctaagaacttgaggaaaattgcaatgatgagcccgctcactttttaaaagaaaagaaggaaggaaacaataggagaggaacctgacacgttgcgtgcgtagctcaggctccttacaaggggaggctatagaaagccattggcctcttctctctctttctcctcctttttctttctttttctctgaatactttcccatttgctctttactattactggtgatacatcttgaaaataagaacttttaaatgctattttgttttacctaggtgatagtgtccccgccctgatcttactaataattttacaatgttattagtaaagaaattcctcataatacaacctcagcttataatttgactttccctgggtgtctttcacattgtaacctgaagagctgtcctaagtggtaacgtactgatgaagtacacatttctctgactctggccaccaaacaaaaatagacttagattccacccccaccccacccccacgaacaaaaattaaatgcagaaagaattactgcatttagaaaataaatttgacttgtggcaattatttttataaggctagagtttaagtgagaaacctcctgtaaaattttactgctgctacataatcaagtaattatgtaattacttgtacttaattgcttacaagagagatggttgttaaaaaaaatctttatacatgtcaaaaacagcttccttctttagaatatttctacccgggctcccaatatcaagaagctttccccgtaaataattgtattccataaatctcttgttattttttctaaagatatgaaaatacatcatatagatatttacatgccctctctcttatttctacttatggtcagagagggctggggaggagaagagaaaaggagaggggagtaagaagaggaggatggaggaaaagaagcaaaagtagaaggaatgaaagaaggaagaaataattttaaattataattgaatattaaatatagaagacgttgagctgaagaacttaacatgggcagaaatggattacttctatgaacgttacaaacaaatgctgtgactaagagtctgtccattagttgtgttgctgtggcaaatcccttctctttgtccacctccatgtcttcatctggaaggcagagaggacagcactgcttgcctctgggttacagaggttaagggaatcatgtgcaagacgtttcttccaacagttgtgagcacatagccagtaaatggtatttgctgttggcatttatcgtattgctctaagaaagtcttacttttaaagtttgaatacttattcagtatcctgactgactgactattgcctatgacaatcagcatcgtggattaaagctgtctatactgaaaatctttgttgggatgctttccacattctgcagaacagaaactaaaattacctgttgtacaatagtctcaagaacagtcctggaggcattttgaccatacacatgagtattgtctaataaacacatctctttgtagtggctggaccccaccaccatgtgtcttgactgagttcacagatctgtcatatggatgttgtatgtatgcatacatgttgtatataacctatagcctcctgtcactccttttacgttaagcttttcctggcaatacacatagcttgtggacccaccaaaggaacattacattttgtgacttagcaaatattggcctccagtaccaaaagttccagaacctctgcctcaaagtttcctctctttgtaggtccaaaattttaagaccagatattataattgttttaattataatagctcccccacctctaaaattgcttacatcatcactagcgccattaaagtcacccacactgtcacaactaccacagctgccaccaaagccaccatgaccaccaaagtttcttctatgacccaaattgtcattgccaccaaagccacctccatcatcaccaccaaatattctgaagcacgctgacctctctggctggatgaagcactagccatctcctgtttccatggggcttttcttccttcacagtgtggccactcataatacggtactttcagatgacagtcttatccatggaatcatggcagtcaaaggtcacaaaagcagagcccctctgctttctactgtctctgtcaattatgagttcaatcactttgacacccccccccccatgttcaaaataatctcacaggtgttctttagtgtcttccttaatgccaacaacagagatctttttcagttagttacaccacggcaacctggattttgagaatcttctgacacggctctctttggctccacaactctaaccatcacctcatgtagctttgcattgatagattcatcagcttctgcagactggtatacacaacaaatccaaagcccctggagcatttggtatttggatgtctcatcaccgcacagttggtgagaagtggtccccattgcccaaaatgctcctcagactcatcatcgggtgttctgaaactcagctgctgagctgacgagcattgacgagattacctggctgttggagctgcttaagtctgagacccctgtagacttgaaggcagggaaataagagccttcagcaatgcttcctctgacacatcaatggacagatgggagtaagccaatgagcgcattcacaagccttactgtttgtgccacactgcctgggctagcccagttaatatatttgtgcttaataagaaatcttttctttttgttcctgcttaggactttattttaaaatcttttttatttgttttttattagcatataccaattcataacatagtgggtttgattgtgctattttcatatgtgcatatgatacagcttgatcacacccatcccgcatcaccttttcttgttcccctgcctcctcctgctcttcgctttgctcttcccaaacattcttccctgatattcaaagctcagctttttaaggtctagatcccatacatgagagaaatcatgtgatgtttgtctttgaatatagctcatttttaaaaacctgatgatggcacttttcttcaaatgacattatttcatcctttatgaacgaatatttcccattgtctatgtattacacattttctttatctgcttgatcactttctcttggcacttctggtagagattttaaatttattattgtctactctcattgatcctttggctgtctctagtctaatctagtcctttaaagttttttttttaattagatattttctttatatacatttcaaatttcaaatgctatcccgaaagttccctatactctccccctgccctactcccctacccatccactcccatttcttggccctggcattcccctgtactggggcatataaagtttgcaataccaaggggcctctcttcccagtgatggccaactaggccatcttctgctacatatgcagctagagacatgagctctgggggtactggttagttcatattattgttctacctatagggttgcagaccccttcagctcctttggtgctttctctagcttctccattgggggccctgtgttccatcttatagataactgtgagcatccacttccgtatttaccaggctcagcctcatatgagacagctataccagggtcccttcatcaaaatcttgcttgcatacacagtagtgtctgggtttagtggctgattatgggatggatcctgggtggggcagtctctggatagtccatcctttcgtcttagctccaaactttgtctctgtaactcctttaatgggtattttgttccctattctgaggaggaacgaagtatccactcattggtctccccttaatcatcagggaaatacaaatcaaaacaaccttgaaaaacagtcagaatggctaagatcaaaaattcaggtgacagcagatgctggcgaggatgtggagaaagaggaacactcctccattgctggtgggattgcaagcttgtacaaccactctggaaatcagtctggcagttcctcagaaaactggacatagtactaccgaaagatccagcaatacttctcatgggcatagacccagaagatgttccaactggtaataagaacacatgatccactatgttcatagcagccttatttataataatcagaagctggaaagaacccagatgtccctcaacagaagaatggatacagaaaatgtggtacatttacacaatggagtactactcagctattaaaaacaacgaatttatgaaattcttggacaaatggaggtacctggaggaaaacatccttagtgaggtaacccaatcacaaaagaagtcattagatatgcactcactgataagtggatattagcccagaaacatagaacacccaagatacaatttgcaaaacacaagaaaataaagtttttcttgattttacttacagttttaagttttgtggtttttgtttgattatttgtttttttaatgtgagtacactgtcactcccctcagacacaccagaagagggcatcagatcttatcacagatggttgtgagccaccacgtgcttgctgggaattaaactcagggcctctggaagagcagtcagtgctcttaaccactgagctatctctccagcccccagttttgagtttttatttgtagcatttaattttgcttactagtgattctttctcttcttgttttacccatgtatgtgtgttattgatttctccattggaggtgttagtacattaatcatagttacttagaactttctggtaattctaaaatctgtgtcatatcgaggttatttttgaggcttatctcattagactctttccgagcttttagcatgtcttatgtggcttatgttgccttttaaagatgggcactgtgtgttaaccaataaaaactaagtttaatgggctcttcatgtgaattttatattgatctgtctaggagttgagctgtatctcatatagccacagctatggtccttttgtgcagagctctcagctccttactgttcttgcttttgtttctcctcttatcattgctcttatctccaggatttcctaagagtcttctgcaaacatcttttaccgtttctagctctaacccactgttatactggaaccctgttgagcgagggacttgacaaagggtgagggagaaggtgcattctccggcactgacagttgtttctaaatgtgtttgtccttgtacttactgtcagcatccctctgactcttagcttgtccacctgcttagttaagataggaaggctagaggggttgatggcagagaaatggcctttttcctcctggaagaatcccaatggtagactagcttcctttccatgctagtatgcttgtctccaagtcctgccctctagttataagagtgtatggctgaaattactgtaattattcaacctcctcatgtaacatatattataattccatgtttagaaaccaaaatccataacctcccaagccccgactgatggaccccactgtaactgcagaaacattttacacctatcttgttctaaatccttatttttaaattgccaaaggatatggccagacaagtctataaataaataaatatcagtaaatatggtactaaataaaccatgcacgagcatccaacctaacaagtcagagaagacatgcaaaggatcactatcagtatcatcaaaatatttatctgtttaagactttttctggctgggcctggtggcacacgcctttaatcccagcacttgggaggcagaggcaggcggatttctgagttcgaggccagcctggtctacaaagtaagtaccaggacagcccaggctacacagagaaaccctgtctttaaaaaataaaaaataaaaaaaaaagactttgtctgcagatagcctaagctaatcctatgacaatatcctcatggcatctataaatccatgcccaaagtggaagtaatatgaagttctaaaaacacatgtttcctggtgattctgactaggagtatttagcagggtggccttcctggagcaagccatcactttgagtgtatgttctctctattcccagtgtgcactctgctttgtgactgtgctgtaagacttgagccctcggctcctgctcttggtatccagttcctgcttccaactccccctatcatcacagactctgatcctctagaaccataaacccaaataaagccttacttctgcaaaaataaaataaaatataataaaataaaaataatacatgtttccagtagacttttaagaatacctaaaatgattaagactcaacattcctcatgagtattttatgatctgggaagtttgatacagtgcggagacagcatgtgtgtataatgctgatcatgtcacgaatgcataggacagttctgaattttaatatgtttttatataatatgttttatatgtcagggattaagtaaaatggtaagtgagttatgttaaaatttttatattattattttccttatatttgttttgatttaaaagaatttttgtattataatacatcattttatagaagaatagtttttctaaaaatgtcctgcccagctctccaaacacttcccttgccagcttcagtctgagcactctgggtcacattgatctctctcccctttctttattcatcctgctccgcctggctttcaagtccagttgctctttttatctcattcttctctctaggcaatctcaccccacccattgcttcaggaactccagacacacaaagtcaggactacaactctctggagagctccccgaggcatttcaaactctgtctgttcaaaagagaaatcctaatctttcctgacaaactgatccttctccagtatagatctcaagaaaaaaacaatcatctcttcagtagtgtaaaggcaaagaaggggtcctcagtcactcttcactgtatcctgggcatccggctgatggattcactgtataaagagccctgtcccctgatgcaccactgccactgtagtccaagctgaattaagctctagccaatgattagtttgcataaagtacttgagcgattcccggtacacaaagccagcattcagtacacatgagttaggcttgctcttagccgtacctctgtcttcctcatattgcctgtgttctctccaccctgaaggctgtgtaatctgttaaaagtactaatctgattacttctgtatctgcgtgtacaggtttgcttcccttccaatctctgctctccctgggggccagaccttctgtttgctgccaaaccttttcgctcagaccactccctttgcactccctaacccaaagcctggtgctttctgccttcagggtgcatccatccctcaattccctccaaacttctcaggagatcttttcctgaccttctagaagaaattgaacctcttccctatatcatataacagacaataactgatccactggctgcaaaacatatctttattttctttttactttttacctagtattcagtaaatttgttgaatatataaacatatttgatcaatatatgtttatagcacagatgaatagagttgtctaaaaagatagtcataacttgccttaggctattacttattttcaattgtatcccaacctgctgcctagttcttataagtctacctcttcaccttctgacacgttcatgttttaaccagccaaagaaacctcttgtttccttgtgaagaagtctgtcttgtgttctgaattgccagccatgagctaagccattaagtctttataggtcaggagtcctgggaagagctcagactagtaagtagccttttgcaatgaacaactacttttttcctttcccctgccatgcaagctctaattttctctgttatgacttgaaagggaacaaaaagtatggtctagaaatgcaggcattaagcctcggtactgatctgttgatcatgaagtcgtattaagttctgattcgagagaaaacggttaagtggaaatgccactagtgtcaaataattgcctcctcctgctccaggaagattagtcttatcctgactttcttttttactcagtctaatatctaggtctgttgtttctcctggattgtgtttacaattttaagcatatttatggctgagtttgctgaatatcagataaaaatattatgtttaagtcacaggaatttgaaattaaaatatcaaaattgaaaaggcaattttttgtgtataaaagaaattacatagaacattacaggtataagcccataggctcaagatatcaaagctaaagctattttaacacagataaaaaaaatatatttttctcatagccataatgctgccagtttattactgttggctcacaatgtgcattgtattccgaatggttaatctatttgcccacatggtttttgctgattccactgggttatgggttaggagggaatgaaactactgataatctagaaacacctcgtgagtacctggggcatgcttgtaactctggctttttcctgcagaaaatgatcttcactctcagtgaactttcaagccatatatactgacagtactgacatagacgagacaataattacatcaaactgtttgggatggaaatgacagcatctgttacaaagtcagctatgagacactgtgagatgctttctgtgtgtttagtgtctgggcagtacggtgttaggttcaatgaatatatgttaaataaataaatgattatgctaaattataggactctatctctaatgtaagaatcaaatgagagagagagagagagagagacctttgagggctaagtgattttgaaattattctttaaaagaatcaatgactgtattttaaaaaaattcggatgaagaaaatagagcccacatctacccatctgttcattcacttgaaaatgctaatgagcatctaccaagaacaaaggtacatcttctaagatcttcaatttctttcttcagagacttgaagttcttatcacacagatctttcacctgcttagagtcacaccaaatattttatattatttgtgatgattgtgaagggtggtgttttcctaatttctttctcagcctgtttatcctttgtgtagaggaaggccactgattttgtttaagttaattttatatccagctactttgttgaagttgtttataaggtctagtggaatttttggggccatttaagtatactatcatatcatctgcaaatagtgacattttgacttcttcctttccaatttgtatccctttgatctccttttgttgtctaattgctctggctaggacttcaagtactatattgaataggtagggagagagtgggcagccttgtctagtccctgattttagtgggattgcttcaagtttctctccatttagtttgatgttggctactggtttgctgtatattactttactatgtttagatatgggccttgaattcctgatctttccaaaacttttatcatcaatggaaggataggcccttggtcctgtgaaggttctatgccccagtatagagggatgccagggccaggaatcaggtatgggtgggttggtgagcagggggagggggaatgggagaggaagttttcagaggggaaaccaggaaaggggataatatttgaaatgtaaataaagtaaatatctaattttttttaaaatgtaaaaaaaaaaaaaaaaagaacaaagatacagagccattcattaatgaggcaatcattgcagtgaatgttagcttcacaagagggctacagatagaatgcccttcttatatctaaccagattagggaaggtcttcaaaacctcagtaatttagaatgactatatttattgaaagctgtgtgtgtgtgtgtgtatgtgtgtgtatgtgtgtgtatgcgcgtgcgtgcgtgcatgtgcgcgcacacgctcgagcgtgtacatgcatgtgcatgtgcatgtggttttgtgtgtgaaaaaaggtggtttggttttatgagtgaaacagtaaaatgcaaggacttattttaaggagtttgctttgaaagtgatgcaggactgtagtaaacacgctattatcttcagtttcatttaaagttttatgatgggatttttttcataaattcacacaagactgtttaatggccttctaagtagggttttttcttgtgcatttgtgttattcaggctttgttatgtggctctggcaaaggactgggatgatcaaaggaagaaagatttattttggctcatggtttcagaggttctcttcatagtcagccaacctcattgttcctgggcctgcagggaagcaaaacctaacagcagcagagtgccatagagcagaactgcttgccttgtgttgaccaagttacagagagttcgaaaggaaagcggagcacatgacatagctcccaggcatatgtccaagactcctcctgtcaacaaagtctcatctcccgagtgtctgtcactgcccgagaactgttgaattatgaacctactagcatcagtcagaggtcacatcatagcgtcccatcgctgaacttacctctgaaccagacctttaacacattgttacaacagggtcttgccttctttttctggatgcaatgtagttctatctcttgagtatgcaactgtggaaatagagggtttgccatcgtcctagggaaagtcattttttttttcacgtggtgtaacatctccaactcccttgtcctaaattttaaagaccattctacaataaaccttaatggtatttagctgattagaagaatccatgggccctgatttctccccgttggcccctccccctttagccttaagcaagaggagctacaccaattaatcctggaggttaaaggtctagaagctactaaaataattcatctcgagagcatttttgcatgtaagtcaattttgttcaattcgggataaagaattttaatatgatggggaacaaagtgtcttatattccctttatccctcatccattcccgatcatctttatccgcatcacctttgttggctcttcttacagcatttgctttccccaaggctggggatggggaaaagagttgcagcaatacctatcctcttccctaggccacccatctcactgagatttaaaagagtcaaccggatgcaacctgcttcatgtgcagagatgaggaccaaaacatatcagctaaggatgctaggcaattcctcccactgcacatggtgtacttcttgaagcatctttactggaccttcacttccaccccctaccagggactgcaacccaattgaagaactcagttttagtctgaaataatcaaggtggagaaggggctagatggggattcaggtagctttgcattttaaaggatttttaaaggattcttgtaagatcaccaatccaccacatctaaaccaaggacattaaaactgttttaactgacaaagcaaactgggaggatgcgaggggtccgactcatgcctctctgcttccttcttttcttgcattagttagaaagagcccacttcacatagagaaaggaggccaattttcaaaatgcagccaccccccccttttttttcccttaacagcactcatacagtagcaatggcaaaataaacaacgatgtgttggattttgtttttctttatctatatgacatttgtgtcatcacaggagccctaatccatattcaggtcttcatgtttggtgtgcagtaatatgtaaatgatctcgccagctgcatggagcagtgtttgttgattctatttcttttggcactgcacagaactgaatttctgccaaaaacggggctgcttcagggagcgctggtgctccaggaggaagttttgaaaggaaacgcacatcataagtcctcactctgtgaagcagaaaaatcaaaacaaactcgctgtttactaaaatagcggtattatgaatgtaaaataatgtgtttgttaaaatataatgagcacactgcccatctccgggatgcatggcgtatgtgggctttggaagcgagggcacaacgttgagaaagctggtgcattttgattcttggaaagaaaataggtgaaatgagatagacagagacaccatgtagaagtttaaggaggaaagaaatattttagcatgcatattaatctttggaaacacatggcatatacatgcatttaaatgtggacagctgtggcgtttaagtgttaaaaaatttcattaatgatgcatagagctatctacttctgttggcaggcctttcagtcttcaatctgacacttccttttttatccagcaagctaatttcccctcttttgtgaggagtaactgttttcacactactgcttacccagcaagcctccttattgtttcatggctaattatcttctccagcttcaccttccccagtgaggagagcagggcagtttctcccagcactaatgaaagctaggtttttatgggtacactgtgtaaataaatgtaagctctgatcaggcaacataataaatgagctcctaaagtttatggagtcacagctcacctagtactttgctaaacaactaagcaaaatgattaatctggtgaaggaggggactttaggtgttgaggaaaaaagtgacagctctgtcaatttaatatgggagctctctgcaggaataacacaaggaatctctatccatctggatgtccctggtggtccccaatagcacagcttacaaggaagtcctttggaaactatggctgatctggtcagaggtggagatcatctggaattatatgtatgtttctgattacttccaatgtattaacgaaaaagcaaccaccaggatccgtgtaatataaaatgctctctaacacactgaatgcaagcacagcagagactccagccacaaaggctgcattgccaacggccttaagggagtgaagccagcaggtttggtgtaggtaattagccctgctggcagcccagagtcttgcttatgtgtagtatgaactcagtgtattctgtaggtagccctcctaaggagccacattcgaacaacttagagcacttagttatagttagcccaaaaggggggaaattaaatacaccctaacccctaaagagtgcattttatttttcttttacaaaataaatttatatgtaatctaattttctctgggtttaaattattatttccttgacatagaaatctctgctttctgttactgtgctgacatgtaaaatcggactgggagcctccacttttgttgctacgacagaacactggaatgaatcaattgcaggggaaggaactcgttggttcacagtttcgtaggtttctgatcagatacgattggctccactgcttttgggcccaggtaagatagaacatccggactgggaactcgtggaagagcaaagcagcccagttcacggaaggcaggaagtggagagaaaaagatacagccttcagaaacaagtcccccgtgacttcctcccaccagagaggctctccctccattcccggtgggtcaacccagtaatgaggttcggatcctcatgatgacccatttactttcctgccgccagctgaggaataagctttcaaccctcagacctttttatatccaaaccacaagacccaggaccactgcttttattccaaacaagatgagtttttaaatatacggggatttcagaaactttagtgttcttctcttaaaatctcaaacataattctacatttttagtacatctaaggattctgtatcatgaatcagaagtataaaatctcatggaaacctttatcaaaatcatttgttacctgctagaagcattcatcctgaagttttgaacaacctgtgcaacatccattgtggtttgtgaactctcccgctgtttttgtggcgtgcacagtaacagcccaagagaggtatccttgcaacagtccagtccccatttaagtaaggaagcaacagcataaatcaagcgaggtatagtaggattagatacaagggccaacctacatcaagaaaacgagtcaccagcttacctatctgttaattaaccttcaactttgagtcaatgaaatcataaattcgaggaaagaggttttcattgactatttcaggtaagatggcgcagagacaaaatgggagctgtagttttgagctgtagttaatttactcgcatatactgcccactttatattcttatttttcccctctgaattacgtgtttcaatcattaacttagaattttagaagatagaaagaaagccatagcttgtttatccaggaggaattaagatcagtgaggtcacagtgttggctgtcactgtgtaccttctatggaagtgagcagcaataggtaaagttctctcaatgaatgtggtaatcttccttcttatttcctaggaatatgtttcaaaacccctcgcagatgtctgaaatcctggatgctaagccttatgtgtttgagtagcatcttgtgtccctatacacacgtaggttagtggctctcctccttaaggaaacactgatcacaactgtagctataacttctgtcgttggggttttgaaagcaaaactagcacacattcccttttcctttgcaattccaaagttagatttattcttgtagtacatcttaccaacctcatattcaactttgttttttctttcttcactgagaactttcagttttttacttgaacaaagcactgcatggtttctctttggcaagttcacaatgccaggatcaagtacccttgtgacacgaggctcttagacactaataaaataggagttagttacttgagcataggaaactaaaataataaaggtgtttactaagttttcaacaggtgggtctcacatacacagtggatgtctagacaggtgaatggtttatatcaaggaagcatgaagcagggtagagagatttctgttagactactcagaatggtgttcaatttaaattctatgaactgtttatatctagagtttcccatttaatatcttcaggcctcaattgaccttgcattattgaaaccatggaaagcaaacctgcagaggtggagacaaccatgtgtactctgtaagggcagattccaaacaagagtagactcttatctgttacatgatgaccggcttctcgctccggcagacgtctgagtgttggcaaagctttccttggatctcatgaaacttctggattattctaagaattttacgttatcattctatgaatttaagttctcatactcagaatgcaaataccaaacagcaggaataagccagaaaaacgaagtgagatgttatccttgggggcgggggtaggggcactcctatatccagctggcatgtcctccttagatttccacaaattgggtaaagacagcaccgttatttggctccatctgggatttctactgtttcaacagtgttttgtttttgtttttgtttttttgaacttccccttatttcaggtctatattgtttgcaagaagtaggaaagaagaaattcctttaattaaaaaacctcttagtttatatttatattaattttaaacaattttaacattggtactgttttgaaacctggaaggaaatcccaaggacacacaggaaagggactgagaggagaaacagatccccttcctattgagtctatttggagtggaatgaaaatttccgttgtttgcatccagagtaatgggcaagatgaaacagtttatttgctggtagaagtgggttattttgtagtttctcctagtacattattcagatgagacagtaactctgtcttgcagtgaggggtagcagtgaaggacacatagggggcacaaaatgccctgggtgccagtgagctacttgggagactgaggtagaaggatccctggggtttggggacagtgtggccaacatcctgagatcctatggccatgtaaaaagaaaaaaaaaggcaaaatatgagaagttatgtatgcaagaattaagaagaacaagattggtactggcattgatttattgccacctggctttagtattacccaaaccgaagtcagacacttaagctctgtatagagattacataataatctaaatgtccttaattcattggcacacatatactgcttctccataagaaacatggtttctctacatataaggcttctggtagcatatttataggagttttttacctcctagataacagctgggtgtcccttaatgcagttctgacactttcttcatggcagttgtatcagacccaggagggaacggtcagcgtcagaggactgtcctcatacagataccaacgctccctcctgcctcctgcctgcctggtgggtgggctttagagcgcctcaaccgtctccttggcttccacaggtttctagaatggtctcaagcttggagaaatacttgactcacatcttccagtttattataacaggtgcaaatccagaattccaagtgaaagatctgcataagttgagacggaaggggacctaagcctccgagtgtgtcggggtacacggttctgattgtaccctcagatagccagtaaccggaagctcgtccagtgtcattctttacctgtttgagtttgaatcttcagtaccatcttcctttctaggtggtccttagagaggaaggttgagtgtcatacgtatcccttggagttttaggagggcagccacagcctgaggtgattcggggccccttcttcaattgtcttatcagtgtacattcaggcctgttcaagaagagtcttcgtgaaaacggaaaaaccattgccgtcactcaggttttaggatctctatggccagaacctaaaacaaggacagaatatgatttgtataagtcttggctttgtaattgaaacagtacttttctggggcagccccgaagtgaaactgaagtggcagagagaagggatagaggaaagtgttcaggttttatttggttgattttttgttttgttttgcttgtttttcttggtgtgtgtgtgtgtgtgtgtgtgtgtgtgtgtgtgtgtgtgtgtgtgtgtgtgtgtgtgtgtgtactgctgcttccttctgtagaattccctcctacagcctccaggccactttgcttataggacatcaaagttcttggcaatctgtttttcataaatgaaatagttgaagcattaaatgggttgtttgttttatttttttaattgttaaataaagacactgttgggacgtgatcccatgtctggagtagtaagagaaacattagggcaatcagagctggccatgtagtctgaggctgctgtggtttctccagttttagtcttccaagaccagtgtgagaggtcaagacaggagacaggcagcctggcgagtctatgcccaccatgagactgtctgtgaatctgtgtcctaaaggttacttttcaatgcttgtatctctatgtgccagcctgtaggatctggtatctctaagttaactctgtttttgtctatctgtttttaatttagtgaatttttcttaattcacacagaagtgatcatgttaaagtgaaccatttcatggtctttagtatagtgaaaatattgtatgacttctatctctacttttaatagattttcaaaattcaaagaaaattactattaagaaattcctcaaaagaaattcctattaagacctattaagcccgtggcatcttttcttccctgctaagagcccgtggatatcaacgatctgcattctgtctctgaatatgcctgttctgaatatttctgaaattgcctatttctaactatttacctattctggtaataaatgaaataatatgtatgtagcctgcccttgacctacacacatagatccaaccagacatagataaaaatatttggggagacaaaactgtctctagcctaactatgtgcagaagcctgtcactttcccccaaacagttcagtgtggcagcctcttaccgtgtgtccacacaggaatggacatcggaagatgatttaaaatattctgaatgatatttattatggaagacatcattttatacaagacgcttaggactggaagtgtaactcagtgggtatcacatgtatgcaaggccatgggtttgacccccagcactggatgaaacagagcatcctcaggttttggtctccagagcacttcctggaacatatcctccatggatatcacctgacaactgatcttgactttttctgtctcatgcacacgttctgaggctgttggttttcataactgagcagagccacaccttcttcagaagtcagcagctctctggatggttttgcacagtacagtttaaccccacaacccttttctctctctaccacggtctgtgaggcaggaagtaagcccttcttctttcagttcacttgacaatgttattttgagagcctgttttatatcataaagtgttttctgtgctggctaggctagattcctgtcctcgtgaagtttatctatggaaggaaagactctcgtctttctttgctgggttctttggagccatatctaatagattttttgattttcagcaactttagattatgtttgtattggttaattttctgttagctgtgataaaatacctggatggaaagcaacttatggaagaaaggatttgttttggcttaaggttccaggaggatagaactgatcatagtggggaaggcatggcgactgtcagggaaagcagtgcagcacagccaaaaagatggtggaacatggtttcatctgcgcacaggaacacacacacacatacacaggagcacacagacacacatcacacatacacactcacacaggagcacacagacacacatcacacacacacacacacaggagcacacagacacacatcacacatacacacacaggagcacacagacacacatcacacatacacacacacacaggagcacacagacacacatcacacatacacacacacacaggagcacacagacacacatacacacatacacacacacacacacaggagcacacagacacacatcacacatacacacacaggagcacacagacacacatcacacatacacacacaggagcacacagacacacatcacacatacacacacaggagcacacagacacacatcacacatacacacacacacacacacaggagcacacagacacacatcacacatacacacacacaggagcacacagacacacatacacacacacacacacacggagcacacagacacacatcacacatacacacacaggagcacacagacacacatcacacatacacacacaggagcacacagacacacatcacacatacacactcacacaggagcacacagacacacatcacacatacacacacacacacaggagcacacagacacacatcacacatacacacacacacacacaggagcacacagacacacatcacacatacacacacacacaggagcacacagacacacatcacacatacacacacacacacacacagacacacacacacacacacacacacacacacacacaggagcacacagacacacattacacatagaaagggcaggggagtggagagagaacaggaagcaggcaaggctatcatcaaccctccaggcccatgcccagtggcatgtttcctacagcaaagctctcccctaatggttctgtgacatcttcaatagcacaacaaactggggaccaagtgttcaaatacacaatcttgcagtgaatatttctcatgcaaaccaccacagcaagcatagaaatacgttcgtcccaacactcatttcagcgagatttgcgaagggctggatcttcacttgtctgttttgagcttctgagcagatatgtcattgaaagggaacattcggaagaacactttttgatcattagtgtgagacagacttccaaggcatttttttttttaaaaacaggttacttgaacattcttgtcagtctggtagtgggaaggatttgattgctggaatgtgtcagctgggatagaattccacagaaaatagccccgacttttaaagaaaaaattattttcaaagaaatagaaagaccttgaactatgggcctgtctggggatgctcaggtgtttttctcctttggtttgtcctggaggatgaacccagatgtagtacagaaaaaccgaaagcatcactacatttacaacaccaatgcagtaagggacctcgtcagtgtctagttaaccggattctgtgtgtgtctgctagaccagctgtggtaacgtgaaccttgtgacacttacttaactttaagtcacatcctcatcttcttactgtggcagaatgaagatatgttgagagtttccagtcattgtctccataggtctgcccataggcattcccataaatgctcacagcagtctatggaaccgatacttacaaacgttagatgccttatacgagaatgtaagctaacacagttgttagggactcaaacttaacgtctcttcatttctaccccaggcttcatacagctgataaacaggaagcagctttcttttagtcttatttgtgtgtgtgtttcttatttactttggaatctattttctggtcaataagaaatagggcaatgcaaactcagaattattttacaattatttctcttctttacaagggcttgttggtatttttaaatttcatttatatctacatttactctaaaaaatgtatttctaatgcatttgggttaaaggtaggagttaagaatactgtataaataaagaattgtagttattatgttttgctatttctcctgtttgaagtatattttcgcagccatatccctacattctctcccctctctccatattattccctcaaatgtccggtcctctcttgctcactaatgtgaacactgatcttccgaggtccctcacaggctcctgctctggggcctgttgtttatctggggctcctgcttatgaggagaggctgtggagcatgtaagaaggatggcccagatgaaggaagtaggtcactaaagttgaacatctgaaggagctgctgggcccttgattcctgtcatgttctttgctccccacttgctatgatgtgtaccacctctgtcatgctttcctgctgccacagcctggtctctgccatgccttctctatcagggaccagtgtctttaaaactgtgagccgagagcacacttctccatttgatttatttctctcagctcttcctgaatagtaactaatatagcttaatataatgcccatttttcttcataaaaatcccccttcctagatttctatgtgtagttatgctcaccgagctcaccagctaggtctagaacaacagttttcaacctgtgggttgtgacctctttaggagtcgcagatcagatactgtgcatatcaggatttacactacaagtcgtaacggtagcaaaattacagctatgaagtagcaatgaaatgatgtaagacttgtccatgagaaaagatctcaaaaatataaatgatataatacaaaactagacagaatatttctatcagaaaatctcgtaattttcattcacactgtttattctagatcagtgattttttaacctgcctaacactgtgaccctttaattcagttcctcatactgtggtgggctccacaactctgcactttggttggctgtgtgtgtgtgtagtttttagttttctattgtcatgaaacagtcatgtcatactgatagggaaacaggtaattaggctccaaacataaaggtctgacaagggcctacaaagcagcttccctgccatccgaggattgcaggctgccggaactctcaccctcagacactagcccagtgccctccctccacaacacaccccaccaaaaaaaaaaaaaagttcctgctacacagcataagtcacatatttactgtgggtcacacattaactgggcccattgtcaacaatggcaaaacataatgtaagtcatgggttaactaggcctgcttttgtacctatgcaagccctcattttcccttgaacttaaaagaagacaccttgtttcctgggccccacttcagggcctgtgttgctgcaggtattagcaaagctcttcctgaaagatatgaccttttagcacctcacacctctggaacctcctctccttccccacctaaaacctagctgagcaaatgtgtcagtgaaaggactataccagaattagggctctccacaggctcttcatttgctactcactggccatttggcgttcttcaaaagctctagattttggtgcgaatcaatttggacttaccagtttgacaagtatgggaatatgcacttttttttttttttttttgctaagcaattcctttacaaattacaaatataaaaataaaataaatccaattcttaattagtttgagcattattgactacgttgaagtgccagccaagaagatgacagttacatcaatatgggtgccatattcctccccctgacagtcgcacagaaggcaaatgtttaattatatcagtgtcctcatatccctccccagtgccccagtgaatggtttaggttaaattccaaggaaatggagattttatttaaaatgctgacagaatttaccatagaacaagaaggtccaggctgccctctacctgaaggataatgtagagtcaagagtttctgtgaaagaaattggcatgtgcaaagttggccataaagaagatggaggacatcgctccttaaagctctattttagggtctgaggttgagcgtacttgtctagggagggcaaggaatagatcaggaaagtcatatgctgaaagggggtctttgtcatctacaaagtctccccacctcacacacacacttcttcttcagaacattataatggatgttcataaagctaaagtctcagcagtggggagcattagagagcctcaaaatgttctgggttctgtaaatctaaagaatgggttagcaattaacattcttaccatttaggtgagccatttcttcagaatacaaaatgtagggcaagagggaggaaatctcagcccttcggaaggattaagggcagggcaagggaggggaggnnnnnnnnnnnnnnnnnnnnnnnnnnnnnnnnnnnnnnnnnnnnnnnnnnnnnnnnnnnnnnnnnnnnnnnnnnnnnnnnnnnnnnnnnnnnnnnnnnnnnnnnnnnnnnnnnnnnnnnnnnnnnnnnnnnnnnnnnnnnnnnnnnnnnnnnnnnnnnnnnnnnnnnnnnnnnnnnnnnnnnnnnnnnnnnnnnnnnnnnnnnnnnnnnnnnnnnnnnnnnnnnnnnnnnnnnnnnnnnnnnnnnnnnnnnnnnnnnnnnnnnnnnnnnnnnnnnnnnnnnnnnnnnnnnnnnnnnnnnnnnnnnncaaactttatatgccccagtacaggggaaccccagggccaaaaggagggagtgggtgggtagggaattgggggggtgggtatgggggactttttgggatagcattggaaatgtaaacgaggaaatacctaattaaaaaaaataatgtaaaaaaaaaaaggaaaatgactgaggctgagtgcaggcttctttaatatgtttttttttttttttaattaaaagtgaatgatttccaagtagatccagtcagatattccctggaattatcatacaagggagttttaggaagttttaaataacaagagacttgaggggaacataaaccaggtttaatcctttcctatggaaatattttaccccaaccactttgagttgttccttcagtacccctgagttctgtccttccacaggcttgaatctgtaaacccacaaaacagtagccgaccaggaccgtgtccagagacaggctaagctgcaggcatcccttaggcttagctcctggcacaagatggcacagttgtcgagtcccagcttttgagaccctgttggaaaatcctgtgctgtcacttgttaaagttgatcagagttacaaagcgcttctctgaatgcctggtttaattatttatcagcaccgtcagtacagtgtcaggcaagggggtgtttgaaattaatacactatttgagtggactgattgattgctcctacagctagagattttaacattcactagctatacagactggtcattagtcctctcctttatctcttagcaaagaataaacagaaattgtaataaaaattcatcacagtgaatggacttggtatctaagtggctgtgataactggccctgtactagattgactgctagaacactgacagcagggaagatctcttttagaaggaaaattaaaaattatcccctaattaatgtttgcctttataactgaaatctttttttaactaaattgggttatacagagactctcctccatatccactataataaagcacacctaatttgtttgtatggcagtctttaagcattaattgtaggaaggattgaggctttacaaatgtgccctaatatgctccaggtgaggttttcttcctcccactaaagaaagaaagctgagtggcctgttttcaaccagacagttgagataatctgatttgtaatgagaaaaccctgccttcagagctatcaccattctctttacctaccagatcatggtttgtttttgaagagtaaattggaagggatggtaagaaggagatatagccaagggggagtcagggaacttatgagcaactctacacatcgtaagaattagttaccaaatattgactgtttccctgggcacttataattattttacatttcatccaagagtgattttgaagatcaatagagctgtatctatcttataggtgatgatgctgatactcagaaagcttaaataactcatgcaagctaatgaagctggtgagagcagccaggccattggcttgttggctagttctagagtcatggtcgtccatctgcctccttggcatgagtgtaggtagagctgagaatgctctatggttctatctgtaggagaagttctcagggcccacagtgcatttttcaccttccttggctccacaatagaaccagatagctgggtgagaaatgagggtgccgaaagagccgtttaacagctccatcccatagaaggccaagagaatactgagttctcatgaagacaggcagagcacagaagaagggcacctaggctattgcatccctgggagtcagggaagtcttcagacagttagaagcataggcaaaccaatagtaatgatcaacaaaagtccaagtgatatctctctcacaaagaaaagataaagaagaaagggagccaggaaacaatggttaaggagctgcctgggaactctcaggaagatgtgggcattgctcatctcagccaacaggaggcaaagcctagttctcacagccaagaccagaaaagaaagaaaaatgaaggtgtatacactgttataggttcctgggtaaataggactttaacctaaaattagaggcaagagggttatgacgcacagcaacagatagtattctactagagacttagggaggaaattgctatgagaatatatgtaccctacaatatttcatggattctaccttttagtcttcatttagcagttttatttttagctgctttagttactttcacataacacaaccaaaatattgacttaagtaatttaagaggaagggtattaaatgcagacactattgtatatgccagcaagattttgctgaaaggaccctgatatagctgtctcgtgtaaggctatgccagtgcctggtaaatacagaagtggatgctcacagtcatctattggatagaacacagggcccccaatggaggagctagagaaagtactcaagaagctgaaggggtctgcaaccctataggtggaacagcaatatgaactaaccagtatccccagagcttgtgtctctagttgcatatgtagcagaagatggcctagtcagccatcattgggaagagaggccccttggtctcacaaaccttatatgtcccagtacaggggaatgccagggccaagaagtgggagtgagtggataggggagcagggcgggggggagggtatagggaactttcaggatagcatttgaaatgtaaatgaagaaaatatctaaagagagagagagagagagagagagaaagagagagagagggaggaagggtatttcttttggctcatggtttcagagggtcccattcatagtcacctggccccatgccctggggcatgtaatggaggagctttgtctgctctgctgtgaagaaatagcagaaaaggggctaagaacagttcatcccaaagagccaccccaagtgacatacttcttcctgctcaatcttacctgcaaagttctccagaagctccccaaattgtgccaccaggtggggagcaagctttcaaaacatgagcctgtaggacacatttcatatccaaccctcaataatcaacccaagctgagatttgaaacatagcacaatcaacagcaaatggttaggaccataaaggatcatgtactagtatagtgattttatatttgaatctacgttaatgcctcagtgacagtcactattgataatagcccacccctacagtgtttggatattatctcaaggagaactagagttcttgatgctggtaccttccaatctgcacttcagttttgtgttctaacttccaaggggtcctaatagataacaattttccgattatgttctctaattctcccccccccctctctctctctctctctctctctctctctcctcccttctattacaggagactctgaatgtgattgaccctggcttgatggacctgaatggaatgagtgaggatgccctggaatgggatgagacagacataagtaacaaactcattagtgtgcatgaagaatccaacgaccttgatcaagacctggagcctatggtcccaacagtgaaacttgaagagacacaccacaaggactccggttatgaagaggaggcaggtgactgtggagggtcccagtatacctcaaatatcactgccccttccagcccacacatttaccaagtgtacagtctccacaatgttgagttccacgaggacagccacactcagtttctaaaaagcagccccaagttcacaggcacagtgcagcccactgttttaactaagagcctcagtaaagattcttcattttcatccacaaaatcgttaccagaccttttagggggttccagcttggtgaggccttactcgtgtcagagtggagacttgagccagaattcaggcagtgagagtggaattgtcagcgaaggagacaatgagatgccaaccaactccgacatgagcttgttcagtatggtcgatgggtccccgagtaaccctgaaacacaacatctggacccacaaatgggagacgcagccaatgtgctggagcaaaaatttaaagatgagggggagtgcattaagctttcaagtgtctctcaggcatctgtctcaccagtgggttgtgtaaatgggaaagctggggacttaaacagtattaccaaacacaccactgattgtttgggagacgaattacaaggaaaacatgaggtgtttacattttatgactactcgtacctccaaggctcaaaactcaaattcccaatgataatgaaacagccgcagagtgagaaggcacatttggaggatccccttcttcgtggtttctattttgataaaaagtcctgcaaacctaaacatcagacttctgagtcacaaccagacgcgcccctccatgaaaagatcttggcaagtgccccccacgagatgggtcgaagctcatacaaaagtagcgacatagagaaggcactcacgggcatccagaatgcccgacagctctcccttttatctcgtagctcatctgtagagtccctttccccagggggtgatttgtttggattgggaatctttaaaaatggcagtgacagcctccagcgaagcacttctttagaaagttggttgacatcctataagagcaacgaggatctttttagctgtcacagctctggggacataagtgtgagcagtggctcggttggtgagctgagcaagaggacattagatcttttgaatcgtctggagaacatacagagcccctcagagcaaaagatcaagcggagtgtttcagatatcactctgcaaagcagttcccaaaagatgtccttcagtggccagatgtcactggatgtcgcatcctctatcaatgaagactcgccggcatctcttaccgaactgagtagcagcgatgagctctctctttgctcggaggacattgtgttacacaaaaacaaggtcccagagtccaacgcatcattcaggaagcgcctgaatcgctcggtggctgatgagagcgacgtcaatgtcagcatgattgtcaacgtctcctgcacctctgcttgcactgatgacgaagacgacagcgacctcctctccagctccactctcaccttgacggaagaagagctgtgtctcaaagatgaggatgacgactccagtatcgcaacggatgatgaaatttatgaggaaagcaacctgatgtctgggctggactacatcaagaacgaactgcagacgtggataagacccaaactttccttgtcgagagaaaagaaacggcccagtgtcactgatgaaataaaggtcaataaagatggaggaagtaccgagagggccaatccctcggacaccctggacattgaggcccttctaaattgctccataaaacgtctctctgaaaacaatgggaatggcaagaacccacccagaactcatgacttaggaaccaaaggtgaaaataagaaaaatacgtacgacgttactaaagatccacatgtggccgacatggaaaatggcaatgttgaaagtactccagagagagaaaaggagaagccagagatcccagaggcatcagcgaaccttgcttcaaatgtgaaaaagatttctgaatccaagcacgacgagtatgaagcattaatggatggttctgatgattcaagtgtcactgggaaggaatttggtcccccaaatgataggcatcctccacagattggtgccgatccccagcatcctgaaaggggtgactgcacatcagtccagaactcttgctcaggactactgttggaaaccggtggcggaagcagacaagatagtgatggactcaaatctttgtctaatgatgcaccaagtgtggctagaaacgctgctggttgctgcctactcgaacaaaatgagacagaggaaagtgcttctatcagcagcagcacttcctgttgcaactgcaagccagatgttttccatcagaaagatgatgaagattgttcggtacatgactttgttaaggaaatcattgacatggcatcaacagccctcaaaagtaaatcacaacctgagagtgaggtggccgctcccacgtcactgacccaaattaaggagaaagtgttagagcattcgcatcggcccatacacctgaggaagggagatttttactcctacctatctctttcgtcccatgacagtgactgtggggaggtcaccaattacatagatgagaagagcaacaccccattgccaccagacaccgtggactctggcttagatgacaaggaagacgtggactgcttctttgaagcttgtgttgaggacgagcctgctgatgaggaagcccgtctctccagtgcccttccaaatgaatcagaagtccaggatgaagctgctaagccagaacaaatgacagccagctcttctgtgttccgtgatgagacagacacggtgcctctttcaggactttcccctcagaagggagctgatgatgcaaaggaaggagatggtgcgtcccacacttcccagggctgtgtggagagcgcagagcctaccacccccccaggaaaggccaagagagaggggagttcaagaaagcaaagtgtatcaggaacgccagaagaaaacgctgcttcagccaaaccgaaaattcaagctttctctttgaatgcaaaacagccaaaaggcaaggctgcactgtatcccagcccccaaactttaacctgcaaagagaagctcgtaagctttcatgaagatcgacatagtaacatgcataggtagaatgtaatgcccccaagcatggaactcatctcattgaaaggtatgtatgagtatttctgctgtgtgtgtgtgtgtgtgtgtgtgtgtgtgtagatatgagtttacattaatagatccactatagaagactggtcagcatgattagctgtgacacatacacatctggataagacattgagtagaaacacagcagtggtagtcactgtgaaaggcacaaggggaccagtggtgacattttgacatttcaagtgacattatatttattccatcattttggcaagagcaatacaatatttgagaaaccagctgatccatttggggttttaattcctctgactagaggagaaaatgccccgagagttgcaggcattccttgagatcaaaatgcacgttcagtagctgtattccttactgcagctcctatttagaactgccccgtgatgagcaagggtcagactgaaggctgtgcctccttccagacatgggttttcccttaggcttctgcttcatagaactagcatcccagtcactccccttaacacggcctcagaatccaaacaggagcaaaaagttgagggaaaagaagaggctcctatttgtacacacacagatgaagcaccagcgcaaaacgcgcatattgggaggatacgtgacaagttaatggcgtctcgataaaaacagaatttttgaattttgcctgaaggtgacaggctgattgccatcaatttttttttgagaaattcattccacttttcatatttaataagacagctattgattgataatcctgaggtggtgatacagctctagaagcgatacggagactctgttatctcccatttctaagacccagtggtgaatgcacttgctcaatcaagtttaaagagaaatttagctttcaaacctgagagttgtgtttcaccaaagtatgaggtgcataacgcccctccacccccactacagaagcctaatgccgtaacctaaactcgtgctataggaaatgaattacagaagcaatctaccctaatttgttaacttattcaaataacagttattatacttaactatgctaaagattatcttttttgtggcagattgtttatttttttgatgagcctaattactgattttctaaaagtaatttacatttattacaaatacatcttttaaaatgtgacagataaatgttgttcccataatgtattatgaaaaaagttactatttaaaaacacattatttaatttgaaagatgaatggcaaacatcattattttttttcctgcaacacctgtgccctgagctcattaaaatgtgcgattctatgttgagctgctagaatgtggtgcgaggggggaatctataccatatatataccctaaaaataaactcagtatgcaaaactgaagaaaggcatcctacttactgatgtagcttcactaattttctatttcagacactatttacaattggttgcaagtgagaacaaaagagggagagagagagatgtgttttctgtgagttgtggccaccctataatcacaccctccatcagtatgcagtaaaactgaccattaagggagagtaaccgggataccataagccgcctcagaacaggttctattagaactgattggatgcaggctctgcccgcctctgcagaaggacccagaatgcctggctgattttgttttctgaaaaaggataaaggcttgaaagcaacagcgttgtgagcatgccaccctgtgactgtgaccctcaagtcagcagccctgctgagatctggagcagagacgcgctggccctagtgaaggctctgggatgcattctccctgtttgatcctctgggagtctcttctcttcctcacacagagaaatggaattgaaatgaaatgtaaatgatgagcaattccattttttgacttgaggggaagtggtggtgctgatagatctgtgtaattgttacattttacaagcatagatggtgtaaaaatatatcagccacttgcctgcccatcagaagggttctcttgtgccccacaccaggctgtactgtgggcaaagggaacaagcagccagattttacttctgtagaactgacatcgcccccaagtgacttgttataagcctagagctatgtgaacagccatagattgctcctatccacctttgagggtgtgtgagcacaagtgtgagtgcttgcgtgtgtgagtgtgtgtgtgtgtgtgtgcgcgcgcgcgcgcgtgcacatgtgcatgtacagtgtgaatgcctatgtgtacatgtgtgtttgtgcgtgagtgtatgcatgtgtgtatgtgtgtgtatgcagtgtgaatgcatgtgtgcatgtgtgtgtgtgtctatgtctaagtaccatgttaacaaaacatgtttgtgcctgatcttttgcttagttataagcactgggtgtaaatttgcacggacctgtcaggtgtcgaagtgctgtcacctgagaagttattcaatctgaaaaggctgctaagctcccagaactccttgtcagggtgtgtactgaagttacatcgagactttacaaccacatgaacttaactgtagtcagtgttccttccactctgtccaaaagcggcagaagttcttccttttaaaagccatttgggggctgtgagatggcatggcctttgtaccaggacatcacaattcacccaagccaatttgctggcgctcttttcccagaaatagattatcagatgaaatgactacaagtccattcgaacgtgtttacaatgtgtttagaaccaggcagatagtctgcaaccagaacagattcttttcaaagagttctgaaaattattttatctactgtgttctaattaaaaacctctgaactcatctgagaagatttgctgtggcctaacagtggtgcgtttgcacgtacttccagcacactgctcgactcttcactgtatccatctgtgtgaaaatggagaggccagttagaatcacatcaaaggggaggtaactggctagatccagctcttcctgcctaatttggagagagcacgtggtgtaggtctggaattcctcctagggcctaagaaatgtagtttgcactaatcttttttgctgtattctgacagttatttcttcataaccctgatcataagcctgtgatctttgatgaatggtttaaccctaaatttcaggctggataaagtctgcagtgtaaaaagttaactcctcgcatccagccagtgtgtagtttcgtgttttctccttgttcatctaatggtttaagggtgtgtgtgtgtgtgtgtgtgtgtgtgtgtgtgtgattacttcttttggtcttagtttcattgttttgcctacttcatcagtctatatgagtaatggtggccacagagttttcggtttgagatgactacttgtgttgatagctgttaacacaatttagagtgcagcgcagcttttataagttgggaaaatggttggagccgacacttctcaccacacacaacctctcattctcttactgggctgacactggggtttcccaaggctggctaagcagctctaggaaactccattgagggtttgtatattattccttctctcgacactacacgtgtctataacatttacctttaaatcacctttgtaacccaagcttctgctggataataattgggcacttctgaataacttgctaggctatataaagattttattggataaagtcagtctctgtctgtctgtctgtctgtctgtctcactctcgctctgtctcactctcactctgtctcccctccctctcttacacacacacacacacacacacacacacagagagagagagagagagagagagagagagagaggatttgggcttgagcccatttggcctgacttgttcccaagtgtgccaaattgaaaggattgattacccggagggaattcattcaaatgccagctctttactaagatgggattggcttcaccggaggattcccttgcgcagcacagcggcagattcccgatgagtcacatcctcagcatgtgagcaatgcttccctgtgctttcttgaattactgcattattttactgtaccaaattttgttccatctgcctctatctgtctcccccatccctgttaacttcccgtatcttctcaacatcctgtttgactgtggtggaactacggttggaaaactttttctgacttgtgcatgaagttgtaagtttatagaaagagacaggaagacacggaagaatatttgcttctaagaggtcgagggggagggaataccctgatagagcacttcggaatttagattaaactcaagcaggcagagacctgctttatttgagagctggtctgagaactgaaagtactttgtatcctggaatttggttgtctctcagatttgatcagtttttgtagccatttagaaataagtaggacagaatgagcttggaagaaatttgtaccaaatcatcacacatacagagagaattgagtcagttcagtttcctggacctaaaatgaagcacggtgatagttgagtggtgaattctaattataccctttcctaggtaaggaccgaaagctttaggggtcatcataatgttgtgagtgttccaccgctctataatagaacgtcccacgcagaccagtggaggaagtgtcagcctgggagccaggtatctcctggcttgtgttcgtacatcgttgcattctttggtactgactacctgatattttcttatgggtttttttaaaagaacttgataaaattgagaccatccccagaagaatagatgaattgacgacccagagaaaagatcatgtgcttgatttttctttttttttttttgaaaacatatgaacatactaaggcatctatataacttactgaactgaaaatgtgtttgtgtgttctgagctagtgaaagtcacatttcataacttctcatctcagatcgctagcagatgatttcccctccccaggcagcttccagaaagggcttcatcctgcgagtaacagccattgctgacacctttccctgtcaccgttttctttcctgtagatagcctggctgaagctcggggctggcctgacccaccctgggctggtcttgggttccatcctgttatcatcactgcctcctgccacgttgacttcctgaagacgaaccttccttctgaatgcggtctgtccacgtgggcctcccgatatggatgtgtgcattgctcctcttaggtgatcgtcttagttcctcaaagctgcttgttctcccgtggattcctgtcccaagctacctctggcaaccctctctccagcaagacttctattttccctctctcctccctcctccttttaaagctctgcagttcaccaaattgatggtccattaaacccactgtctggaatgacacccctcccatcggtacttgaccaattttatgttttgctctgaaatttttcatgatattatgcctatgtttattgaaagagatttacctaaaaagccatcccttgatttgattgtagtatagaagagacacattgatccttatgacaaaattaagtgatgttttgaaagtgccattttaattatttctttttaataataatctatgcagcacttcaagaaacaactataacagtgttgtataaactggtacattctactattaagtttgtttttggtttctatgcttcttgaggtggtaatgagaaaaatgtttgtttttttttttaaacggtgtgccttgctgtatttcttataccatttattaaaaagctgcttttgtggtaatattatgttggtttgaaaggaggaaatagcaaggttaagatgcgtgaataatttctgtatatatgtataagctaatacaaacactgatgtatgacagtataaaatgctttcatgtttgtgatgtccagtgatgtggagaatataagccttaaacccgttcgattgcatggtaattaaaattggcataataaaaatagcttattgggggaaaggaaaattaatgatctcttctacctgtgttctttaccaaattcttgcatctggttctagaaaagaaaaaagaatcaaactccatatattagcttccaaaatatccatattgcacagaaggcttacattgcttagactacagactaggcctgaagccttcataattttcaaaaatctttctgtttcactataaacatcctgaaatagcaaaggtttaaaggccatttccatcaacaatgttttattctaaatgtttttatttctacttgctaatggtttaataatagttgtatttggagatctcttacatgacctaatttattttaaatatttgaatggttttggtggatggtatagaaaatttgattattattttatttaaactatagatttcaggtatatttattttgttaagaaaaatcaacagaggaatattccatttggtctttttttttttttgacttgaagaattcagcttttaatttatatcataactcctactaaagtgcctgacacacagtaggtatttcatagagtttcctgaatttgagtattgagtggggttttacatatatatatttatatatgtttcctgcattaaaactagaaaaagacgtgcaaagtgaagcacatctataatcacacatttataatcagatttccaaaagccaatagaacatgacagacatatgtagccaccgaaatgacaatcattcattcaatagattactcattagcatcttttgcctgcaagtcactattctatattcagggagagcagctatgaacgatgcactgcctttggaggtttatctatgtttgagacagagtgactgaccacacagacgtgtgtgccataacgtcccacagatgaggaagaaagcaagtgtagagaaagagtcacaacgagagagacagcggtgagaggctggggcaaagagaaaggctatgggagaagaggggttagcagggcttcactacatgtgtgaaaagagagaaagccaaatagagagacctgcaagatgtttacagagctgacatggagcgtttgtgtgctgtgtagtaggtataggagacccagtagcttgtgcggggctttattttatcccacaattggaactttactggcgtcctcccaggaacacttaaataattttgcgtggattttgccccttctaatctttgctgcacatatttttaaatggatggctcattctaggcttttgggtatgtagtgacttcttccaacggagtcttagagagacatctagttatagtgtttatgaggatcacaaaggggagatgttagacataactatgttgtagggggaaagaaaggggaaattagctagatttaaggcaatgacagagtgcacagggatcgtagcctgaaatacagagaaagacagatcttagagccctgaaaagtatttgaacatttttggacctctgttaggatatggcattattttatatactgagacaacctgaatttctcttagtaagtaatgtcaagtctaagtctattgaaaagacattcaaaaaattaatggaccatgctggactatttgcctcttttgtactcatgaagacttagaatttgaaaatatttattagttatctgcttaacactaacaccaagttgatcaggttgactcttgagtttattgatgccttttccagccagaagagatggaagagcctcagtctcataccctgtgtagacactaacttcccatctgcatttgaaaacagctcatttggtttgtattgatttgatcaacactatctacgcatgtcccatgacaattgtttgttatttgttaaggcaaagtatccctcttatgggcatgtgtttctgttagaatgtgctctcttaggttgctaaataaagtccacagggtacccctccccttttagtttggtgtattggtcctatgcctgtgctgcagagaggcccttagaagattcctggtccctctgtctcatggccgcccttcaggtaattgagaacagttactctctttcacaggcagttcctccaactgcccttcatatatcatgacttcagatccatttcaacctgactgaatgttaaacaggcagaacccttgatgtcaagggactgtcttcatcctacatgtagagaggtgtgtggacacttaagtgataagttttctcaaaaatatattcaagatatatgtttattctactattgtaaatttcaataaataaacaaataaacaagtgaataaaataagaatccatgacttccttctgtggtccaggctagtgctggagtcatcttgaatcttttccttatgttggattcaaacccaacatttccatggaaaacagatctgcctttcctatcattcacccactaatttattcaatcattcaaacattcatagagtagccactagtgtgtggcatagcattgtctcacctacacaaagacaactgaagcatatgtgcttagaagtttctctctgatcatacccttgaagataataattatgacatttccccccagattaattttccccagacccacttactttgcctcttatctatatgtctacactatcaaaaatcaggtgagcaaattgatatgtcctatggtctggatgaaactgtgagaagaagtgaagtggcttagtatttttcagatattttgtttgtttgtttgtttgttattcaacaaatctgcaaacaagatagcagtctgaatctggggcctgtgacagcccaggtttgattatcttgttgcttggttcactcgacttggcttttcaccataatagctgagaagagagtgggtgcaaatgtcaaacagtgaggtgagccagctggctttcacagggagagctgtgctctcttctgaatgaaacagaaatacctgaggttccttagagtaactaacccccgagtatcagcacttgtgaagtagaacttggaccaccaaaacacctcttttcagatacacatagcacatagctttccacatttttattttggtaattttagacttatggaaaagccaagtggaacaagaacaatgtctttgcacacttcgcttagatacatttacttttggaatttgtatctctctttctgtccatgtcacaccacatgacactcacacacacacacacacacacacacacacacacacacacacacagacatgcacatacacgtgtgtgcacacacactaccttcttgtatgattgtaccattaaaaattcattttctgcgtacaacacttcatttataaagatgagctactatgacaaggagcaaaggcattttctacaagtctgtaatactttacgataatacgtagtaatccttattacagtttctctactttttttttcttttacatccaaatttaatttgtatcagattctgtgacacttttctttttttttttttttttttacagtttctctactttaagatatgctttgtgtgtgtgtgtgtgtgtgtgtgtgtgtgtgtgtgtgtgtgccctttaccttcaacctagtgcccaaataatgaccagataggtgttttagctttgtatcttcttgatctgaaacaggtttttcattctcttattccccttttggtcctcactgtattgacatttctgaagagttcagatcagttttgtagaatgagtcataacttggataagtcctgttatcttctcgttgtaaatctcaggatgagctggttttgtgactatagcttatgagtgatggtgtgttcagatcatggatggagtgggagtggatcacctacattcttgcttcacatttttcttttgttttctcaggcagaggtcagcagatcatggcccgtgggcctgatttaaccccctgcctatttgcgtttgtcctgggaattaagaatgacgtttacttttttatggggctgaaaaacaataaaaagaatgtttttgtgaaaagtgaaagtgacaagaaatgaaaatgtttgtgtcagtgactaaagccttcttggaacacaaccacacac

SEQ ID NO: 306 - DNA, 6245 bp, Mus musculus
gacccagaccccatggcgactgatgcctcgcccatggccatcaacatgacacctaccgtggagcaggaggaaggagagggagaagaggccgtgaaggacgtgggtgctgagcagcagtatggaaagccacctccactccacacagcagccgactggaagattgtcctgcacttacctgagattgagacctggctccggatgacctcagagagggtccgtgacctaacctactcggtccagcaggatgcagacagcaagcatgtggatgtgcatctagttcagctaaaggatatttgcgaggatatttccgaccacgtggagcagatccatgccctccttgagacggagttctccctgaagctgctgtcctactcggtcaatgtcatcgtagacatccacgcagtgcagctgctctggcaccagctccgcgtatccgtgctggtcctccgggagcgcatcctacaaggtctgcaggacgccaatggcaactacaccaggcagactgacattctgcaagcattctctgaagaaacaacagagggccggcttgactccctcacagaagtggacgactctgggcagttaactatcaaatgctctcagaattatttgtctctggattgtggtattactgcctttgaactttctgactacagtccaagtgaggatctgcttggtggcctgggcgacatgaccactagccaggccaaaactaaatcttttgactcttggagttacagcgagatggaaaaggaatttcccgagctcatccgaagcgttgggctgcttacagtggccactgagcctgtcccttccagctgtggagcagccaatgaggactcatctcaagtgatcctttcagaggaccacagaggtggacatgaggaagatggcgctcttgaacctggagagcagctgggctcaacactggagacgtcttccttaggggacacactgacaaacgctgctgaacaccctccggagacagcaaaccaagactctacttcctctccgcagcttggtgcgaaaaaatcccagcctggtccttgtgaaatgatgactcccaagagatccatccgcgattgctttaattataacgaggactctcccacgcagcccacattgcccaaaagagggctatttctaaaagaaactcttaagaacgagcggagaggcagtgatgggaaggggagggtggttgacctgaagcctgagctgagcagaagcaccccgtccctggtggaaccccctgacagatcgaagctctgcctagtgttgcagtcttcctaccccagcagcccttctgccgccagccagtcctatgagtgtttgcacaagaacggtcaggtggtggaggcctggtacggctctgatgaatacctagcgctgccatctcacctcaaacaaacggaggtgttagctctgaaactggagaacctaaccaagcttctaccccagaaacccagaggagagactatccaggatattgatgactgggaactgtctgagatgaattcagactctgaaatctatccaacgtaccatatcaagaaaaaacacacaaggctaggcaccgtctctccgagctcatccagcgacatagcctcatctctcggggagagcattgaatctgggcccctgagtgacattctttctgatgaggacttatgtatgcccctctccggcatgaaaaagttcactgatgagaaatcagagagaccttcatcctctgagaagaatgagagccattctgctacaaaatcagccttaattcagaaactaatgaaagatattcagcaccaagataactatgaagccatctgggaaagaattgaggggtttgtgaacaagctggacgaattcattcagtggctaaacgaagccatggagaccacggagaactggactccgcctaaagccgagaccgacagcctccggctgtacctggagacacacttgagctttaagttgaacgtagacagtcactgtgccctcaaggaagccgtggaggaagaaggacaccaacttcttgagctcattgcgtctcacaaagcagaaggactgaaggacatgctgaagatgattgcaagtcaatggaaggagctgcagaggcaaatcaaacggcaacacagctggattctcagagccctggacaccatcaaagccgagatactggctactgatgtgtctgtggaggacgaggaggggacggggagccccaaggctgaggctcagctctgctacctggaagcgcagagagacgctgtggagcagatgtccctcaagctgtacagcgagcagtataccagtggtagcaagaggaaagaagagtttgccgacatgtcgaaagcgcattcggtgggaagcaatgggcttctggactttgattcagaatatcaggagctctgggattggctgattgacatggagtcccttgtgatggacagccacgacctgatgatgtcagaggagcagcagcagcatctttacaagcgctacagcgtggaaatgtccatcaggcacctgaaaaagacagagctacttagcaaggttgaagctttgaagaaaggtggcctttcactaccaaatgatatcctggaaaaagtggattcaattaatgaaaaatgggagctgcttgggtcgctctgtcatgagatcaagcagcggcgtagaggagtggcctccattctgaggttgtgccagcaccttctggatgaccgggacacttgtaatctgaacgcagatcaccagcccatgcagctgatcattgtaaaccttgaaagaaggtgggaagccatcgtcatgcaagctgtccagtggcaaacacggttacgaaagaagatgggaaaagaatctgagactctgaatgtgattgaccctggcttgatggacctgaatggaatgagtgaggatgccctggaatgggatgagacagacataagtaacaaactcattagtgtgcatgaagaatccaacgaccttgatcaagacctggagcctatggtcccaacagtgaaacttgaagagacacaccacaaggactccggttatgaagaggaggcaggtgactgtggagggtcccagtatacctcaaatatcactgccccttccagcccacacatttaccaagtgtacagtctccacaatgttgagttccacgaggacagccacactcagtttctaaaaagcagccccaagttcacaggcacagtgcagcccactgttttaactaagagcctcagtaaagattcttcattttcatccacaaaatcgttaccagaccttttagggggttccagcttggtgaggccttactcgtgtcagagtggagacttgagccagaattcaggcagtgagagtggaattgtcagcgaaggagacaatgagatgccaaccaactccgacatgagcttgttcagtatggtcgatgggtccccgagtaaccctgaaacacaacatctggacccacaaatgggagacgcagccaatgtgctggagcaaaaatttaaagatgagggggagtgcattaagctttcaagtgtctctcaggcatctgtctcaccagtgggttgtgtaaatgggaaagctggggacttaaacagtattaccaaacacaccactgattgtttgggagacgaattacaaggaaaacatgaggtgtttacattttatgactactcgtacctccaaggctcaaaactcaaattcccaatgataatgaaacagccgcagagtgagaaggcacatttggaggatccccttcttcgtggtttctattttgataaaaagtcctgcaaacctaaacatcagacttctgagtcacaaccagacgcgcccctccatgaaaagatcttggcaagtgccccccacgagatgggtcgaagctcatacaaaagtagcgacatagagaaggcactcacgggcatccagaatgcccgacagctctcccttttatctcgtagctcatctgtagagtccctttccccagggggtgatttgtttggattgggaatctttaaaaatggcagtgacagcctccagcgaagcacttctttagaaagttggttgacatcctataagagcaacgaggatctttttagctgtcacagctctggggacataagtgtgagcagtggctcggttggtgagctgagcaagaggacattagatcttttgaatcgtctggagaacatacagagcccctcagagcaaaagatcaagcggagtgtttcagatatcactctgcaaagcagttcccaaaagatgtccttcagtggccagatgtcactggatgtcgcatcctctatcaatgaagactcgccggcatctcttaccgaactgagtagcagcgatgagctctctctttgctcggaggacattgtgttacacaaaaacaaggtcccagagtccaacgcatcattcaggaagcgcctgaatcgctcggtggctgatgagagcgacgtcaatgtcagcatgattgtcaacgtctcctgcacctctgcttgcactgatgacgaagacgacagcgacctcctctccagctccactctcaccttgacggaagaagagctgtgtctcaaagatgaggatgacgactccagtatcgcaacggatgatgaaatttatgaggaaagcaacctgatgtctgggctggactacatcaagaacgaactgcagacgtggataagacccaaactttccttgtcgagagaaaagaaacggcccagtgtcactgatgaaataaaggtcaataaagatggaggaagtaccgagagggccaatccctcggacaccctggacattgaggcccttctaaattgctccataaaacgtctctctgaaaacaatgggaatggcaagaacccacccagaactcatgacttaggaaccaaaggtgaaaataagaaaaatacgtacgacgttactaaagatccacatgtggccgacatggaaaatggcaatgttgaaagtactccagagagagaaaaggagaagccagagatcccagaggcatcagcgaaccttgcttcaaatgtgaaaaagatttctgaatccaagcacgacgagtatgaagcattaatggatggttctgatgattcaagtgtcactgggaaggaatttggtcccccaaatgataggcatcctccacagattggtgccgatccccagcatcctgaaaggggtgactgcacatcagtccagaactcttgctcaggactactgttggaaaccggtggcggaagcagacaagatagtgatggactcaaatctttgtctaatgatgcaccaagtgtggctagaaacgctgctggttgctgcctactcgaacaaaatgagacagaggaaagtgcttctatcagcagcagcacttcctgttgcaactgcaagccagatgttttccatcagaaagatgatgaagattgttcggtacatgactttgttaaggaaatcattgacatggcatcaacagccctcaaaagtaaatcacaacctgagagtgaggtggccgctcccacgtcactgacccaaattaaggagaaagtgttagagcattcgcatcggcccatacacctgaggaagggagatttttactcctacctatctctttcgtcccatgacagtgactgtggggaggtcaccaattacatagatgagaagagcaacaccccattgccaccagacaccgtggactctggcttagatgacaaggaagacgtggactgcttctttgaagcttgtgttgaggacgagcctgctgatgaggaagcccgtctctccagtgcccttccaaatgaatcagaagtccaggatgaagctgctaagccagaacaaatgacagccagctcttctgtgttccgtgatgagacagacacggtgcctctttcaggactttcccctcagaagggagctgatgatgcaaaggaaggagatggtgcgtcccacacttcccagggctgtgtggagagcgcagagcctaccacccccccaggaaaggccaagagagaggggagttcaagaaagcaaagtgtatcaggaacgccagaagaaaacgctgcttcagccaaaccgaaaattcaagctttctctttgaatgcaaaacagccaaaaggcaaggctgcactgtatcccagcccccaaactttaacctgcaaagagaagctcgtaagctttcatgaagatcgacatagtaacatgcataggtagaatgtaatgcccccaagcatggaactcatctcattgaaagg

SEQ ID NO: 307 - protein, 2051 aa, Mus musculus
DPDPMATDDMAINMTPTVEQEEGEGEEAVKDVGAEQQYGKPPPLHTAADWKIVLHLPEIETWLRMTSVRDLTYSVQQDADSKHVDVHLVQLKDICEDISDHVEQIHALLETEFSLKLLSYSVNVIVDIHAVQLLWHQLRVSVLVLRERILQGLQDANGNYTRQTDILQAFSEETTEGRLDSLTEVDDSGQLTIKCSQNYLSLDCGITAFELSDYSPSEDLLGGLGDMTTSQAKTKSFDSWSYSEMEKEFPELIRSVGLLTVATEPVPSSCGAANEDSSQVILSEDHRGGHEEDGALEPGEQLGSTLETSSLGDTLTNAAEHPPETANQDSTSSPQLGAKKSQPGPCEMMTPKRSIRDCFNYNEDSPTQPTLPKRGLFLKETLKNERRGSDGKGRVVDLKPELSRSTPSLVEPPDRSKLCLVLQSSYPSSPSAASQSYECLHKNGQVVEAWYGSDEYLALPSHLKQTEVLALKLENLTKLLPQKPRGETIQDIDDWELSEMNSDSEIYPTYHIKKKHTRLGTVSPSSSSDIASSLGESIESGPLSDILSDEDLCMPLSGMKKFTDEKSPSSSEKNESHSATKSALIQKLMKDIQHQDNYEAIWERIEGFVNKLDEFIQWLNEAMTENWTPPKAETDSLRLYLETHLSFKLNVDSHCALKEAVEEEGHQLLELIASHKAEGLKDMLKMIASQWKELQRQIKRQHSWILRALDTIKAEILATDVSVEDEEGTGSPKAEAQLCYLEAQRDAVEQMSLKKEQYTSGSKRKEEFADMSKAHSVGSNGLLDFDSEYQELWDWLIDMESLVMDSHDLMMSEEQQQHLYKRYSVEMSIRHLKKTELLSKVEALKKGGLSLPNDIKVDSINEKWELLGSLCHEIKQRRRGVASILRLCQHLLDDRDTCNLNADHQPMQLIIVNLERRWEAIVMQAVQWQTRLRKKMGKESETLNVIDPGLMDLNGMSEDALEWDETDISNKLISVHEESNDLDQDLEPMVPTVKLEETHHKDSGYEEEAGDCGGSQYTSNITAPSSPHIYQVYSLHNVEFHEDSHTQFLKSSPKFTGTVQPTVLTKSLSKDSSFSSTKSLPDLLGGSSLVRPYSCQSGDLSQNSGSESGIVSEGDNEMPTNSDMSLFSMVDGSPSNPETQHLDPQMGDAANVLEQKFKDEGECIKLSSVSQASVSPVGCVNGKAGDLNSITKHTTDCLGDELQGKHEVFTFYDYSYLQGSKLKFPMIMKQPQSEKAHLEDPLLRGFYFDKKSCKPKHQTSESQPDAPLHEKILASAFMGRSSYKSSDIEKALTGIQNARQLSLLSRSSSVESLSPGGDLFGLGIFKNGSDSLQRSTSLESWLTSYKSNEDLFSCHSSGDISVSSGSVGELSKRTLDLLNRLENIQSPSEQKIKRSVSDITLQSSSQKMSFSGQMSLDVASSINEDSPASLTELSSSDELSLCSEDIVLHKNKVPESNASFRKRLNRSVADESDVNVSMIVNVSCTSACTDDEDDSDLLSSSTLTLTEEELCLKDEDDDSSIATDDEIYEESNLMSGLDYIKNELQTWIRPKLSLSREKKRPSVTDEIKVNKDGGSTERANPSDTLDIEALLNCSIKRLSENNGNGKNPPRTHDLGTKGENKKNTYDVTKDPHVADMENGNVESTPEREKEKPEIPEASANLNVKKISESKHDEYEALMDGSDDSSVTGKEFGPPNDRHPPQIGADPQHPERGDCTSVQNSCSGLLLETGGGSRQDSDGLKSLSNDAPSVARNAAGCCLLEQNETEESASISSSTSCCNCKPDVFHQKDDEDCSVHDFVKEIIDMASTALKSKSQPESEVAAPTSLTQIKEKVLEHSHRPIHLRKGDFYSYLSLSSHDSDCGEVTNYIDEKSNTPLPPDTVDSGLDDKEDVDCFFEACVEDEPADEEARLSSALPNESEVQDEAAKPEQMTASSSVFRDETDTVPLSGLSPQKGADDAKEGDGASHTSQGCVESAEPTTPPGKAKREGSSRKQSVSGTPEENAASAKPKIQAFSLNAKQPKGKAALYPSPQTLTCKEKLVSFHEDRHSNMHR

SEQ ID NO: 308 - DNA, 523643 bp, Homo sapiens
  misc_feature (1)...(523643): n = A,T,C or G
ggtggtgaatgcctatagtcctagctacttgggaggctgaggtaggagaatcttgcttgaacctgggaggtggaggctgcagtgagctgagatcaggccactgcactccagcctgggtgacaaagtgaggctctgtctccaaaaaaaaaaaaaaaaaaaaaaagacattaagccaagtcaacatgccagtaaaacaggtcctgaattgttttaatcttatagtgttgggaaaaaggttgatctctttggccaacttccaaataagagctgggtgagtaagcactataaatatagaactgagtaaagcaatgattttattacttgattttgttctttttatatctcaatgtatgtattattgtatatgttctttttgtgacatgtattatatatttacttttatgtttgtgtctgtgtaatctttttcagaagaattctatgaacaataatattttgtattattgtgaaatgttttcataataagtatattgacagaatgtttatttcagtagtaaattagtaaacaaatgtaaaatgatgtcattagtatgagaaggaaagattgatattatatgcaaaaattcattctcacatatatttttaaatctatatgtgcatgtgtgtgtatttatatgcacacatgtttatgtttgactgttgactttggaatttttaaaatatgagacagagtcttgcactgtcacccaggctggagtgcagtggcacaatcacagcttactacaacctctgcctctcgggttcaagtgattctcctgccttagcctcccaagtagctgggattacaggcatgtgccacaacacccagctaatttttgtatttttagtagagacagggtttcaccatgttggccaggctggtctcgaactcctgacctcaggtgatccacccacctcagcctcccaaagtgctgggattacaggcatgagccaatgcacttggctggttttggaatttttgattgcatgtctttaactggccaggggtggagaataggagggaggattaagttgctgagtttggcaaactcagataaaaacatttactaggcgaggtgcccaacaagtgcttgctacacaacctatgctactctggaagacagttcttgacccaaaggaggttgaagttgtttctgtgacagacaaacatctgtttagtggaatacaaggcaggctgatgtaaagtctcagctagaggtaaaaggaagttgatacttatcataggatgtaggatttcagctcttgtttatttcatagaaccctagcaaatggaaagacttgtgaatagtgtacaaccctacacttcatagagctgatttttaagagtgtatttgtcaaactggattattcactaaagaaaatgtttctaccccataagtaaatcttttttgttagagctgctgtgattttgttgtagtgtaccctttaatatattaattactgaaggatttttaccttgtaagcatgatataattattttccttagaaaaaggaacgcctttaaaattatcttggaaatttccatttttctataatgtaatttgtttatgctgggagactatttgtaaatgaggattgattatcaatattttttctcaggtaaggggcagagactaaattgaaagaacttgtggggtgaaattgctgtgttagttacaagacagttgtgaataacttgaaaacaggtatcatgagcaccactttatttcctgcaaataagaactctgatgacacatagtaggtgttttcttgctgacttgctttgtcattttaggtctaatcttttcagtagcaaattatattttggtattttaggcagtaaaggaagggataaagatttacacatataaaccttagtagaatcttacaacgtttcaaacactggggtgataaagagaaagcttgcaggaagcttatcattgcctggaatagaaataatgctatttttctcaaataattaagaattaagaaggacttattaagaaattgcttatgcctaggagtgtgaccaaaatagcagtaccataaagagctgtgtacttgaggaggcaagattaagacctatgaaaacatcgaatgctaaaacaggaaagccccagttcaaaaagcttgtaaactcctgtctaatatgttcgtcctcagtgttttcctttgcctgtataaattagcagcacaattgtgcttccattaacacattaaagccagtaggttccatgtcaaatgtttgtgtttgtagttaaattcaaaatgaaacagcaaaacactggtcggccaggtgtggtggctcatgcctgtaatcccagcactttgggaggctgaggtaggcagactgcttaagcccaagagttcaagaccagcctgggcaacatggtgaaaccctgttctccaaaaaaacacaaaaattagctgggcatgctggcatatctatagtcccagctactcaggaagctgaggtgagaggatcacctgagcctgggaggttgaggctgcagtgaagtgtgattgcaccactgcactccagcctaggcaacagagtgagatcctgtctcaaaacagcaaaacaaaaacaaaaacaaaaacaaataaaaacactataaagttccataaagtcagacaagagaaaatcttgaattcagaaggacgtcagagaaatctctgaactggttagggcaagtttctatgggcaaaatcaccccaaggtctatttcagattccaaatctaatgttcattcaagatctgatctaccctccctgggcttgttgaggttttcgtctttgccaatggaaattttgcctgggaaaggagaggaatggaactcaagctcattgagatggtggtcactatcataaatttgggaatgttcaggagtaagggaggataatatcttgcatctaccttgtgagtaggtcttaccagttctggccctgaacctaaccctttgaagggtctcagctctgaggctgtgaacccctctgggacctaatagcttttcttttcccttcctaggaagctgcatgctactggtgcctacttatacattacacaatttctcagatgactttgtgaatcagttaggcctctgtttactgtgactgaacctccaagccatacactgccttaagcagaaacagggacttttggactcataaccaacagaaccagagtaaggctgatttctggcataagtggtgagaggaaagtgttcctttctctcaactcagctctgctcttctccttgtgttggctttattcttagacaggttcttcattcatgaatacaaaatggatgagcaactttagacttgacatcctttcctattcaaaatcaggagccaatagtgattttcagtaaaatgtttcattgcttctcagtggcttcaatggtatcccatgtacacctctgaactaatttccgtgggtcatgggaatagtaataaactgattagcttaagattgattgggtcacatactccattcctttcgttagattcccacccaaagcatgtaagtttgagtgtagaaaaggtgatatctaagaggaaataataaatgcaaaaattaggtaacaaaataactgaatttgtataccattattgctgctgcaagttctgttctgattgccaatgattgataatcatcaggtaataatttcttctttacatggctacctacataaagcagagggatgatgagcattcaataacaatagcagccacacaaatgcactgtgcctaaatatctgatgtccaaatatttttggcctccaaatactctcagaaaacatagaaagtgtatgggttgaagcagcatccacagtcagcatgggcttatgatcatataggcatgtggttagagtgtttgaatacttttctattttgtgaatgaaggtcttttttaaagccaaaattgggcgctattggtagaggattcactaaaccctttctccttctgcataagattttgacgtttggttaactctgtaactctgttcccttgaaaacagtaaaatgtcaaccatgttattgggtaacattggttagggtaaaaatgacccttggttagtgaaaatgactgccttggagaaggggaatttacctggtctggccctgactctgctctccaagacgggctgtttgtttactctgtcatagccctgttccattcattatattccctggctacatctgaaatgggagatgaggagtaagccctccttagtagctagtttgagataactataaattctaagaagaagctgtagttttgggcttctctgagtgcaatgactcttgtaaccaggtgtgtctcttggagggatctggaagttatgcctatgaagttgttacaaagatattggttcctgtgaggaatgaggttttcaaggccgggcactcttgaacttgcctaatgtgttcttacctgagttcttaaactgtcaccagggggccagatagaatagctttggacactgtatagattgttccatggattaccacaagactccagagaagaggaatgcctgatgctgctctgttggcaaactctctgagtaggctggtgccaaatgttgactgtgatagtcttatacacctgaacgttcagttgagcttcagaagactcagtgaaggtattgcagacacataggtaaaatgcagcctgaagcaaggatcatattcctgatctcatgatgtggcagaactggataactatgcattttagctgtttccttttctctcatggcacaaagctaaattctattttccagcttatcttgcaataggtatggccatttgaccaagttctaaccagtggaatgtggggtggaagtgaagaagggtacttccagacctagcccatgaaaacctcccctataccatctcccatctttcctcaattggtcaacttatgcccaggaatgtaaggcattagaggaaggtgaaacctcaagagagaggtcttgaataaccacatagaaggtcatctgcagtcaggaatattcagttagagttcaaatgaataagacatacacaactatatttagccagagtaatttagcagcttagctgtgaaatccattagtacttccttaactaacagacacattcctcagatctacaaattttctcattgtataccaagagatgcaggcctgctgcattttcagaaatggctttaagattttttaaaaccctagcatgcaaacacaagatgtatgtttacatcatgagttaatgatttggaaataatactaatttgcttttgaaataataagaatttggaatacaactttgtctttgttcatattttgctgctataacaatatctaacactgagtaatctatatacaaagaagtttatttgttctggaggctggaagtccaagatcaaggggttgcatctggtgatgaccttcttgctgaatcataacattgtggaagagatcacatggtgagagggtgagaatgcagagatggaaaaagggggctgaactcctgcagtcactaaattactcctatgatagtggtattagtctattcacgatggctccacctcttaagtatcatcacaagggcaattaagtttcaacatgagcctatagttccagctacttgggaagctgaggcaggaggattcattgagctcaggagtttgaatccagtctgggcagcatattgagatgcctcctcttaaacaaacaaataaacaaacaaacaaacaaaaccaaacccagaaaaccaaacccatgaattttggagggaacactcaaactatagccaatgcctacttacaaataggaaaaaaatgaccaggaggaaacatttctataaatgttgctgtctgcaaatgatactaccagatttctgtcttgtcagttcaggatggcagagaaagattggaggcagactgagttgtgctgaaggtgagagaagttttattttttccttcttctgcagccgcaggctgaattggaggtttagtggtgttctagctcattgctgtttacagtcatatttactatgttgcagatggacacccaatggaacattagtctatgaaaaaaggattctgtgattaaatataaattaggaaaatactgcatactatatttctacaggagagtctcaatgcatattagcagattgaaaactcttagaaaatctgcaacctatttaataaatgctgatgggaaaactggctagctacatgcagaaaacagaaaccggacccctttcttataccttatacaaaaatgaattcaagatgaattaaagacttaaaaccatgaaaaccctagaagaaaacctaggcaataccattcaggacacaggcatgggcaaagacttactgattaaagcaccaaaagcaattgcaacgaaagccaaaattgataaatgggatctaatcaaactaaagagcttctgcacagcaaaagaaactatcatcagagtgaacaggcaacctacagaatgggagaaaatgtttgcagtctacccatctgacaaaggtctaatatccagaatctataagggacttaaacaaatttacaagaataaaacaacctcatcaaaaagtgggcaaaggatatgaacagacacttctcaaaagaagacatttatgtggccaaaaaacatatgaaagaaaagctcatcatcactggtcattagagaagtgcaaatcaaaaccacaatgagataccacctcacgccagttagaatggcaattattaaaaagtcaggaaacaacacatgctggagagcctgtggagaaataggaacgcttttacattgttttggggagtgtagattagttcaaccattgtggaagacagtgtggcgattcctcaaggatctagaaccagaaatagtatttgacctagcaatcccattactgggtatatacccaaaggattataaatcattctactataaagacacatgcacatgtatgtttattgcagcactatttacaatagcaaagacttggaaccaacccaaatgcccatcgatgatagtctggataaagaaaatgttgcacatgtacaccatggaatactatgcagccataaaaaagaatgaagctggaagccatcattctcatcagactaacacaggaacaggaaatcaaacactgcatgttatcactcataaatgggatttgaacaatgagaccacatggacacagggaggggaacaccatacaccagggcccttcggggggttgtgggcaaggtgagggagagcattaggacaaatagcgaattcatgcagggcttacagcctagatgatgggttgataggtgcagcaaaccaccatggcacatgtatacctatgtaacaaacctgcatgttctgcacatgtatcccaggacttaaagtaatataaaataaaaaaagaaagtctgcaataaaggaacatgtttttaacactgtcactttatcataaataatgatatataatataatcttgttagaaaatttatattttattaaattataattttatctataaatggataatttgttcagaataaactaccccaaaatcttggtggtgtttgtttctcactcattgcagcccagtgtaggtcaataggtagttgggagaggatggttgagctccatgcagtcattcagggacccaggctccatccacaatgtgtggccattatctttctgggcttcagagttccactggattctttgcatccagctagcaggacaggaaaacatgaagaagagacacttggtcttagccacctttggagttgatggtttccacttctacttccgtttcattggtgagtgccattttgtgggcaagcaatttagctagtccaggttgctaaaagtttgacctggcctcaggtttgatgagccatccatttcttcccatcaaatgattgacttgcttctggcaaaaaagattaacaagattcttaccatcttgagaagccatattcaaatctggaacacctgctcccaccctgtcctctcctctttatagcatgtggatttcagctctggaaagactaatcttgttctgtaataggtccatgtctctttatcttctccagagactgaagggttcttcagaggtatcttaaagagtcagcttacagcaaatgaggttggaggcagtggttgagaatggctcatcagtctgggctctgggcttcttatcttgcctcaaccaaggcagtccagctttgatctgtatcattaaaagaaaggttatattactaatgaaaaacctgaaaactatggttattagctaaatcaatcatctctgcagatgaaaaacttgaggccccaagaagttaatcaattggcctgatatcacacagatgctctaggaggacctgacatttacagttgggtttcctgactctcagatctgtactctttgtactggggtagctgcctgctacttctccccttgtgtgtggcatgtggtctgaggtctaagataaagggagggagtcaggctctgctgatgccacaaaggacctaagcaggcagattcacctcctgcttttggtctcttaattcctctctagatgaagcaagaacaagtctgtcttcccatctagggcagggttgctctgtgcgaggctgatggtgcacgctgctgggatattggcacttctcaggcattttattagctcctgtttacagagacactgcctgaattccttctgccactcatcccacaccgcctatgctggtggttaacagtgccattttaaaatctcaagcaggaggagacaacataattgtctcatgttttaagcttttggaatgttgttctttttcagagttgtgaagacggagtggatacaggtcaacttgattctgcttttctctatcaatggcctgcaaatattaaatatgcaaaacataggctgctctgtccatatctccttctccccagttctcaccacatgacgttgatttctgctcaggactggaaagaagtgattgctttagatttgcttttcttttaccaactggagaaatgccttaccgtgtcttgtttaaatgtggcttttcacacagttccagcttttggggttggggaggggcacaaataatctgtgtggtaggcagttttattgttcagaaaagaagaaaacagaccccaatgtttggaatgccaacgatttaggaagtttctagcaggtctgctacttgttccaaccactaggtttgatcccagaaaagactcacatgcgttttggccatgagaaggaggggttccctgcaggccaaaggaagggtcagtagaagttgagggtggtgtgttgtgcccctctagattccaaacttccctttgctgcctatctgatgaccaggtgaaagctgggtttattctgcatgggaaggttctgtgggttggtgttcatcagggaaaataaccaggacagacttcattggccaagggtttgcccatgttttgagaattaaaacttgtttacttgagagttagagtcatttggtcagctgtttatattccatttttaattatttttgtgctcgctgttttgttcttttggtctttgacagatgagcaaaaattctttttaataacttttaaaaagctatcccagtgctgaccagggaggaaaaagtgatcaaattgtctaataaggaaacattgtacatttcagtttttatttgcttagtactaattctattttctcctcccaccttttttttctaaatgtataacaacaaagggggagataatttttgttttttccaaaatgctttcagggaaatcccttttaaacctatggattttagtccaatgaggaatcctcttcctttggtctaaattttgcatatcgtctgtttcttacagggcttccgtattgtctcaggctccactggaaatgcagcaaggattcctagcacatcccagttgccatagcaacagcagtctttcccataatgagctgcatcatctgaactgatgtcacagcatcatgcagcaggtcaaacaaggcatctcctagtattgcatcctacagatgtgctgtaaacatcaaaagaagacggtgggatcaggagatggtgagtgttaaatgtctgggccttaattgcacggctgttttgttggttagtcggtgtctgctaaggcggagattgggggatgttgtctctgcttaaaatggactggggaaagaagggctgttttacctaaatcgtttttcaggctgccgggttaagacaaaggcctgtaagagtcatataggaattaaaatatgtagaattattcttgctccagctctgtctgttatttttaagtgttcttacagaatttttcataaacataagatgatttttcaattgcaaaaccccagataagctttaaaatgagtagttaacagtatttaagcattgtaaaaatatagatttctttttgggaggcagagctaattggccccctctttgctcttgtgaattatgaaatattcagtgatttgcagtatgaaattcattatttacctcggttgggtttcagtttcttcatggcaaggaacaaatgctgaataagcatttgacataaccctgatgtgaaaggggatctcttgcatattcaagacagaatttattaaaagcataaaaacctaaaccaaatgaaattatttgagccttttgatctatatggtagttcttcaacccatgtccttcagagttagttgaaagactgccacatatttttccatctctagctagtctctgaaatagctggagttgtttgcaggctgacttgtaactgagaaaggaacaagtctcctctctgcggcagttgcagtgaagggtaaccctgggagagcctctgaagtggcagtggtgttgccatcccttgcttaactttaacaaaaatctgggtatgatgaataaatatcagggtcctcagtggttgtagggattacagacctctggactcagtcataacctcaactcaattccaaaactctaaacacgtatcattttcatttcaactcctagctctgtttttaggcatctttattattattattattttctaaaaaattagtctgacagtgtcagataaggagcagaatgttgccttttgttttgggaaatgaaatggatttccctggtacagctgattgctactaggggagagaaaggaggaggcacatgtcagttcaattgatcaatatgtccacttagaatcagggagtggtcttgtggcttaatgctgccaaattgatagtttttactcaaaaagtcttacacgaaagaatggcaaccattgaattcctcttctttcagtctgtttattggggctaaagagatatatcatggaaagcaggaaaagcaatacctttagctagcttggagtgattttttttttttttttttttttttttttgcacagagttaagtatgctagtcccattaggcaccagccagaggaaaggcctcaggttttaatttgtttgtttataccacatcacgcacatgcttgctactctcagtcctttaagcttatgtttctgacatgcagctgtataggatgggagaggtcagctcagcctggctttatcgcaagcacttagaagcatgaattgttcattgcctgcttttttatgtcatataatgtgagcagaaagctctgctgggactgctgggtgtgaacacatctaagtcgaaagctctaaggtgacagggaagagtgctagatggtgatgggggaagggaaagtatgtcttgtagctagattataaatctggataaaatcacttagtgccttttagaattttcttaaagtattatttctgaagaagagcaatgaagaaagacttgtttggtaacatgaatttctaggagtaaaaaaaagcaaaaggcagcattgtaatgagttttctgtttgcttaattcttgtctcttttgtttaaagtgctcttcagctgcttcatcatggttgatttgttcaattactggaagtcacaaaagctagattccttaagggcagtgttagaaaaagtggagtcatgctttgagggtggggaagggcgctggtgggtgtggactgacgcagttatctagtggaacatcctcccggttcagacaaccctgtaatttttccccccgcaaatgttcaaaatgcaattacagttctccaactttatgcttttgtgctctttttgctccaggagaacaaagccctggtaatgagagctatcatcctaatgttttgtttcttcgtttctttgtagagggccacagcctgcgctgctctctgattagctgcatgtcttaattactggctaaggctatttcagttgtcttagttttaatatatccccaaggggtagatggtgtgtgtgtgtgtataggggaagggagagatttctctatggctgtatttattggtgcctcactgaaactttctacagtttaaggaattttgtttcacagtaatgatagatcatcaagaccatgtttattggacagagtttaggccatggaagcctcacaagaagttaatgtcctctatacttttggtcatggctttcacaaatacattacaaagttacaaagaagttaattctttgccgataactaggccgcatagggatgataaaaataataatcataataacaatcatagctatcatttattcagttcttactgtgtatcagtactgaattaagttttgtgtatatcttatttagcccttattattattatgaagtagagagtaataatctcactttataggattaggtgttattattcacattttgcaaaaaccagtccttagccaggcgaataaacttggctaaggttatgtagttaataagtgattgggccaggattccaaaccattgcgatctggctatgcagcacacatgcttacccacggccatctcagttttatgacatctttactgtatataccatacagatcagtcatctatactctatcacacgtaccccacccctcctcattctaattggaaaatcagatttcatatgtagaatgaaatgtcatttgcaacactaaggttgatttcactgtaaggatgagcatgaatcttgatcagatgtgaatatttactttgtacccagagatttaagtaatgaagagttgatgcttagacttttgccactgcccttgcttgatataactttctagcaggatctctgtatggaaaatgttacatcaataattgtgggcatgatggagttgcactcaaagcaggtcttacctgagtcagtaatgattcagctttgttataaacctgtcttatcagctatatttgtggtgctttgttaactttaagatgtttgtattccctgctgttgcaccaggttctgttctcaacctggtgttgagaacagaagcagaaacttctctcacagtctggaaagtgtaatctgaatctatctcttaggttaagaagatagaggatttattttgctgaatgtatcagtggctgaaaccaaactctgtctatctctgacaaagtacaagaatgacagtcttgtgtaataacctggaagccttgtgtttgaggagagctgatatagtcatttctgtatcatcttgctcatccccagctatccacgcccagcgtcattattgggctctaagggctgttctttgtttgagtgtggggctaatgcacacactgacagcatgttgatattgattcctgtatggtgaatacttagaaatattattccacagggctcattagccttttctaggttccaggaagaagttaacctttgtcctaacctgctccaaagaggcccaagcttgtgtctgcatgaggtacaggaatgagaggctgatcagaaagcatcaaagctgctaggtacaatgactacaggagttaggttccaattaggaaataaaatagccagtggaatttagggaagttggtggtcttgctacatgtctctgattttcttctatttataatcctagaacccatgaatggcagtttgttttgatcgcatggattcaattcaattcaataaatatttattgaatatctcctatatgccaggcattgtcagggaatctatagcaatgagcaagacagatgcaaatctcttccccagctacattctagaggggaagggaaaaatgggtaaattggtaaaataatttatttcctctaatactgcaatactatttctatttactttttattccatgtgttattagagaagcccattatctgtgcacatttgtataggtacatatagctatatggtttatatgtggaggtaaacttactgcattaaataataacttttttttttcttgcatgggtttggattagaatctttctggatgtggacaagaccaatatggcaattagtatttttttggtataaactattttgagaaataaaattataatcagtcaaatagtgcatgtctatctcagttgacaaacttgacatatggaaatatgaaatgtgtgtggcagatcagttaaggagagatatttttgtttttataaaagatattcatcacctttaaaaattgtccagagagccctctaaattgagcattccagccagcctgctgatggaggtatgtatcatacaaggtaccaactacacacttagttgtacaaggacaggtataccagttaccttcagtctcatctaatcgccctagtgtgccttacagtattgctttaaatgggaagcatttctcgaaacaatcatattgactgaactctgtagatgggccctgagtgtggtttttcagaggaatagcaatccatataggactttggccatggcaacagagttttaggtacagtagccccttccgcgcccttatttgtgatttagccttttgtggttatggttatccgtggtctgaaaacattcaatggaagattgcagaaataaacaataagttttaaattatgcgctgttctgcatagtgcagtgaaatctctcaccattactgttctgtcctgcctgggatgtgtatcattcctttgtccagcatatccatgctgtatatgctaccagcttgttaagtcacttaatagccgtcttggttttcagatcaactatctcgctatcataatgcccatgttcaaataacctttattttacttaataatgactccaaagctcaagattagtgatgctggcatattgttacaattgttctgttttattattagttattgttaatctcttattgtgtctaatctataaattaaactttatcacaggtatatatgtataggaaaaaacatagtatatgtagggtttggtgctatccatggtttcaggcatccactgggggtcttggaacatattccctgataatgagggggactattgcagtttgaattaataaggcatacagtttcttctccacgagcacataccggtcagtaattgaattcctgagttggctttaagatttggtgaagataaaggacagactttgttttcctcataagccaccagccatatttttctctgttcttcagccatggggcatgctccaaactcttccagccatcttgcagtggtgtgctttgagtcacaagggtaagtagggagagaatgtggaacctttattttattttcagatttttttttggagacagggttttactctgttgttcaggctagattgcagtagtgcaatcattactccctgcagccttgaaattctaggctcaaacgatcctcccacttcagcctcccaagtggttaggactgcaggtgcacatcaccccacctggctagtagagcctttagaatggggtctcaaactggctaatacatgagctaaacctagcctgcagcttgttttgtatggctgctgggcaggctttatgggtgtgcaacctgtgtagttgcatagggccctgcactgagaagggcccacacttagtttaatactctgctgtaaccatcttggaattcttaataattttttaataagaggctccacatttttattttacagtggaccttatgtagccagtcccatatggcccttttggtgcccccactgatactgcctgagccctgtagatgtttgagtttcagactccccacttcctcctactctggaacaattcaaatagaaattgtagtgcttagaaaaactaagggaccattgtcaaaacaacccagagcaaggcccttgtagatggtaattcagtggcatgcaaaggaactcagtggcatttcttttataggcaatgggggatatattacattatacttgaagatatttggtaggtgaggtttatttgtcaccaccattgctttcaggggagaaatcaaatcttctttgcaaagcaagctaattaaccatcctgttggttcaatgtttatattaattctcttgccctttgtttactacttgattacttttatcacctgctttgtttaactctcatttaaattacacaacatatttatgctgtctgggtatttttttttttaatactatccttttctccttttttttttttttttttttaattctctctctccaggaggccagagggcctataattcgaggttatattactacaggaaaagttcatttttttttttcaatttaaaagggaattatagtcaatatttataatgaacccttctccagcaaggtagttccagccatgctaatgttcagaagtccatatctgccattactgtttataataatgagatgctggtgaccaactcctggaccttatggtgggtgaaacattcccacccatcatgtcacagtgagaagtggctgtgttaatctattaatctacagatttgcagagagttgttagaaaatgggtatgaatgatggcacttgctgcacaggaaaaaggtaagttttttttttttactgtgtgagtaaacaggaacctgacaaatccagaaagggctcttgccacctcttagaagcctaagaatagagtcttcttcaaggatcaagccccaggaatacaagaccttgtacccctgaacaattctgatactcactatgtccatcactgtacaagctgtaaaactatctgtttcagataatttcaccagtagtcaacaattgacaaatgcatcagatgtctaccatgtacaatatcatatgctaagagaacaaacattttacaaataacgatgactataggcacacacacatgtatattacttggagaacttgacatacatttaacatggtgttggctgggctgtgcatacagatggtcatgattagttcttccttttttctgaacataccttgacatggagctccaagcatatctgtggaggctctctcatcttctgttctcatccaatttcttgatttaagtgtttgtctaataactcattacttttgctggcccactcaaaattcttgtttctcagccctttctcagctttctccatcttgagtgctcatagtttgttactactccacctcgtctcttatcagtgttaccttctgggactgttctgaactcattacagtcctccccaccagcagcccctgaggccctcatctccctgccactgtttattcctattacattagcataaaagtagcccatggaaaaccaaatgacactgcagtttctctgatatgtcccttggaagaaatccgcttgcttttagcttttaatagttaattcaaatacttccttgtatttaatctgtttttgtctttgtgtgaattgaaagggaatgaccttttaaaactcctattagtcagtcttgcaggcagcctatatggagaatcaactagaaataactgaaacagcaggggaggtggtatatgatgtggtagaagactatatgcaacaatgaaaacaggcgtgcaagtacagtttaaaaaatttgtcctttagggttattggtacatttcattttaaattaaaagtaaataagaataagggggtggtgatgagaagatgggcagcacaagaagaaactgaaggatgcacatttcttcaggcttggctagtaggagcacacagcttctagaacactgtagaggaacacctgcctcagaagggcagcttctccaagaaaaaaggacagatctgaaaacaaaggtaacaataaaaactaccacaaaaagatatgattcctctgagaacaaataaagaatcagattggtgaattaagatgttatggtttatattcatttagtaataaataattgataacaggatttttttaaaaattttattttattattattatactttaagttttagggtacatgtgcacaatatgcagatttgttacatatgtatacatgtgccatgttgatgtgctgcacccgttaactcgtcatttagcattaggtatatctcctaatgctatccttcccccctccccccaccccacaacagtccctggtgtgtgatgttccccttcctggataacaggatttttaaacatttgaattttgactaaactgaaaataagttgaaaggcagaggatggagaaaaagataacataaccagcataaggagagaaacaggcctggcatggtggctcatgcctgtagtcttagcacctcaggaggctgaggggggaggattgcttgagcctagaaggtccaggctacattgagccatgattgcatcactgcactccagcctgggcatcagagcaagaccctggctcaaacaaaacaagacacgttttactctgttttttttgtgtttgtttggttttttgttgttgtttacttagagagtttttccttttgttttttgctttagttaatatcatttggttgatttgttgtaaaggtgaatatacccatatattttgtttttctttaaaaaaaattctttaagaaaataacataaattattatctttggtatgatgtttttctctggttcttagaccttaacaccatcctgcctaaataccatatatgctcagatacccaaacaagaagtagtaaattgagtgccatcaaccagcttgaggagaaaacaagctttcaaaaaaagtctactctagaaccttaaatggtggtggaaatgttacatgcccaaatctaaagtgatatttttgcaatagcttgcatcaaatagggggtttccattttggatttggaatcctaacatccagcaatttatacatatatatatatagactgaaattctctgagcaagagattagtggtagggaaggtgagcagggaataggcagtaccatgagaataatcatcatgtttcccttcttgacttactccatctcctgacaccctatacctaaacactgaacaaaaacagagcctggcagggtggattttggagccaggtatatttacctttgaatcttagctctactataaaattattagagttatgatcttaaggttcttagagcctcatttttccccatatgtaaggagaatatccattttacaggatgaaatgaagtattttatgtaaagtttttggcacaaagtgagaatttgataaatgaaagttattgtttcacatacttagaagtagtggggtaagattattactctctcaagaagaaaatgcaatttctcctcaactccagccctgaaaccaagaaaatcattcttagagcttttaagagaagaactctttaatatattttaaatatttatactgtgtcaagcatatatattatttcatttaatttcctgtctctgcttaaattttgttcataacacttatcaccttctgcaaactaaacattttacttgtttgtttgtttctccctggtataatataacttgtataagggcagagatttttgtctattttgttcattgatgtttccttagctcccagaatagtgcctggcatatggtaggtgctcaataaacatttgttacgagagtaaatgaatccacataaccctgtgagaggaggccacatgattgtattcagtaataaaaaattaactctcttttgcagtggtccttttcaaggtataaacacccttgagttattcttgctattccagatagcatgccaagaaattcttgtggctgatggttagggtatcatgtaccatccaattattctaaattcttctattggaagcagggatattgcctgggaagctctgatgtcctcctctctaaagggtttctatgaggaagctggggtttcacaggtcatttgaaagatacattgattcttttactggtggttgtctcttcctttctctctttagtgaatttgggtccccttcaggaacagggttatttattctcctttaaatcatgaatccccagctgtaaatctcagattgatggattggtggaatttgaaagactctttgatgaaagtttcagatagggagagtgataagccatgacagtcagcccttctctgttgctattaaaaatgctctaatgagaaatagagcaaagcacaggaacacaatgatacagttgtttcatgaagaacatacagcttcataaatgaaggaataattaagagagcctaattctatacttattttgaattagattcaaaacaatctttgaagtggatatctgcagctgaattttgtaccaaaggcatattctaaatgtcatacttttgaactgagtatttatttctcagggagcaggtgttagggttttttttttttccttgaaattcaaaccattttgacagtatcctatttttagaatgcctttttctttaaaaagacaagcaatatccaaaagcagtagaaagacatcttgggagaaggcagtgttctggttataccataatcataacaagctgaataagaaaaagtaatgctgttaaaatttaaaactcagtgtttttattttatgataataaaacatatttgtttttattaaatgttatttaatatattaaataaaacatatttaatatactttcaacaaccttatgctacaaaataaaaattatacctcatgaaaattttcttgcatctgcaatatatggcatggtcagttgcaatgtacaaatacattactgtgttcaaatagcatgttattctaatctatttcagagagcactggactgggagtaaggcacctgaatttttagtccctgctgacatactcttcctgaatcttggtttcctccacagtaaaacaaaagggtaaaatttaaatgatttttgtttcctgatagctctagtattttatgcctcatttacagggttctccatatttctccattgtttgtttagtcttaggattttccaaaaatctgttccacagagtattttaaatttccttagtgtgctcatgtacctgaaaacatattttaatttattatcttagttcatttggagtgctataacaaaataccataaactgggttgcttgtaaacaacagaaatttatttctcacagttccggaagctgggaagtccaaggtcaaggtaccaaagatttggtgtcaggtgagtccactttctggttcacagctggtaccttctagctgtgtgctcacataatggaagggataaagagtctctcttgggcctcttttattagggcactaaccccattcatgagggttccaccctatgatctaatcacttcccaaaggccctgcctcctaatatcatcaccttgggggttaggattttaacatataaattttgggaacgcaaaacattcagacaatagtatttatataccatttatatttcacacttgtgtgttttattagcttatatttcataatacttttggtggtcaacctaaagtcaacacataaagtttcgcttaaactaacaagctattatctttcacaagaaaatttttttagagtttccttatcttgcaaatttgtgtttctatttgttttttctctttttagccacaacatatttttgctgttaatgagttgggtgaagtatttggttcccctctacccttcctattgggtatagaatttctttagaaatttacactgctgctgtagacattcacataaaatataagtgaaagtgctgttgttaggtcaaacggtatggaatttccattgttgttgtcaaaaaatggccaaatattaacagtttcatgatactttgataacagtttccaataatttgttcattatcatagcaatgttagtctttactatttttataactcagtgatgagagccagtccctaaatgaactagtgaagtagtgcaaagagcacacagggtccttggtgaaagatagattggggattgaattctgcttctatactgccaacattgtgaccatgggcaagttgctgagttttgttgagcttcagtgtccttgtttgtaaaataaaaatgataatgcctgcctctcaagcttgctgagaagaatgcccctggctcccagaataatgttttattttgtctaaaatgactctcaggctggatgtggtggctcaggcctggccatcattttagggaagctcaggagggaggattgtttgagtacaggagttcgagaccagcctgagcaaaaaagtccctaaaaaacaagtaaaaaattagatgggcgtagtggtgtacaactgtaattccagctactagggaggctgaggcaagaagattgcttgagcccaggtgtctgaggctacaatgagctgtgatcatgtcactgcactctatcctgggtgacagagcaagtccctgtctctgaaaataaatacataaataaaataactctcttgagtccatgagtctggtaccagactggaagggacaaatctttgagtctctaccttttctctggatgatctatgcttgttgatggcttcttctatttccatgtgctgatgactcataaattcagatttctagcctctgattattttctcccagattcagacttgtatttctcctgctttctgtatgtcttttcctgaatcttccacaggcacttttcacttagcacacctgaaatgatctcatcctttctgaacttcctgtctggaattaagaattgtcttcagtccctgcccttagggtggagactgggagtcatcctaagccctctcttccatgtctaccctcacctaagtcctgttgagtcaccaagttctgttttgtttctaagtgactgggatttggtaaaaatgagcttaagatcaccccatataatttttgattgtgtgatagatctaggtcatgctcttctacttcctgccttccctttctctaaaccatacaactgatattattagacattttctcatgaagcccctcctatctccatgatctttctgctgctctttgaaccttttccagctttgttaaagcccatgtctaggacagcctcaagtatccagtgtagctagtgcactgtggtaaagagaggaagaaaatgcagtgtcagcgctggatggagactctactgaacaagagatgtgttatcctagacagaaagggtttgttatttttttttaattttgaaataaaattctgtctgatcggagaattctccaaattgatatgtaaagttactacatcctaattcaaggggattacatagtgctgacttcagtaccagaatgtatttcttttttgcacaattatcatttgtctttggaattaattccagtaggcaggagccagttttaactccatggcctacaaccctggcattgttatgcacactaatgttcacaatagaacaaaacagcaaccttttttcccgttgagaatttaaaagaccttttttccccttgacgattttcccatgaggaaggcagataggatgttggtaagcttgggcttggggccagttagatcttctgggttcaaatctcagtcccacccccactagctctgtgcccagggaaacttgcctaacctttctgggtcctattttcttcacggtaccttccttgtcaagtataccttccttgtcaagacttagaaacaacgtgtgtaaagcacctagcagagtgcctaggatacaggaggtgctctggagtggttagtggagacccagattattcagaatgtaagcagagggctaactggtggtcagcctgccttgccctggttttaggagagtttctgttccaattccagacctgtggcatatcggtggtcaagtaagtcttgtaccataatctactccagctgccctgcttcctccttaaattagacaggaaccccagcactttgggaggccgaggtgggtggatcacgaggtcaggagatcgagaccatcctggctaacaccgtgaaaccccatctctactaaaaatacaaaaaattagccaggcatgatggcaggcgcctgtagtcccagctactcgggaggctgaggcaggagaatggcgtgaacccggaaggaggagcttgcagtgagccgagattgtgccatgcactccagcctgagcaacagagcaagattccgtctcaaaaaaaaaaaaaaaaaaaaaaaaaaagaaattaggaacaactgtatcaactgtaaagaactggggagactagcagtatctctgcttggcccatgcttcacaccccattaaaaccccagtttcttcttacaacctttgccttttctctagctctctgtggtcataacgttctctgaattcctaaagcaataatgctttttatcatgatttactacttgttcatatactctgaggttgtttcacatgtgtaagtctgtctcctcaagcaattggaagcacctctggcaaaaactctggctgttgtattccccaaggagctggcccctgtgcgaaactggggacaggtgcagtttgacctactctccctgtgttcccagtcccttttgctactcatggatgtctagaagctctttctggagcctgccatcaggcattgcccaaggccatgtcccatgatccatccatacagtgttgtcatcattctagctgtgatgttctgggagctgtccagacaagtagtgattataagaccaagagattcttgcagtgtcctgaatataacaccaatccaacatgcattgatctaatgcctacatagtggcatgattgtgccatgattgtgcagaacatacgtagctgagcaagataatggggagtcagagaaattataaaaccacctaattagtcccagtaaatacaaagagctatgggaaggtcgatgagggtgcagttaattcagtcagggttcagggtctaaacaggaagtaaaatctgacctgagccttgaggagtgactgaggatttcagctgggtatagataagggcattcctgagtatgggtgaccactgtgttaagcaagtggagtataagagtatatacataaggaggcctggacgcagtggctcacacatgtaatcccagcactttgggaggccgaggcagtcagatcacttgaagtcaggagtttgagaccagccttgccaacatggcgaaaccccgtctctactaaaaatacaaaaattagctgggtgtggtggcatacccctgtaatcccagctactcaggaggctgaggcatgggaatctcttgaacctgggaggcggaggttgcagtgagccgagatagcaccactacactccagcctgggcaacagagtgagactctgtcttaaaaaaaaaaaaaaaaaaaaagagagagagtatatataagcagaatgatggtatagagagtacgtgtttaggatgaggctcagagaggaggcttggatgggatttggaagggcatgtcaaaaaatggctgtgtaaaatgaatatttatatatcaaattttgttttttctatgcttcctttctaatttggggaaatgttttcatagaagggattttagggccaatgaatattaaaattcatagttaaaacacaaggttgtcaagggaaattccatattttaaaatgtgcatttacttctctaataccgattcagttcacacagtctatcacatacacaggtgttaaaatgctgtatctagttaacttcacatttttcccacaggtattgaatgtgtaagcagacacaggggtaactctcaaggaacaaaattgcctgaaggcttttccacaggtacaggtaaaaattgccttggaaatgattacatgacttagcaatgaggggttagtatttctttaggctgtcagctgtgatgtagccagtagcatctgagcttgaattatctccatcactgagcctcagacatgtttgggcatgtctgctgaatgtctgccctgtatctgtgatgagttggtggtctgtcccatcagtgtattgatactagagtcaaaagcggttcctagagagaaagtatcctaagaaaggtggagtcagccacagtaagctctgatcaccagagggtggagtgattctgatgtcagtttctatgtgggtcatgaggaagtgtcctgtctcagccattccctggactctggcctgagtcctagaaaagctggggaggggtgagtgggctgaatgtaagagctcttccactaaagaatctgtatgtcatttgagcacaagaccactgctgcaatagccctcaggagagtatattgtataagagggagaaaggcatatttccctctatccacagatgcttgaagccagaggtttccaaactgttttgattgacatatttatctgttaaaaaatgtctgagctctctcatgtattaatgtcttacatattttacaaaacatatagaagtaaaaatctgaaaggttaaaataaaaattaaacagaagttctaatattttcatcacaccccaaaggtttgccttgcatccccctttatgatgagtcccccatcatgaagaccactactctagagcattagtgggaggggcctggcagtgcccagaaataacagctcttcctggtaaaggtgcccatgatgcagtgagtgtgcatacatgtgaaattcatgctggagcttcatgagattctacttagggccctgttttcagggagctaagactctgataaggaggttaaaataaagatggagagaaatgtagcacattaccaaaaatgttactccatttgaacttccaggctggtgagccatggaggaacttgagttgtacaaattaaacatctttctgagacagtatgtttgtattgcattttagaatttaccaagcactttcacttgtaacttcccaaaaactctgtgggatatgaaggatggaaattgagaatgtcttgttttattttatttattttttttgagacgaagtctcgctctttcacccaggccgaactgcggtggtgctatcttggctcactgaaagctccgcctcccgggttcacgccattctcctgcctcagcctcccgagtagctgggactacaggggcccgccaccgcgcctggctaattttttgtatttttagtagagacggggtttcaccatgttagccaggatggtctcgatctcctgaccttgtgatccacccacctcggcctcccaaagtgctgggattacaggcgtgagccaccgcacccagccagaaattgagaatttctttaagccaatttggttacactcagatttcagcttcattttggaaatcacagtaaccacccaaaaagtttggggtggtgatagttacttcttctataggcttgataccaagctgtaatgaattcaagccttagaccaaaatatcatatagagatatttattagactagcattaatttgcaaagcaggcacaaaatatttcatacagtctgtttgatagattgatgaactctcagctctattttgttttaggtgctctaactatatattaagtaaaaaataaaaagtaaaagctttgctctatttaggattctgcatcctttgtatgtaaatcagaaatccttttaaatcaatggttggagacaaggacagattagggattaagtctcaggcaacatcactcaagggtacaaagttgaggcatcagagaagtcttgcccttttttcttacacatgtttctaaattattttagctaacccatatgtcttgaatacgtttaatttcaccaggtaaaacccatttctaaactttcagcttgctaaatggtaatggttattgactgaagtaggagtgagtccatcccctttctgatgtattgttgcctgacacacacacccactttcggactgtacatttcaggcattgctttagctgactttgcctagaaatgaaacttaaattaattgtcacatatatcaaaccaattagaatgaagtatttaaaaataaattacagagcttgtaacattggattatcattttacagacactgaagcttatgatctatgatttgcctaaagtttttcaatttgtgagtggggataagacactgaacccaaatgtaaatgactctcaattccatgctgtctttgtaataccaatgcccctgactatatggtcacttccaatgctgacctcttgggattgaggcactctggcccttggccactttttaaaaagcctaaagtttaattaatagtaatagtccaacgttaaaaagtaaggaatctgtgtcttctgttgacctggttcctcctgtaattcttcctgaggggaggaaagacagtatgtatcagatttatgaggctttgcttagattttccaaaggtaacttcagttgctttagttcttataactcttttcctcaaggaaatcgggatacattttctaggccctgagggacatttgtgtgtagccacatggaccctgaaggccatgacccaagggcaggggctgctgtggatagtaagatacagatgaagtgctgggcaggtcaagaacctggaagacacagctgggtgggaccatgccaggagcaaaagtgagaagttcaaggtgggccagaccagaaatatgctagacaggtaccatgggattttaaaggttccagcctatggcagggatcacctggccttgcccagaagaatgtaggttttaggatagagcaagaataaccagtgtaaaattagcacattttaagatactgggcgcaaaaagcaggaatcccaaactgagaatgtttagtaagaagaatgtggatactgaagaactcaaaagacttttgtctgaatggggttctttcttttcttttgtttctttttttttttttttttcagagttttgctcttgttgcccaggctaaagtgcaatgacacaatcccagcccactgcaacttctgcctcctgagttcaagtgattctcctgcctcagcctcctgagtagctgggattacaggcgtgctccaccacgcatgctaattttgtatttttagtagagacggagtttcaccatgttggtcaggctggtcttgaactcctgatctcaaatgatccacccgtgttggcctcccaaagtgctgggattatagacatgagccaccgtgcccagccccatcgtgtttcttttgcagtgcttttgccctggaccctctaggcttctgatacatgctaaaccagggtgctttttccacattgctccccacccaacactctgcagggcccagataactccctgagaggtgccaagtggccctaaattttttacttattcctattcttgtgtgctgaggccagcctgtgagtcccagggtccttttcacagatctctcagtactcccatctggttcctataccgtgggattcccggcagcccctctaaccagacagagtgcttgaggtagaggcaccatttaaatcaccctctaggacctttgttactggtttataattcataaaagagattctctagtacttattactcaataagaacaatgacattggtgtttgacgtacaggatttgtttaaaggggcattttatagatctgtagggcaatggccatttccaaagcaatgacattgtagtatttcaaaacaaaagctattttggacaggaattcaaaactgaactctgtagatccaaagagagtttgacttgtgtataggagttttttttcttttctttttagtgcctttcaaaacatttcatttaaacttaaaaactaaaagatcacaagagatgttttccacaaagctcttttgatttcattgttctgcatagatgcttggaaaggagggaaaatgttttatggtgaaagaatgcagacttccggtccagaggatggagagcgtctatttcttggccttctgtggtccttagcctcagaaatatagaaagaaatatagaaagatctgtggacatgtcagggcttgatgcagtgagtaatgggatacaattttggattagcagctggaaattccaaatttattacaaatgtgcataaaaataataacaatgatggattctttcatttattgagtgattactatgtgtcaggctctgtgttaggaagtgctcgatatacactaactcgaagcttcaacaaactttgagggtagttgaaggaacacattaatgcccagaccttggtgctatacaccattcatcaataaaaggaatcagggctccttcaagtaatggctaatactaggggcagggaaacattttagatgtgtgttagtgagtatcatgtagttcaagaatgtaaggaaatgttcaaaaaacaaaaggatggagctgttgaagagacataggagccaagctgaaagagcttctactggccacacctaataaataatgtagtattgagttaaaatataaaataaatatacatgagtgtatactaatataaatgaataattgaataaatagataaacaggagaagagatagatctttcttacagaaacttccaaataatatgtgtaaatactcccatttctaggaggaagagtttaagccactcctgagggtgggctagacttagtgacttgctctcagaaaacaggatatgaaagtgaacaatagtagctttacagtagtgaaacctggtaagtataaccctaaccaagtgatgaaggttgatgtcaccattgatgttgtgtggatattgtatacccctaatgtgatgtggtgagaagagtactacttcacctccatggtattcttctcaaatatccataattcattttaattatcagaaaattatcagataaaccgagactggggacattctagggatacttggcctgtatttctgcagactatcaaggtcatgagaaacaaggaaagcctaaaaggctattatagaccagaggagactaaggacatatgacaactaaatgtgatgtggtactcaagattaggtcctgggactgcaagaggacattaatgaaaaaactggtgaaatacaaataaagtctggagtttaattaatagttctgtactaagatcagttttatactttttacatatgtaccttgataacatgagatgttaacaatggaggaaacagggtgagaggtatgggaactctctgtactatctttgcagcttttctctaaatataaaattataacaaaataaaaaatgtattaaatgaataagtaaataaatatatatatgtataaatagttgaagatttaacagggtaatacagatttattttttaaaaatcagaggatggtaggatgagaagtagaacttctctgagtaggaactccaagcctaccccattctaatagcacaggtaaatagcttaacaatttggcatatgttttcccagatattttctatgatgtgtaggtacatattttaaatctggaaccctgcttttcattctgtcctatggcttatttttttgtctactaaaccctgaatctcgaacttggttttcagacagaatatagtgattttccagatgatttttaaatgtttgagagagaatattgcttccacaaaggtatcaaactgtcgagtctacatcttactttatttttaagcattttagatatatatcttatagacattaaatagtttttcatttcttctaacctagaggtctaaaagaatcatttaggtgttcctaaatttttgttatattagtcaaaattattacctgggccaggcatggtggctcatgcctgtaatcccagcactttgggaggctgaggcaggtggatcacccgaggtcgggagttccaggccagcctggccaacatggcgaaagcccatctctatgacaaatacaaaattagccaggtgtggtggcacacacctgtagtcccagctatttgggagactgaggcaggagaatcgcttgaaccctggaggcagaggctgtagtgagtcgagattgcacaccactgcacagcctggatgagacagagcaagacttcatctcaaaaaaaaaaaaaacaaaaacattattacctgctgtgctctaaacatttggaatggtagatttttagtaaagactaagaaaagaaatgtattaatctttaaatacatagaattatgaaagatgttgctggttgatctttgttgatgaatgctagctagccgaagttgttagtgatagaaattgaatatatatgtgtgtgtatgtatatgtttatatatacatacacaattatatctataaaatttaaaagcattcctttgctctggctcagacaggataagaatggtaaccactgattatctgatctcagatccaaataaattactaatctaatttatttggattaacaggttttctttattttttcatttctccttgtaacaggcagagctgtgatttgaacttgggtttgtctccagtactcccatgcctgctggatagccctgatgtagaagctatagagagtttcacagctgtgggcactgcttttgtgtagtcttgggagaccctgtgtgtgtgtgtgtgtgtgtgtgtgtgtgtgtgtgtgtgtgtgtgtgtgtgtgtgtgtgaagggggtgggtgtctaggccctttctcctatcatagccagttctctctcattcctagcccagattgtaacagtctttcattggttagcttcactgtgcctttcccaacctcccatttctttttttttttggttttattttatttttaattgatacaataattatacatatttggggggtacagtgtgatgtttccgtacaagtatgtattttgtactgtttaaatcagggtatttaaggcatccatcatctcaaacatttatcatttccttgtggtgagtgcattcaaaatcctttcttctagttattatgagatatacaagattgttaactagtcactgtactgtgcaatagaataccagaacttattccttttatgtaactgtgattttataccccttgaccaatctccctccatctctccctccctctctctgtcctcagcctttggtaatcaccattctatgctgtacttctatgagaccagctttcttagattccacaaatgagtgcgatcatgttgtatttgtctttatgagtttggcttacttcacttaacaatgccctccaggtttatctatgttgctgcaaatgacaagatttcattttttagtggctgaataatattccattgcgtatgtgtaccacattcattattcatccattgatggacacttaggttgattccgtatcttggctattgtgaatagtgacacaataaacgtgggagtgcagatgtctctttgacatagtgatttcatttcctttggatgaatacccagtagtggaattgctggaatggtagttctatttttaagtttttgaggaacttccatactgttttccataacagctgtactaatttacttttctaccaagagtgtatcagggtttcctttctccacattcataccagcattttttttttgtctttttgataatagccattctagttggggtgccaacctcccatttctccaccagtggctggcacttacctatagagaacagtgaagctaagtgataggaatcccttccatgtcctacctccttggtacaaacctacaaattggtacacccttctttacctcctttctctgggttttatagaaagaggaaaaatattgttaaaagtatggctttttggccaggcgcagtggctcacgcctgtaatcccagcactttgggaagccgaggtgggcagacatgaggtcaggagatcgaaaccatccggctaacacggtgaaaccctgtctctactaaaaatacaaaaaattagctgggcgtggtggcgggcgcctgtagtcccagctactcgggaggctgaggcaggagaatggcgtcaacccgggcggtagaggttgcagtgagccgagatcgtgccactgcactctagcctggtggacagagcaagacacagagatgccctctcaccactcctattcaacatagtgttggaagttctggccagggcagtcaggcaggagaaagaaataaaggagattcaattaggaaaagaggaagtcaaattgtccctgtttgcagatgacatgattgtatatctagaaaaccccatcatctcagcccaaaatctccttaagctgataagcaacttcagcaaagtcttaggatacaaaatcaatgtgcaaaaatcacaagcattcttatacgccaataacagacaaacagagagccaaatcatgagtgaattcccattcacaattgcttcaaagagaataaaatacctaggaatccaacttacaagggatgtgaaggacctcttcaaggagaactacaaaccactgctcaccgaaataaaaaaggatacaaacaaatggaagaacattccatgctcatggataggaagaatcaatatcgtgaaaatggccatactgcccaaggtaatttatagattcaatgccatccccatcaagctaccaatgactttgttcacagaattggaaaaaactactttaaagttcatatggaaccaaaaaagagcccacattgccaagtcaatcctaagccaaaagaacaaagctggaggcatcatgctacctgacttcaaactatactacaaggctacagtaaccaaaacagcatggtactggtaccaaaacagagatatagatcaatggaacagaacagagccctgtctcaaaaaaaaaaaaaagtaacaatttttgcagggaaagctacctgttccctgctctgccactatagctgtgtgaccttggacaatttacttaaatcttgctaccccattctgtgaaatggggataattatactacctaaactggcagtactaaaagataatgctgatgaattctgtttagcgtggtgtctggcacaataagtgcctggcatggtaagcgacaatggtaatttctttctatgcaaattcaacccatcttccagggcttatccagatcttaaacttatcctattgctctggctctttcctctatctgtaagtatgctcaaatctttctttcaaccctcccttgatcttgcattcctttcttattgttattctatttttctttctcataatcaagctttttgacagagtgggattctctgccttactttaagtcagctcgtaaactaaagcaatccagatttcatgcccccttacactgaaactgctgtcataaggttgccagtaggacctcctgaagtggacatgtgcttctgtttgcctagtgtccttttgccttctggcagcatgccatcccggggagttgccctcctctgtggatcctggtgtaactaactgtcagttcagttcaggtgccctgctttctcccagcccaggggtggacatatgaccctgagtcaggccaagctgacaagtcaggggaacgacagatggtgacatttcctgcttgctaccctagttctcctggacatcctcatttcctgtcctttctatggactaattctttgatttttccttggagtctgtgatctacctcatattccttcaatacatttctttttacgtaccttagatggctgtgttgcttacagaagaaggattctaactgatacaaactataattggtaaattaaagggaaacatttcaatacttacataatttattttcttatagtatagaccatgtcatccttgaaattttctgttgttgtatgtaaatcctgcaatgttgcagtgttttggttcttctcttacctctctacctcattattcttagtcccctcaccggctccaagccctactacataaatgtttgttccctaagttttctctcttggtcttgttctcatcccagatgttcttgaattgtgccacagaccgtctggcaggacggggaggcctctaaatccctccagtgtttctaaatgttttgaatgaaatgcatagaattacaaaaaaatcaaaatatgctgaaatgtaattagaaaaatatttctaaaaattgtgatatagtaatatttgtgcttttttattaacacaatagacaagatctagtggtgggcctaacaactaccataattttgaaccaataatgagtataaatgctatttcaagatagctttaataactttaatgtgatatgaaaatatctgagatttctgttggtgatcacaggtattgtgatttcttttcttttcttttctttttttttttgagacaagttcttgctctgtcacctaggctgaagtccagtgatgtgatcacagctcactgcagcctcgaactcctggactcaagtgatcctcccacctcaacctcccaagtagctgggattacaggcgcctgccaccacacccggctaatttttatatatttttttcgtaaagacggggtttcaccatgttgcccaggctgatctcaaactctgggctcaagtgatcctcttgcctcagcctccaaagtgctgggattacaggtgggagccaccatacctggcaggtattgtgatttaatcacaagtactgctaatacttctttgaattgtttcctatattaataattgagagaaattttagttcatgaaaacaagaacatatttttttccccttcacattctcagacttcctgaattctatccatagaatcctcagcagtcctaggactctaggtgaagaatctttgcctaagtcctctccttagggtttctcatccataccagggcttgctcctactatccatgtcttgcggactcacaggtttatatcctcagcctggacatctatatacagagaccttcctctgtttgtctcacaggcatctccccctctacacgtctacacctgcgtttgcttcttatacctcttcttcctgggggtttctcatctctcatctgctctgtggttaacttccagtattgttcccttcagtactcccttaatactgctgccagaataattctaaaaagctggtaggttctaaaatctgagtgtatcatttccttacatgggaatcttcaatgactctcctttgcctacaggttgcaattcatagttcattgtatgtcataaaaagccctccacaggcaatgtgatgggttccatctcttgcctctttgttctgtccatattccctttactctatgccttctgcttgcactacttgctttaaccatttaaacatatttggactttctgcatgtcgcttgatttttcatgccctaaacctttgcacaggctattatatcccctagccttgctcacttgctaatttgtactcatctatcaagatgggcccaagtgctgtctcctggggaaacttctttgatgcctcacatgtagttgacactccttcttcattcccatgcttgcaccggacatatgcctctagtaaaattcatattacagtgaattataatcatgtcttcatatatttctctttgccactaaagtataaaattcttgaggaaaaggaccatattctatttatttatgtgtttctagtttttagcataataggaactcttaccatgtgtagtcatttttgccaacaaatattttttgacatatttagtgttacaaaaaaatcactgtcatatagttcacacagagagtgtatttgttttaaggataagagcaaattaatgagtctcttccattctaaatttaggacaaaattttagtcttaccatgtaacgtaattggacctctttagtggagaaactaggtcgaggaactgttgctgtgcagggaaaatgaaaatgtagacatcttaaaagctggtatgagttctatatataaaagctcagccaaccatgtctgttttaaggttattgtttagttagatacattattattttgtatgatgttcttttctcccatatcacatctataaatgtttatcgagttgaggttagatttactgcaagtggaaactcttagagaaataaccaaaaaagtcaggaatatgtgcaagtctttactgtggactgatgtttaaaaatttagagacagaattactgaacagaagacaatcttacagcatacaatcaaatcttggctgctactaacacatgtggcacctttatgaaaattagaaaaagacgttcctttctcgaaacaccttacatccacctttaggaaattgtcataatagattgacttaattggaatagggtactttcaactgccatcttctggaaagtcacactaatttgcaaatctgtggtatctgtgatgtgaaggacatctgttagtagtggcgcccgtgtgtaatgcacaatctgcattgtagcatatatggctgccttagccaggggatgagcattctctccttgtatgtggttttgctaccagttatttattgttcaaatgatagtgaaggttttcagatgaaaaaggaaaaataccagctgcactttactgagaggaagaagaagctaactttcagcacatccaagtgactctgaaaccacactagaccattgtgtcctacagaattgaaagagggcatcaaagagcaccatctttaggttgttgcttacctggcttgaaaagtattaaagcctcaagggttctgaaacatcatgtgcattaactatggctccacagagggtataccttcccctctcaacttcctattctggaactctatgatatatttccaattacaaatgttaggactgtggtaaagcaccaaaagttgtggctagaatttggtctttgccacttcttacacttgcttagttcagaacttggaatcctgttcttgtgcaaatcctgtggttgatgctcaacacacaaaaccaaaaaactgtttgttcttggcataaaaatgaaatgaactcttgcttattttcttataaagaatgaagttttagatctaaaggaatttggatacactttatttcccttgtttttttcccagtttggtttctgacctgtgttgggtgggggggttaggtatgcagtgagccagagcagttgactgtaggtgtattctgatttttagcctctcaagaggactgtcataacaggatagccatgattccaataacactgggaggtggatgaaacattctgaggatacgtgcaggttgtagatgggcttgcttactttggagctcgggtggtgggtgggtttcctcaggggatagtgagaagggaggaaaaacgatgagatgtaagtcagattaaaagatgcctgcatcagcatgagaagcctactgctaagggtcaatcatcatacaggatgtattttcaatattaagcagatatggtagagatttcaatcattgttggactgattggccttagagctctggtaaaacgctgcatcagagcagagcagacacctgctgaggtcccaggtgcagaggaggtctggagaaatgagcatctggcaggctggtcccaaagccagggctggctcagggactggcctttattaggtttccttccatgacaaaaactcagctaacacttattggattctaagtgctgcgtgggattaaaagggcccttgcctctgtagagttgccaaaaagagagacgcataacaactctaaaataaagtaggataaactgagtgttacagtagagttttagtacaaaaaaaattttggggaagtacaggatgaagagcaatttatccttctgagaggagccttttccaaaaagttggtctttaaaaatgaacattttcctgtttatttctgatttttgaagaaaaacatgctcaatttaaaaacaatttttaaatagaagtgtaaaatacatacaaaaagcagaaaaaaggaaagtcatactttaaaaaatgttttattttaaaataattttatttatgaaagaattataaaactaataaagaatgctctcatatgtacccttcactcatcttcctttaatattgacatcagacataattatggtatatttatcaaatctaagaaattaatacattactattaactaaactactgcatagacttttttttttttttcattaataccctcttttctgttccagtatccaatccagggtcctacattgcatttagttaccctatgtccttagtttcttcaagtttatggtaatttgtctgtctttccttgtcttttatgaccttcacacttttgaagactaatggtcaggtattttgtaaaatgtccttcaatttgagtctgtcttgtgtttcctcctgaataggctgaggttatcagtttttgggagggtaacacaaaagtgatgtacctttctcatcacatcagattagagggcttgtaatagccatacaacatattactggtgattttaaccttgatcacacagttaatatggtatttgtcattaaaattcatatttttccctttctatgatctgtcccttagaagcaagtcactgagttcagtcacactcaagggaagagaaattgagttctacctcttggagggaggtctatcaaagaatctgtggattcctgttaaaagcaccatagtcattagtaaatctggcgggagatattttgaggatatgcagttatcctctttttcttttttctttttttttttcgagacaggggcttgctctgtcacccaggctggagtgcagtggtgcaatcttggctcattgcaacctccgcctcgtgggttcaagcaattctcctgcctcagcctcctgagtagctgggattgcaggtgcctgcaaccacatccagctaatttttgtatttttagtagagatggggtttcactatgctggccaggctggtcttaaacttcttacctcagggatccgtccgccttggcctctcaaagtgctgggattacaggcgtgagccaccgcgcctggcctatcctctttttcctaaaaattttacccattgattgtagcattcatcaatagatcttgcctgtagcaatcacctgttatattggtgattttctatttccctcattcccttacatttattatttgaaatttttctgtaaggaattttttcactcctgcatttatttattcaatcgtttatatcagtataggctcacggatatttattttattcttgaattataatccaatactatggttatttattatttaatacattgcccagattgttccagttttggccattgagtgtgtgtgtgtgtgtgtgtgtgtgtgtgtgtgtgtgtgcatgcattttttgagacatggttttgccctcttacccaggctggagtgcagtggcatgatcacaactctgtagcctcaagctcctgggctcaagtgttcctcccacctcagcctcctgagtagctgggaccataagcacgtgccaccatgcccagctaattaaaaaaaattttttttgtagagatgggggtctcactatattgccctggctactcttgaactcctgggctcaagtgatccttctgcttcaacctcccaaagtgctgggattataggtgtgagccactgcacaaggcctgaacatacatatatatatatatttgagaagctttggagggtcatcttagattggacaggtggaacctagtgagatcaaggaatcaatgtcaggctctgctataaatggcataggatgaggggaatgcggaggatgaggggaatgtggcaaatgaactctgtcagactcaggaaaagcttcagagagaaggcaacatttgagctggactcttatcccaaatagtagttttccaggaaaaggtgtgtgtgtgtgcatgcatgtgcttatgcttgtatgtatgtttgaggaggagagggaatagactattggtagtggggttccaggtaggatgaagagcacatgcaaaggcatggaagcatggaagcatcagtcagtgaaaaacaagttcaggaggccagtgctggaaaggaggtggcaaacagggaagttggtagctgttacaaagcacagtaagtagtgaatcaggggaacattaaagggaggccatctagttttttgttttggattttgctaagtatgatatgagggagtaattagctttattcattgcctctgaaatctttctccttcctgtaggggatatttctacctgcagttatgattaggattgaatttgtattggtttttattaaagttgctttgcactttataaggctcaatcccaacagagaccagagctcacttgggctacaggaaaaataatttgatttctgtttgttcatttattatcagttgattgctctttcccattcattgagaatcagtggggtgttgctatccttcactgcttaaaaagggctcccctcctgttgtgcaggcttattgttgaattgtatgccggttgcgggggctcttctgctgagtgagtgcaggaacttgggcaagtcttttctgagtttttttttttcagcattgaaatggaaataatttgcctacctctcaggtttgttgtaagaaatgaataaaatgattgattttaaacaattagctagcacagtgcttggcctattgtaggtattcagtaaatgctgtgagaatcagactagaactgagagggtccttgaaggattgtctagtctttccctctacctgtagaccagtgagtggccccagccttcaggttaaatgttttatatttaatttttgcatagttccaggcatgaagaccccacaacaatcttcagcagtggtaaaaacatttattaagaacctcctatatgtcagtactacatgacttgtgtgcgttacaaagataaacaaagtatatcatgggtaccagtaagtttacagtactgttaagggacacaggtgcatagacagaattaaaatgcagcacattaatacaaagtaatgtgggtaaaatgtggcaaatgaactctgtcagactcgggaaaagcttcagagagaaggcaacatttgagctggactcttatcccaaatagtagttttccaggaaaaggtgtgtgtgtgcatgcttgtatgtatgtttgaggaggagagggaatagactagtggtagtggggtttcaggtaggatgaagagcacatgcaaaggtgtggaagcatgagcaaacgtggcctgtaccaggtgatgtaactgaggtattaagtaaataaatagctggtagggacaggcaagttacagaggggaggtaggacatgggactggagaggtgagttggagccatcctaaggagttaagactttatcctactgaatagggaagttgcacaatcagatctatttttagaaaatcacttttttgacaacttgaaagatcagtcagtgtggggagggctggaagtggggaatgttataggtcaggtgagacaagacaagggctggcatgaggttgtgactttggggctggagagcagtagagagagccagtacttctgaggtatatgtcaagactttgatcaaagtaggactttgatgaaagacagaaaagcataagccaaagatgactttggggtttgtagcttttgctcttctgggcactggagctacagagagaaaacacatgttcccctcacagaatttactgccctaatgattaaacagatgcacaaaaacaaactaacaaataaaacccctaccaataactgaccatataatgtgtgctttgggtggtcagttaaccctctagactactgatcccatgttgactatgtactaagtgctgtgggaacatgggaaaacaagcatttaagtctaccagagggagtagaggaaggtttcacagaggagatgtgtattagtcagggttctctagagggatagttcaaataggacagatgtatatatgaaagggagtttactaaggagtattgactcacatgatcacaaggtgaagtcccacaataggctgtctgcaagctgagagcaaggaagccagtctgagtcccaaaacctcaaaggttggaaagccaatagtgcagccttcagtctgtggctgaaggcccaagagccactggcaaatcactggtgtaagtccaagagtccaaaagctgaagaacttggagtcctatgttcaaggacaggaagcatccagcatgggagaaagatgaaggccagaagactcagcaagtctgctctttccactttttttctgcctgctttattctagccatgctggcagctgattagatggtgcccacccaaactgagggtgggtctgcctctcctagtccactgactcaaatgttaatctcctttggcagcaccctcacagacacaccaaggaaaatactttgcatccttccatctaatcaagttgacaatattaaccatcacaaggtgccatctgagcttcaactaaaaaggcgaataggtggttgctagggaaagaagagagcagtgggcgttcattccatggtgagggagtaacatttgcctaggcaagaaagtaatggaaggagatgcattgtaaaggaattagctggtttcccccagtagactgtaagaaggatgaagtcagggggctgtgtgtctcactcagtatcatatctcatctgagtggtaggagagagaacaggagaagcaagcgtggcgtggtaagctgctttacactggggagaggatgtagagacaatgaatctggattgctttttgtaaaagctgagcaggaaaacgaaggaagaaaggagaaagaaggcaggttttgggggaaaataaattgatgtcaaaaatgaaatggatttggaacagttcattatagtactttctgggatttttctagctattgatacagagaagtttccattgtaacctcatattacattttaccacaaccaggacccttggaaaatttgactggcttgtagagtgtggttgctgctgatgggcaggggcagagtagtctatctgactgtagactggcagctgtaacctcagtgctccccctcagttccctacccaatttgttgaaaggggggtagtgggattattttggtgaatatctaagtaatttatccctttgtctaaggtaaattataatttttttgatctttcacactggaggtatttttcaaccttttatttatttagaccatatcctccctctccactccaatactacccatttcctatctcggcgctgtcccctgccccgactgaagtgtagatatttcaaggaaaggagatatgatttttactccaaagaaaaatcttgagaaggattttttaatcatttcccacaatttatattccagaagtcccagttaggaagactacttttttagatgacaattgacaacatgaacagcaaatcgtgacagccacagtggggtcccttttctaaatggtagatttaggttgccagagatgctttgattctggaatcaggcatgtaatttataagaaaagagttaaggacgaaattatagttaataatagaatcagggaatggcttagaaattagctagaacctagaccaacccccttactttacataagaggaagctgacactcaaggagtctaagctgtgtgcccaagttagcatattgaaacaaggtaggcttgcactgagtccccacctggactccctcactgttcaacagatgctacagatgacaggacacagtgccatattctctaattgcttccagggttttctggaatctctctaatctctgcagtgattttctgagctacaggatggcagtaactgtgtcaagtgagtcatgtctggacaataaagttactttaatgattaagtcgcaggagaaaagggagagagattctccaattaggagtcttctgtagcctagaatgcatttccacactgtgtctttatgctgggtctctcccttttgtacagcattggcaggaacttgccatccaaggtgtctgatgtctcaccaggacttattgacacccccaggacctgtcaagctttcctttggaaccgaccatataatgtgtgctttgggtggtcatttaatcctcttgattactgatcccaattctttcctatctgtataacctcctctgaacagcttctccctgcagccctggccccccagggaccccattctctcctgtaccataatctcccatgggtgccactcctgggccacttgtaccgaagtcgactgtcagaagggcctctgggccaccaggccatcctcctggtcaatctttttcctgttctctcagcagccagtccaaactttgcctcaaacccctccccattatctcacctccccacttctcctggaggaagaccatgccccctacttcactgagcagcttttgatcatcgagtgagaacatctcagcttcctggctggcccagacttgctaaccaccatttttacctactatttccttctgccttaggggacaggtgtccctgtcctgtttgcagttagtccacctctctcccgcttcctgggttccttgcccactggtcaaacccttcttccctgtatcttcaaacctctctttctctttattagtcctgccccttaggaggtaaaccctctcatcgtctctcccactaaaagaaacaaacatataagcaaaaccacacacattaaacagcaatccattgtccctaccctccccccactaccatttcctctctttcctacccttccttgtttgcaccccctccatgaagagagccacctgtgctcaggcaccatgccataattcccctgttcatcctgtcgctgcccacttgcagtgacctgatgcctgatagccagactctattattttattagctaacaagtccttcttcacttagaacactacatttgaactgagcttcatgctgaggattcctgggagttaattctttgtggggcagtccctcatgggttaaaagtctcatccagatggattcccagagtgtgtgctgatagcctgtctcctacaccacccagtggctggtagtgactgtgggtgggatgagttgtgggggaagtctgtgatccttggcagatactctctgacttcagtccaaggtctttagaatactattgtgagagtaagacaatctgtcctgagaaccaagccctctaggttttagaatgttgactttaactggcattgcatattttatctcttgctgtgcttcttttctaactagagagtgaaatctttctctctttatatttggatttgaaaatgctctgtgtgtgtgtgtctgtgtgtgtgtgtgtattggggagtagtggtggaaagtggtatggtcatcaaagctgtaaaaagcattttcatttatttttagtatgtttagcccaaactattaattgtgaaaattgaggtgttcaaatctcagacttgtccccctcagagaaagacagacttatgcaaggttatagcacagctcagaggaggctggggggaaataagttccaggtcatactccagcatgttttataaatcagccgatatccctcttcatgaagctctggaataggttcttgaaaagggcctgcatggtagtcaaacatgagggcattataaaactccttgctgcgggctgctccaattcagagcatgaattattcagaagttgttttggaagccctcctgggaacagtggtctactcccctggactggctcccatgaatgaaagagtcccacccacttcttcagacttggcagctgggaatttctttcttgctccactaagtcaacaaaacaacaaaaagcctccaaaacatagatcagtgtcgtcagtttgcctcctggagtcttaacgcagggctcaataattcacgcacttctacatcagtgactgaaagcatgagttaagaatatgaagtggttagaagtgtgtgtgctcatagaattaagtggatgtcaactccatctccttgctttttaaaaattattaattgttcaggagctaagtttgtgaacataagcattatcaaatattatttattttgtaaaagatcagatctttcttttcacctagaattaaagtgaatagatttttctttttctttgttattatcaaaagttgactactgatttcaatatctatttgtacatttttattatattttaaacaggaatggatggccatcaactgcatttttatgattcatattttctcttcagtgactacatcaccattagtatcctgcttactaagtcttcccttttgttctacttaatccagcctattttccttcatagacatgtggaatggggacagggatgaattcccagccagctcagtgaggtatgcactggggccttttttggattttctttccaatctgactttccaagctgcttagctacttcaatcattactacttttcttctctgctatttactactaaaaatagtccagctttacatctccaccaactcacagtttggcctattatgaatgcttctggagacaggaaactcagtgcctcacagacaacacatttatcttcaggtagttttgactgctaaaaagcccaaacttcttgttttctaattttcttctattggtcctgccagggtcatacaaaacatgtttaatcttttttctagaaatttgaaggcccttcatccttcatttcttccctccctctgtctctctctctctctctcatctcaatttctggttagcactctattaatcctcctgattgcttttctctgaggaggcaggagcttaacacatggtacctagaactgaacataatccattgcagataagggaggaatatcatcccatttcatctttatatggcacctttaagatcgtatcagcctatttcgttaattcagcagttatttattaattgcatctcaggtggtagacattgtactgggtgctggaagtatgtataagtgtgatcacagaacaaacagactaccagagtgagagaccaataattgttagctgtaaagtatgatgagtattagtctaggagaagtgcagagtgatgtgggcatacacagtgcgaggacatttcctaactagagggttggggaaggcctccaaaaggaagtgactttaaaggaattaggcaggagattagggggatactagaggtagaggtgggggaaggaggaacaggtaccaacatacgcaaaggtctagaggtgagaaaggaactgaatacagtacaatctgactgaagattagactgtgaatagagggcagagatgaagttggataggtaggcagtgcccaaaccgtggaccccttacaagctaataattaaacatgtgtttgagcacctactatgtactaggtgctgttatgggccctggggttttgctagttatcaaataagaccaaaataagactaaataatccctgccctcttgaaacttatagtttagtggatattaagaagaaaaaaaaaaaaacaaaaacatgctgaataaatgtggactttaaggacagggataagccactgaaagtgttaagtgggggagtgatgtggttagaatcatactctttaaagttaggcatataatttcacccaatggaggcacttttgagaatgaacgggctttattaataattattctgggacaacaggcataaactgggcaaatcaggaaagatgggcactcttcaaatgtggttaaaaaccagagggaagcaagactggaggcagagattggtcattgcagggacccagatgaaagatagccaggactgctaccaagatatgcagtgaggtggaaggaagtgaatggatctgagaagctcttaaaggaaagatctgttcacaataggcaagggacaattaatacagtgtggcaccaaaaaaacctccttccagactgataaagacccagaaaccggtaactgttagacaaagtcattagatctgttacagatttcctgttgtccattatcttgtccacatctcaatcaacatagttaaaatatttgatgaaatttagataggtatacatatggattacattttctaaactgttaatttggcaaacttgttaaaaacaaagaagtaggaggaagttagcctgacacaacttattcacagtgatcatccttttgatcctgggtcactgttttcttccaagtgctggcttgtggttagtgcacagtacatttattaaattcatttaaagaatcttttcctcaacaggtgagggagaaaacaatccattttaagcactgagtttattcctttagtggttggcttgctccaaatataaataatagttcttttcattgttctccatgatttaaacaaaacaaaatgtgtaagttccctttaaatcataacctccttgggaggccgaggtgggtggatcacctgaggtcaggagtttgagaccagcctggccagcatggtgaaaccacatctctactaaaaatacaaaaattagccgggcatgttggtggaagcctgtaatcccagctactcaggaggttgaggcaggaaaattgcttgaccccaggaggtggaggttgcagtgagctgagaccgcgccattgcactccagcctgggcgaaaagagcgaaactccatctcaaaaacaaacaaacaaaaaattataacctcctagagcagcttaacatggggtcattacatgaccattatttctaagtcagtatgttgtgttccactttggccatatgatgcttggcattttcaggacagggtcaaagttctgaaacacctgccatctgtcaagaggagaccagaaagactgtccacaaattagcacaaaccagaaactgctgttggaaaagaagcttagtggtttccctaaggggagtagcatcaccttcacacagaagggagaagctttcttggtccttagccaccatcagtttgtgccttacaaagacagtgctatcgaactgatggtgttctaggttcttaagaggaatgcttataaaaatggttgctgaatgtcaagtgctgtttaaatgcttaattaccagaagtgaacacaaataatgagggagtttgattccctacaaaccagaactgttgttcctgatatgtgaccattagcagagctctgcagtgtcttttattgcacggttctgaggctttgccgttaacaacttattaattgatcagggaagaaaccagtggctgtattagtgctggtgaaatggaagaaagactgagcaacttgcataagataaatcttttactacactgtaaacaatggagtggtggtaagttctcttaaagctgaaaacattactgttatgaaggctctgaaaatggaaaaaaatgagaaaatgattaaagatctttttggggttagaattttttagttttgctggcatgaaaagacttgggcagattttagtactggagggacctgccttattcgttgtgtattccattcatgattgctctttccttgtgtaagaggaagaggagtgactcattatgactcttggttttaatttcagtagattcctgaaggtgcagaactgagtgaacagatcatcctttttaaactcactcaggctgatttcttttgagggatgttatttgttagtttaaatagtagtactgagaagtagaggagtgtatattaaactgtggcaagagaacttcagaaacaggaaaagtaactaagtcctaaaaataaattcttgtcttgttttctgtgactgataaaacatcataagtaagacatatgcaccataaccccaacccctagtgaatatacatgcattttatagagctagaacacacatatgtaaaaagtcaccttaaaatctttctgagaaaaggataggtaaatacataaaatgtacacatgaagactactatttgtttttatttaagtgttaacatgtttgtatgtttgggaggccaaggtaggaggatcacttgaggccaagagttcaagactagcctgggcaacatagtgagacctccatctctacaaaacaaaaacaaaacaaaacaaaaccaaaaaccaaaagaattagctgggcgtgggggtgctcatccgtagtcctagctactcagcaggctgaagctgggggattgcttgagcccagaagtttgaggctgcagagttacgatcattgcactccagcctgggtgacagagcaagaccctgtttctaaataaaataaaatgattctataaaaattggtgacattggtctgcagtagagggaaaaatcatggggagttgaaataggtgagaaaagcttcatgaaaaggtgggattaactgttgttttttgaagaatgatctcataagaggaagttagaaagaggcagggtacctcaaatgtggagactagaaggaactaaggtgtagcttggagtcaaagattccaggtgtagtggggtggagtggaagctccttagggaagccacttacctgatttgaagggtggtttcctcatctgcaagatatgcagattagtactctttcactcctatttctctttctctctctacttctcttttctttcttctctccttctccctcttcctcccttctctccttccttctctttttttttccctacacatatttataagtacctactttattccttaattgtactgtgccctggggatatagaatgctcctacaagggtcagggcctcacagaggagatgaacaaataaactgctgtacagaaggatgcacatggtcctgaggaggctagcttgaggaaggagtggctaacaggttgggaactggggaagacttgttatgcaaatcaaaattgtaaccactttgtaaatactaagtatttattaatgtaatatttttttcttttacttgtgatgcattttttttttgtggcttctgtgactctttgtaaaggagttctgagtcactagttaagattttttataaagaaatacaccattagcaggccgaggaggggatgttttagtttagtgaaacttggaccagtgtcaatttaatgggtcagacgtagtgtttgtaatgggtaagaagtactagtcatccaaatcaaatggccataacaatgaactctgaaaatagttatatattttttaacagagtaaagcttctttatagcaatataattctttaagatcactttttttttttttaatttttggaagctagagacaaagtagaggaactggcaagattcagatttttggaatcaagcattaaattattaattggcaagaatttttctgaaaacactaggaggaggaattaggaaccccacaagcaaaataacattaccttggaagaatgaatggtatattcagttttacctctacatctttttgttgctctgtgtgtgtgtgtgtgtgtgtgtgtgtgtattcacatgtgcttgtgtgtctgagagagagaggagagagaaaaagaaagagagcgagcgagcattatgggatttgggtagttttggaaactttcttttgagaatactgagaatgattgggggaaattaagtgagtggttgaagtgctattgctaattgttgcttgttttaggaaaagatgatgtcagacacaatccttggtagaaattttgagagaatttttgatgtttcagagtctgacggttctagctctttataatataaatttcatttcaaaatttatggcttttttgggggggtggggtataagtgtaactgcctaagggattcaccttgcctgctgcctagacagagccgattcatcaggacaggggaactgtaatagaaaaagagtaattcacacagagccagctgtgcgggagaccagagttttattattactcaaatcagtctccctgagcatttggggagcagagtttttaaggataacttggtgggtgggggaagccagtgttccaggagagccgattggtcagagatgaaatcatagggagttagagctgtcttcttgtgctgaatcatttcctgggtgggggtccagaagatcagatgagccagtttattgatctgggtggtgccagctgatccatcaagtgcaggggctgcaaaatatctcaagcactgatcttaggtgcagtttagggagggtcggaatcttgtagcctccagctgcatgactcctaaaccataatttttaatcttctggctaatgtgagtcctacaaaggcaatctagtccccaggcaagaaggaggtctgctttgggaaagggctgttactgtctttgtttaaactgtaaactaagtttctcccgaagttagttcagcctatgcccaggaatcaacaaggacagcttggagattagaagcaagatgcagtcagttaagttagatctctttcactgtctgtcataattttgcaaaggcggttccataaggtcatttttagcacttctagaaatagaccaagcattagctaattgtcagtgaacttctcctcacacgtaaaagtctttataggaagaaaaacccttactccataattatagaagacagatttgaaatgtatgtaacccatttggattaaatacaacagctgatatacttatccctggttaaagatgagcgatagtaaaaacccctggcgtatggaacagaggacagacagattgccactgagcaaagtaaaaaggcccagagacagcaacttaaaactttgcgtaaggaatagcatacttcttagtctggtgttcagtttaattcagagacatattgaggacctagaatgtgttgggatatgctgggtattgtgtatacaaagactgggagatagtcatcaaggagcagctagtgcagttgggaaaaacacatacgtaagtattaatcacagctcaacacggtaagtgctacaatgcaattgagagagagagaggcagagagacaaagaatgaatatcaatcagttaactttgtccggggagtcatcccagaggagatgctgctgctgttaaaaatgattagacatttgccagacagaaaaataatgaaaggctcttccaggcaaagatagaaggatgacaaaggcttagccacaaaaaagtctataaggcattaaggggatgttgattcattccatttggttagaacatagggtcaaatcagtaggaggatggaaggctggagtggtagattggagccaagttgtgaagggcctacttaaggtatttggatgctaccctgtagacaacccggagccttcatagttttactcctccttccccaacattttattatgaacagttttaaagtatagattttatttttaaataaaatggaaagaattctacaatcagtactagtataactaccattagattgtactattaacattttgctaaacttgtttaatcacctatctatccctttataatccatcaattcattttattttttatacatttcaaaacagattgtacgtttcagttcattcctctctaaatacttcagcatgactatcattaactagtgttcattgtttgtttaaggtatttgatagaaaaattataatctttgtaggttttaagatatgaaaataagataatcaattttgtatttaagaaacatcatagtgtggaggatcaactggaagagtgaaacaaattagaaacctatttcataaatctaaatgagaggtgataagaatgtgatgaaagcctgtagtaggaatgaaacagtactaatcaattcaagaaataatctggaaatggaatcagtggatcagttgatcacccaaatgtggggagggaagtagtggaggcaaaggcagggttgagagaatagaaaaagtaaaaaatgaattcaaggttttctagctttgacgactgggtgtttgataatgggacacataatacagaagggaaaagaagtatggaagtacactacaacagaagatactatgtgcagttttgaacatgataagctcaaagtacctgtaggacatttcaggtacacatgttcaggtgttgtttggaagtactctctggaattttagagaaatatcagggctgggtttgtagatatggagtgtatcaggctagggaattgaagctatcactaaaggagaacatttagagtaagcaaaaaaaaaaaaagtggctaaaggaattctaaggaaagcctatatttaaggaacctgaagaaaatgctgtgtcaattaaggaagcagaggggattattcaaaaggcaggaaagggaatcaccccagatggaaagataaataacatttattatttgtcaggtatgataagtagtttatattcatgggctcatcgaatccttcctgttaacaaccctattttataggtatgcaaataaggaaaatcagggaaagaaaaataatttgctgaaggtcttaagattagtaagtgagtggcagagcagattttgagccaaagtcattcagacttgccttaacatagtggctaaggaaagggagtttccaggagagagtagtcagcaggtcacagtcatccgtgatatgactctaacttacctttccaactttgtcttcttcacttacttaagattggtcaatttaaaatgctccatattttctgcacaagctcaaactgtactaggacttccaaagtattttgtagatcactagttccatgagatgctctgaaaaaaagtgtactgtagtcaaatgaatttgagaaatgttgccaactctactatcctcttggaaatttgcgagttaaattagctcatcaaaggtattgggaagtcctacagtaaagaacctattctaacttgtctaccaagtgttttccaaagttatttgaacttatttgaccttggggcaccccccactcccttagaaaatctataaacttcccctcagaactagggttctgaaacacttcaacgaaaattagtttttacttttccttagttgcttttaagtgagatataataagctttatctgtgtcttattcgtggtggtcatagactacatcctcccctgcaatatcattatttgtgccctgtagtagccctcctgtggccccaggaaaatggagtctacgtctgtttcattttgggttcttacataggacctattgcagtgcctttcatataataaatgtttggtcagtgtctattgaataaataaacaaaatggataaaacacagagaaaattaatacttattcttttaaataaaactaagttctctattaaaaccagacaaaagaactatctgtttcaaaatgtggatgtaaagttatactcaaaccaggctttcatctgagaataagaagggtatatgtttgcagtttcttttttctttttttgacagagtatcactctgttgcccaggctggagtgcagtggcgccatctcggctcactacaacttccgcctcctggattcaagtgattctcctgcctcagcctcctgagtagctgggattacaggtgcccaccatcatgactggcaaatttttgtatttttagtagagatggggtttcgccatgttggccaggctggtcttactcctgaccgcatgtgatccgcccacctcagcctcccaaagtgctgggattacaggcatgagccaccgcgcccagcctgcaggttttgttttcatttgaactgtttgcttttgggtttaggtgaggagtaaattgaggaaggcaacattttggttatttctgtcatgactgcatatggaatataccagtaggtcctggaaacatcacttttcctaagtggttctggtcttgtcttataatttaaagtcggacttggatttcctaactaaatcagtgcctatctatgcgtaccctttgaacctttcttactggtttgatgcaattatttctctcgctcattctagcttactattggcagcagttccactagtttcattatttcaactgtgaggccttatatggaatttaatcaaatgtgatgttgtgtctgatctttgtctcctttgaactgtataacacattcagccatgtcctcttttgtttttcccatgagaatagaagagagccttctctgacaacctcccacatttttttttgtttgcatcatgtggctcgtcactcccatgtggaaatgtgcatatatgtacgtgcatgagagagagagagagagagaagccagggtgccatgctgagagaaaggccagctatgagtacagtcacaggagtgtggagattcctagaaaagggctgcccatttgggtaaaaatcactgctttcctcctacacagacatcagccacacctgtgttcaagtttcatttgactatttgttagctgggtgccctacttctggagaacaccagaatcttgtgagttcagagggctctgtaggagttttattaacttacaatacttgtttaagagcccctgagtaatcataattattattttagaatgagtctgagatttttttatggagaagataaactgtacttggagtatattttcttgttttcacagtctcttcaatgccatgaagagtaagttatttgaatttgcatatgttaaggtggtggtggtggtatattgaaaattatgcagagaggcagtagacatggtgaatacttatactgaaaattctaaacttattaaattatttgcatttggggagagaaagagagtcttgagaatcagatctggctgtgtatactaaaagaacattatgctctaaagagtaactctcaaaatttttcatagtgacattatggtatgtaattaaaatggcaatattttgcatggtatgacaaaacctaattgtcatggctgccatattatatagggaaaaaactaacatttagcatcactataataatactgaaatatttagagcaagtattagattttgttctaaaataaacaactattattatgtcattgaaatggaaagtgttgcaaagggaagaaatacactttggctgaatacatggaaaatgctggtggtattcattaagcatggaataataagaggaacaaaatttccatctccatcccttcccccatgaaatatcttatgtgtgttcagagctccctttgaagtccatatatgatctttgctttaatccatttttaaagcttcctttgaagtcagtgggagctcatttctggaagagaggaaagtggctgaggactgggtacctgctggggaagagggaccagcctaatcataacaggaaataatatttattgattgtcctcatgtgcatgatctattaggctgcacaccaaagtgactttcaaactggtttgatttattttctagtgttacaaagctattaagatgaccaaaactagtaactgctttttaggatagtattttttgtttcaaatagctggggaaaaataatacttataaatggaaatacttttattttgacactctcacagacatctcatctatgtgaattttccggataactgaaactaatacttatctaatagagcaatgagcaatttctttaaggacaattgaagagtgtaggattcttttctgtctttcttccttttttttttttttttgagaccgaatttcactcttgtcacccaggctagagtgcagtggtgcggtcttggttcactgcaacctccgcctcctgggttcaagcgattctcctgcctcagcctctggagttgctgggattacgggcatgcaccaccacgcctggctactttttttgtatttttagtagagacagggtttcaccatgttggccaggctggtctcaaactcctgacctcaggtgatccgcccccttggcctcccaaagtgctgagattacaggtgtgagccactgcgcccagccatgagtgtaagattattttcttcagtatgaaattacttcagactacttagttttttaaagaaaatctcattaaatactttggagcaaggtagaaagctattttcatttttcctgtgtcttctttgctgctgtcaaccgtcctctgtaatacaggttctctgtttctattctgctgtcttattttacacagagttgcctgaggaagagccaggaagcctgagatagatgtatacttttacatcagagtaaagtataaagactgtttcttctctcatttcctttttctctccccatatctcattctgctcctcacttcctgtccctcctctccttgggcttcctgcttcttttcctttcccctttgatcctctttaatgatgtcagcccctcctatgagagggtgtctccatcattgtttggtatgtagactttggtcataggcttgagctccgtatctctgactggatcttgacctggatgcctctcagaacctcaaactcaacactttagaactgagctcagcaactcctgccaagaacattatttttagtctctaggtatgatatcaccttccatctagcttccatctagcctgataatctgtgaattgccattgacaatgtctcctccctatcactccacctctaatcgtgtatcaaaccctgtcacatctgccttagaaattcacaatcagcccatcttttctactcctctctgtctctgtctcatctagtcacttatcacatcttggagatgaccacagctgccttctctctggctacttccttatataaatttgtctttacaatgttgcaaattttcttcttcacacttgaagctctccatgtcattctcagactgaagaaacccatttgtctctgctgagcatctaaagacttttactatctgatttgaatctctagctccttttctatcctgtgagcctattgctcctggcattgaaaatgcacttggcaaatgtctgtgtatccttcaagactagagggattatcctttctatgaaggcttccctagtgtcttcaggcagtaacttccccttttctgagttcccaccggccccccgttctttccttacttgtagtacatgatcgagcgacctgtggtaaattgtttttatgtgtctcttgcaccagaatgaaagctcctagagacaacattttatagtttatttatctctcactctccctgccagtgcctacctcagatcaggtacaaactagcaaatgtttggtgagtgactgaataaatgaatgaagattttgaaaggtcttttctacttacatttgggcttgaagttgtgttttatgttatcaaagtcggtggttcagacattagtaaaatattttaaaacagattcttccttcaagaggcatatagacagaaaagctataaaatttctgcctctcataagggaaagcaatcccaacacacagaaggatagaaagtgctggtccttattgatttccccaagcctctgtaccacctccagaattatttgctgctagagtcctgtcacgtgagaaaagcaacttgctaccattaaaaccacttgtagtcagttatagagagcaaccatctgctttagaacttcgacttctcaagatttctcagatttcagtgaatatttcacttaagaccctcttacaaaagagttttttttttccttagtgtttttagcaggccttatacataaaacaaatctccaaagtcctatttttaaaaatgacaattcagtggaagaaacatgccctcagagcacctagtctatggtaggaataagacaaatttaaagatacgtattaatagaaaatatcggctgggcatggtagctcatgcctgtaatcctagcactttgtgaggctgatgggggcagatcacttgaggccaagagttcgagaccagcctgggcaacatggtgaaaccctgtctctactaaaagtacaaaaaaatttagctgggcctggtggcacacgcgtgtaatcccagctactcgggaggctaaggcaggagaagtgcttgaacctgggaggcagaagttgcagtgagccaagattgcacctccacactccagcctgggtgacagagtgagaccccatctcaaataaaaaaaaaaatcagtaaggtcttcttatgatatttatggagatattcatatttacttatgaagagaaacttggttctagtttcagtgaagtttctgggtagtggtagagatagaaaactatcttttgagttaatttaaaaactaactgagagcatatgactttattcaatcaacatataaagtaaaagtatactttggttccactgtttgggccattaaaggaaaggaaaagaaaaataagactaagatctggaggtagagcagtgggggaactaggagacagtgaagtttacattagagagaaagaatgggaggaagagaagaggaggaagagatcaacatcttctgcttttttggccattcctttagttacccctattcctccataaaccttctattttagttctctgcttcattgtccctccttttcttctaacttacctcatctggccccaaaccctcctctaatgacttgtgtacccaaggctcctcacattcttcctttggtttttaaccagtgtctctcctcacctccatcctcaaaccctcacctgcctcaggtccaaagtactactcactgtatgatctcgtctcttccctctcttttcctagatgaatgaaaatttcggcctgttcatttccagtttggtggagtcctgacttatcttacctttggtgtgttacttaactttctgggcctcagtaatcttatctgtgaaaaggggattagtaataccttacaagattgtgagtcacctagcaggtccttagcaaacattggtttccctttctgtcttttctttttgctgctgtttccattccttcacttctctgctgatactagtgctttttggtcctctcatcagttaagccatctgctgggaatttgtctctggaattctgcttggagcctacccctctgtctgagagtaagatttcagagggagcctctgaattgaggacatttctgtaccagcatcagagtgggacatcataggttcaagtcctggtcccaccatgttctcactgtgtgagcgctgggcgggttgcacactgtctttgaggcttagtttccttgtctatcatttgaagataataatgatttctactgcatagggttataataaggattaagtgagctacttcatgaaaatgtttagtagaatgcccagcacattgtaagtgctcaataaatgttagctatcattggcagatacttcaatttagaaaatttgttgagtgctttgtgcccagtgacatgatgtccttatgcttttcatcttttcatctcagaatgaaaaattggcaggattcaagtgccagttacagtggcatgtccagagaaaattcttgagagatgcttgctgggttttactgcctgtggtagatggggagtgtggaagtgtataccagctttgtttttcatgggaaagaaactgtaccaataggagtaaactgtggtacaggggaaggatgcagtgatttggatgtggttgcctggaataggagagatgtggtagcagctgggctgaggagagtgggcccgcaaagagtgctgctgccaccacctgcacaccattggtatctccaccagccttaccctctggacactagcttcaaaattcctatatcaccagagccctacaacccctggtttaaaaaaattactgcttcagaaagattatgcttcattctagaattagagatagaattttgaggttctaatcaggagggcagattttatgtgtgtgtgtgtgtgtgtgtgtgtgtgtgtgtgtgtttctgtcccagtgaaaagtaatgagagaagctgaagatgaaactacttcaaaatataagcaaaatatttagttgtgtaaaagaagaattgtgttaaaataactttaaaagaatatcttttatttaactgtttgtcaaaaatagtatatcatatacttgccacagtaatagatcaaggctttttaatagaaaacaagacaggactgtacctgtcatgactgtaccatgtcatttcctaatctagtctgaaaaagtgggtgaattatctttcaaagaactgtattattttctagaatgactgcagtctctgaaacctgtaacgtgtcacatactctgaggctgagacaaaatatctgaatttggcccatcccagaaaattcagtatgcttgccttagtgacattacagtggagttacatcatgtgatgtaacatatataaattcaactgggagcatttggaaagaaatttaaatatcatgagtaattctgcatatcaatttactcaataagcccaggcctgctctgggagctccctggggatggggagcatacatttgcttttccttggttgatctcagttttcttgggcctctccttgtgggagcatctccctgaactcaaggtaattctggtgtttaaacatggctcctgagtgcaagccaacttttgcttaactcaagaaacggtcatcatctgttccaatcctagaggaaaacagcattactgagaggccaagtatcaatctctcatgcggcactttgctaatggatttcaaagtgagcatctttgaccatatctgctgccttgagaacttaaagttctgatgaacactccagtgttctctgcttttgccattgtgcatgtaagtgaccaagggtaggctgttaatggactggttcatgacgcacaaacagccaccagtaatgtgatgtacagtgctggaattaggagcacctgattaagagttagcactctgctaactaaaggcttacgtttggtaaatgctatgatggcgcaaaatcccttaactgttgaaatgaggctataggcccaagaggaatgaatctttggtcagtgtgttcccttcttgctagaataatgggaggagggctttctttctttactcggtaaattttcgtgataccggagcaataggtaaagtctctagggtaaagattctgtgtcttacattgccctaatctgcagagtattcaggatgatcttaagaccactagaaaaattctcatgagggagtgggggctaaaatgtgggaaattctaaagttgtcacatgttttgttgttgcttagtcatgtgaggaggagagaagcaaaggatagctgataatggctacctacaagaagtcatagaatcatagaattttggtaacagaggggacctcaatgccatttcttgagttttagaggagaaatgatttgtttaatacgtggcagagctaagaccagaacctcagtttcctagcctcaggctggtgtttacttgtgttatttcagtgtctctgatgcattggtttaataggaactggtttatcctgctttgtgggggttcagctccacccttcaatgagctccctgaaaagaacaaagtccacattattgttacttgttttggttttagggggcatgattgtcactggcaaggtgtgaagtgtacgtaaattctgaaaacattttgtgctcatatatgcaggggtggggagagattaaaatggggtctgttagggtgggtggagggatatggatgatgcctataatgaaagctccagttgcaaaaattgattcaacttatggtaatgggtgctgatggaattaatggggttttatgaatattccatgctttgatctgcttggcattagggagatctgcaaggagcaaatttgaaatgataaaaagctctagactacttttttggtgcttcacctgtcatgatgctgtcgctggtcttgcttggccttcaccttcaataagaaacgagatcttgcctcatgacactctgaaaaaaaaaaagggtagatgtaagagacattttttttagagagaaaagccgcatccattatgcagattggaagcatttacttaaatgtttactctgattcaagctttgaagccccagaattcaggtcccatagccataaaaggagaggaattcttcccctttatcttttgatggcattggtttgaacagaagttctgtttttactaaggttgttattttttatttgcaactaaatgtctctgttttttatttttatttctttttttttttttaatttccacaggttattggggaacaggtagtgtttggatacatgagtaagttctttagtggtaatttgtgagattttgttgcacccatcaccctagcagtatacactgcaccctatttgtagtcttttatccctcacccccttcccaccctttcccccgagtccccaaagtccattgtgtcattcttatgcctttgcatcgtcatagctttgcactcacttatgagtgagaacatacaatgttttgttttccattcctgagttacttcacttagaattatagcctccaatctcatccaggttgctacgaatgccattaattcattcctttttatggctgagtagtattcatcatatatatatgagatatatgtatatcatatatgatatatcgtattcctatatatggtgatatatatagtattcatcatatatatgatatatatcttacacatatatcatatatatcacagttcatatatattgtacatgtagtcatatattatagttcatatattatatattatacatatattcatatatacagttcatatattatatataatacatatattcatcatatgtatctatatctatatctatctatctatctacatctcacagtttctttatttgggttggtttcacgtttctgcaaagtatcattttcatataaagacttcttttcctctgggtagatacccagtagtgggattgctggatcaaatggtagttctacttttagttctttaaggagtctccacactgtttttcagagtggttgtgctagtttacattcccaccagcagtgtagaagtgttccctgttcaccacatccatgccaacatctattatttttttatttttaaattatggccattctagcaggagtaaagtggtaacgcattgtggttttgatttgcatttccctgatcattagtgatgttgagcactttttcatgtttgttggccatttgtatgtctgcttttgataattgtctcttcgtatccttagcccactttttaataggattgtttctttttttcttactgatttgttagagttcattgtagattctggatattagtccacagtcagatgtacagattgtgaagatttttttcccattcttgggttgttcgtttactctgctgactgtttcttttgccatgcaaaagctctttagtttaattaagtcccagctatttatctttgtttttattgcatttgcttttgggttcttggtcatgaaatccttgcctaagccaatgtctagaagggtttttctaatgttatcttctagaatttttatagtttcaggtcttagattgaagtccttaatccatctttagttggtttttgtgtaagggaagagatgaggatccagtttcattctcctactcgtggctagccaattaccccagcaccatttgttgaaaacggtgtcctttccccactttatgtttttgtttgatttgtggaagatcagttggctgtaagtatttgggtttatttatggattctctattctgttccattagtgtatgtgctgatttttataccagtaccatgttgttttggtgactatggccttacagtgtagtttgaaatcaggtaatgtgatgcctccagctattgtaaaaggagttgagttcttgagtttattctcagcttggtcgctgttggtgtatagaagagctactgatttgtgtacgttaattttgtttctgaaaactgtgctgaattattttatcagttctaggaactttctggaggaatctttaggattttctagataaatgatcatatcatcagcaaacagtgacagtctgacttcctctttaccaacttggatgctatttatttctttcttttgtctgattgctctggctaggacttccagtactatgttgaagagaagtgatgagagtaggcattcttgtcttgttccagttctcagagggaatgctttcaacttttccccattcagtattatgtttgctgtgggtttgtcatcgatggcttttattatatttattatatttatcattttttattttattattatannnnnnnnnnnnnnnnnnnngtttaatgctttttctgcatctattgagacgatcatgtgatttttgtttttaattctgtttatgtggtgtatcacatttattgacttgcatatgttaaaccatccctgcatccctggcatgaaacccacttgatcatgttggattttctttttgagatgttgttggattcagttagctagtattttgttaaggattgtagcatctatgttcatcagggctattggtctgtagtttttttttttttttagttatgtcttttcctggttttggtattagggtgatactggcttcatagaatgatttagggagggttccctctttttctatcttgtggaatagtgtcaataggattggtaccagttcttctttgaatgtctggtagaattctgctgtgaatccatctggtcctggatttttttgttggtaatttttaaattaccatttcaatctcgctgcttgttattggtctgtttagggtatctaactcttcctgatttaagctaggagggttgtagctttccaggaatttatccatctcttctaggttttctagtttatgtgcataaaggtgttcatagtagccttgaatgatcttttgtatttctgtggtgtcagtcgtaatatctcccattttatttcttattgagtttatttggattttctctcttcttttcttggttaatcttgctaatggtctattaattttatttgtgttttcaaagaaccagcttttcatttcatttatcttttgtatttttgttgttgttgttgtttgtttgtttcaatttcatttagttctgctctgatcttggttatttcctttcttctgctgggtttgggtttagtttgttcttgtttctctagttctttgaggtctagattgtctgtgctctttcagactttttgatgtaggtgtttagggctatgaactttcctcttaacactgcctttgctatgacccagaggtttggtaggttgtgtcactattgtcattcagtttgaagaatttttaaattttcatgttgatttcatttttgatccaatgatcactcaggagcaggttacttaacttccatgtatttgcatggttttgaaggttccttttggagttgatttccagttttattccactgtggtctgagagagagtgcttggtataatttcaattttattaaatttattgaggcttgttttgtgacctatcatatggtctatattggagaaagttccatgcactgttgaatagaatgtatattctgcggttgttggatggaatgttctgtatatatctgttaagtccatttgttccagggtatagtttaaatcaattgtttctttgttgattttctgtcttgatgactgtctagtgctgtcagtggagtactgaggtcccccactattactgtgttgctgtctatctcatttcttaggtctgttagtaattgttttataaatttgggagctccagtgttaggtgtgtatgtgtttagaattgtgatatcaaggccttttatcatcatataatgtccctctttgtcttttttaactgctgttgctttaaagtttgttttgtctgatacaagaatagctactcctacttgcttttggtgtccatttgcctgaaatgtctttttccacccctttaccttaagtttgtgcgagtccttatgtgttaggtgagtctcttgaaggcagcagattgttggttggtgaattcttatccaatctgcaagtctgtatcttttaagtggagcatttaggccatttacattcaatgttagtattgagatgtgaggtaccattctattcatcctgctatttgttgcttgtataccttgttttttttttagttgtatttttgttttataggtcctgtgagatttatgctttaaagaagttcttttttgctgtgtttccaggatttgtttcaagatttggagctccttttggcagttcttgtagtggtggttggtattggtgaattctctcagcatttgtttgtctgaaaatgactgtatctttccttcatatatgaagcttagtttcattggatataaaatttttggctgataattgttttgtctgaggaggctgaagatagggtccccatcccttctagcttgtagggtttctgctgataaatctgctgttaatccgataggttttccgttataggttacctggtgcttttgtctcacagctcttaagattctttcctttgtcttaactttagataacctgaagacaatgtacctaggcaataatattttggcgatgaatttcccgtgtgttcttggtgcttcttgtatttggatgtgtgggtctctagcaaggccagggaagttttccttgattattcccccagatatgttttccaaacttttagatttctcttctttctcaggaacatcaattattcttaggtttggtcatttaacataatcccagacttcttggaggctttattcatattttcttattcttttttctttgtctctgttggattgggttagtttgaatacgttgtcttcgagctctgaatttctttcttcctcttgttcatttatgttgctgagactttccagagcattttgcatttctagaagtgtgtccattgtttcctgaagtttttgttgtttcttatttatggtatctattttcttgaatatttctcccttcacttcttgcagcattttttggatttccttacattgggcttcacctttctctggcacctccctgattagcttaataactaacctcctgaattctttttcaggtaaatcagggatttctttttgatttgggtccattgctggtgagctagtgtgattttttggaggtgttaaagaactttgtttagtcatattactagagttggttttctggttcattctcatttgggtaggctctgtcagagggaaggtctagggctgaaggctgttgtttagattcttttgtcccacagtgtgttcccttgatgtagtactctcccccttttcctatggatgtggcttcctgagggctgagttgtagtgagtgttatctctcttctggatctagccagccagcaagtctaccaggttctgggctggtactgggggttgtctgcacagagtcctgtgatgtgaaccatctgtgggtctctcagctgtggaaaccagcacagtatttgaagtgtctcctgggtcctgcaggagcaatgtgttgccttcagggggtatgtgggtcctctcaggtttcctgatttattcctgaagttgttctggagcaaaaattcacgacgcaagcctccatatgctgctctgtccatccaagtcagagctgcaatctagtcctgcctcctgtccgccatgatcccccaagaatctagttgtctctgttttttaaacgttgcatttgctactaatgtagcatgtgcctcacccagcaggaaaatatcttatttaggtaccagtgcaggctgcttctctgtaatacgggtacaggacctacagttgttccctgagacccagatgtcactcctcaatgacacaagaccaggtgctttaataggaactttgttaaaagcagttgagagattaagtgcaaagaacctcagattgttcaatgtcagcttaaagcaaatagcagataacatgcaacagcattctcatgttcaatctctagtgcctcctgatttggaagttgcaaaattccttggctggagtgtctctgcgcttgtcttatttagatgtttttctctgatgtcttggtcttgagtcttcagctttttcccctcccaggcttttattaccaactgggaaatcttgcagtgtcttcaacagcagtagctggaagttcatatcctttttggctctagttatctctgttcctacatgtttctaaacaaatatgtgaaaatccagcatattaagaggtttgctttccttcaaagcatattctttggaatcagctcttccctgaccattgggcagttgagagagcagctctatggtccacctggactctggttgggcggtttctcatggttaacaccatctccctcggtgctgttgtggtgatagtgagctctcttgagatctggttgtttgatgaaagtgtgtggaacctctaaccccactgccttgcttctgttctggccatgtaagacgtgactgctacccctttgcatcttctgccatgattgtaagtttactgatgctccccagaagcagaagccactatgtttcttgtacagcctgtagaactatgaatcaattaaagctcttttctttatatattacccagtctcagatatttctttatagcagtgtgagaatggactaatatgggagggaaaaagtggaggggaatggaaatggagaagagatgaagtgggagtgagtcttatcttaatatatctttttatatacttctgacttttagaaccatgttaatatttcacttacttaaaaaaaaatcatccaggatttggggaaacccaaagtggaaaacaactagtaataaatgaacctaactatcacacatgaataatataacaacagtgaatgggatagtgaaggaaataattaagtaactttggaaaacagtttttgattatatattacaaggtgaaagaattgcacacaatgttctttagttaatagcttgtttttcacagggttagcaattttgaaattatgtgtcctttagagcaattaagtaaatatattgcagtaaataatataatgaaaactaagtacattgtcagaggaagaaagtacaaataagggaagaaggaaggctggaatgacctctgtgatggattagaattggaggtgtgaatatgaactcatggtttctaatatatacacacaaatataaagaaatagatacaaatgcttgtgtatgcatggctttagtatacatacatatattttccagttctgtccgctgagagtcctagaaacagtgaaagcccagtagccatgagcactcctagctaagatcttggtttctaaataccttttccaaataaagggaactttagctcctcaaagaaatggctgattccaggactgaggctgagaaagtataagatgaccctagagcatcttattacaccagaaactacagctgtgctcaagaaatgtttgggatgtgtcaagtagatataggagcccagttaaaagagcaaccactggccaaattgaaaacaaatttgagccacaaaataagttatgatagtaatgaattataattcatagactgaaataaatatccatgagtttgtagggttaaaattaataaataaactgggagaatggagatctcttcttatagtagaactctaacaaatgttgaagaaattatggaaatagaaaaatcaccatttattattttttaatttttaatttttttcttctgtatattaccctcaaaactgccaaccatttattaaatactataataataatagttatagcaagaatcatcactggttgctaaaacaattggatgaaagtatttgcataatctcaaaatatagctctacaaaatgcctagtaatttcaaagagaaatacagtaactttatgttggataagcctggcagacaccccataaccaagtgaccaaagttaacattatcaatattaagacatactgacatgtttgccttgataaactgaaaagggtatttaatatcattaaatgacagtcttgccaaaaatgcataacctgattttaatcatgagcaaagatcaaacaaacccaaatagaggaacactctataaaataacaggctggtacacttcaaaactgtcatggtcataaaagacaaagactgaagaactgtcttggattggggcagactaaggaagcgtgacaaataaatgcagggaatgaccctgaatagatcctggaccagaaaaagcatattagtgggacaaatggcaaactctgaataagatttgtagatgagttcataatatttcatctgtgtttattttctggttttgacaagtactgtggttgtataagatgttgcattcagggaagctaggtgaagagtttactggactttcttgtctattttgcaactcttttgtaactcaaaatgaaaagttaaaatttaaaaaaattaagaagaaaaattataatggggagagatttaagggcaaatacaggttctagttatcttcttggctattattatttttggacacgaccaataataatagagaagaaagtactctttttctaaagagatacatacatttgtaaacacttcaggtttgtcatgtatttgaagttatttgttttaattccaactggcaaatttgaatataagtaaataatagaattaggggtagaaattaaatggaaagaaatgaaaagaaatcacacagcaaattttgaccttcaacttggttcccctgactttaattatgacatatttaaaatcaataataatcatcaaatgctctcacctacagagtcatgttaaatgattacacataatatagtgcatgaattctgcctttttgagtatgaaattgacaactggcattatacattcattaaagtgagatctgagtagaatattaaattgaaagctatttggtagttctctttcaggaggagtttttctgatgctcttcttccaagggacattttctgctaccatcatcaaaaaaattgattgaacatccatgatgtgttgagtgtcactcacaagagatatgttctctgattgcttgactcaaatgctttatgcttccaaagatttaagattccaaaggagcctggcaagtatggttataactttagggagataaaggtccaaaactggagccatagggtggagtagagtacgacctgtggtcttgtacttctacaaggtgagatggaacatcagtgtcagagtctcaaaaagaataaaataaaaaatgtggggatgccgatgcacgtgacaaatagaccaaagaacaatcaaggttacctactctgagagaaatttatattcacatcagttcgtagttctctttccctttctcttctctatgcctaaatgtacacacacatgtatagacactcatacagttacttctgaacttggctgtgctgcatttgtttgttgcatgtgtctgtttttactggggtgacctttggttcctttcctagtcagcaaaaacatgtagttttaccgtgatttttggttatatcattaagatggagaagtagttcctgacctgtagctatgagtttagttttatattaagcgctatatatttgccattcttagaaactaaaggaaaaggaggaaaatatctctgcaaaattatggggcaaaacaaattgtgcgtgtaaataattgtgtctgctaaatagcatcactgagtggatcctgaaacatttcagggccaccttggtttccttctcaggggccttggttaccacaatttaggagttaacttcaggaattaagtagtaatatggcgttatcccaaagctgccctcctagccttttcccactgggcctttagaccctgctcatcccatgtatacaataatgggaaacccaggaatatgttcagttccaagcaggctaaatataactccatcttctttctctttcacctctgaaagcacatgagaatgcagaggataataacaagattatagtgataaccttgaacctgctctaagttattaataacttagagaacctgctctgaattatttgtataatatattctagtactttatcattagtagcaagttactttcaacacatctcataacaggtagatacagcccttgagcccccacaagaaagtgaggcacagtgccccattttcacattgccgtctcactgggatactgagggtgaagttaaccctcagaagagggcagaattaatggaatttgggggaaatcaagccagggctggtagattaggtcaaccatagaactcgcccttatgctagttttccagttacatgagtcaataaatgttctcactttttaagctagaaagaacatcctgctctgggacagttacctgctttgttatccagaagtaatcttatgttgtttatgccttgttttctatgttgatgtctaaggattatctaaaaacttacacttatttttccccctatttatccctcaaaactttcctgggttaccacctccatcccttatacctcagatggagttcattactttggcatttgtaacatatatatagtgtgggcatacttctattattgcccactgcatattgcattatgtccatttgttcatgtgtctgtccctactactccatgagtcctagagatgaggacccactgttatttatcattagatattctttgcttaacactgtgcctggcttagaattgctgctatacttaatgtctggtaatctatggaaatagttctaggatacattatttgtgagagaaatatgtcattaatgatctataatgtgtatatatatatatcagtgaagaaatgatcaaaagactgctactatttaatttaaaattaaattgtttcagggtgggagaagagggagaatgatgggaggagaaagaaaaaggaaatagtttttccttttcacttacttgagtttgcttgtgaaatatgataaatttcactccagactgattgcaattcaatgctgaggggtttgtggtcatggcttgccagcctcatggtgtttagctttcactgccatgtcaagagcagatgacttcctttcctaaaagcatgtccttggaaactcattaagaaactcattaactttggggttgtctacctatcagtcattcctcctttctccttcctaactgaaccctgactttcttttgccatctaccccatttctacatggagcaggtgcctctgcaggtggactccacccctagatgctggtatggacctgattgatcaatcccatccttcctgccagtgatcagttcaggaatgtgtatgtgctgctgtttgggctagtgataaaacaggaaaggaaaggtgtgttggggagttctgggaaagttttcccttactcttttgtgagagtttccagaagtaagctctctctctctctttctctggaggcttttgtatgcagatgtgagactgagctgcccttgccatctcactgggagcctgagggtgaagttaaccctcagaagagggcagaattaatggaatttgggggaaatcaagccagggctggtagattaggtcaaccatagaactcacccttatgctggttttccagttacatgagtcaataaatgttctcactttttaagctagtttgataagtgtctgctgtgacttgcagcctaaagtgttctaacttattaacaaacaaacagacaaacaaaaacacttctctaatgttgaataggtggaaagtggaaactagggccagtgaaagacaatttggcaggtaggagaacaaaaaagtagtttccttagaccagtgcttattgaaacacaaatttctgggactcagtcccagagcttccaattcagtagctctggagaaggcctgagaatttgcatgtttaaaaagttccacaatggtgctgttgctactggtccaaggaccacactttgagaaccactaccttagacttccaagcatgctgccttttatgccaggatagccaagggtggtgggcaaggccatggtgccaagaagtgagctctagctattcattggaacagccattgggcccctcaaagcaggttgagtaggtaaacccacataatggtacagaagttatcaaaacactttttattgtcttttttttttttttttttgagatggggtcttactttgtcacccaggctggagtgcagtagcgtgatctcagctcactgcagtctctgcctcccaggttcaagtgattttcccacctcagcctcctgagtagctgggactacaggtgcttgccactgttcctggctaaactttttattgtcttcttaaaccgtaaattccatgaggagcgagcatatgacttgaatatctttattccccaattggatttaacacacacttctaagcacactataggcactcagtaatgcagaattaactcactggaaataattcttggttaactcactggaaagaaagcactatttgccacattctgtggctggatattttaaggcaagggtaggtacaatataaggaaggccaaaactagcccaggatgatgagtatgtaaataagagctcacctccttgctaagaagctccagcaacttttcctttggggaaaatgcaacactgaggtctcctctttgaaggctttggcttttgctctgaaaacctgtcatcacctgtctctttttacttttcatactaaccacaaaataaatctctgatagtgctgtactagtctggcaatgttgctttttccttcaaatatttactccctctgtggacacatcaactcaaagattacaatcaggggaacctcctgtgtttcagataaataaactatcactctgtaagagaagagaactccctctgccctttatgtagtttgcattcagacaaataactgtttcttaaatgagaaacataattggtattgtgcaagggctgggagtgctcccatgctttcttccaagcagcaaatagtggccccaaatgcagtgaggctctgcctctgatttgtgatggaaggaaattgtgtgtgtggggccttctccttggctggaaggatctgcttcctctaagcctctgtttaaaccaggtgtttatttaccttgaggcagggtcagacaagggcttcttggctttaccactctttgcatttcttttaacatcaggttttgccaagtgattcatacatgctggaaatgcagagaggaatctacaggagtggcatttcccttagccaggaatggattaagacagaaacattaaatgtgatggatgtggtttgatacattcctgtcctttccagccatccacaccatgtactgaggcctctcccatggttccaggcttctcctgggtctagccagcagaaggagaggggacagtctctgtgaatatgtaaacacatgataattgtcaaactgtaggcctttatagtggcatttctccaataatataattgaattttgatttggagcaaattgatggtactctttacacactatatgtttgcccttttctttcttttcttttctctctctctctctccccctccccctctctccctctctctctctctttcttcctgtttttttttttgtttttttttttttttgatggagtctttctctgtcgcccaggctggagtgcagtgatgtgatctcggctccctgcaacctccgcctcctgggttcaagcaatgctcctgcctgcctcagcctcccaagtagctgggaccaggcatgccaccatacctggctaatttcttttgtattttagtagagacagggtttcactgtgttgcccaggctgatcttgaactcctgagcttaggcaattcacccgccttggcctcccaaagtgctaggattacaggcgtgagccactgtgcctggcctgcccttatatttctacaagttactagaaataaattttaaatgaaacacttcttatttagggagtcagagcaaaaactacaataagtttgattaagaagactcattcaaatatacagaggtatgagtttaatatggtaattctgaaagattggactttgttgtgaagtatcataaaatataactattaagctgagaggttaaaacatgataaagaggttctgcagatcaagaggtttcacaaagctttttctcaaatgctctccccatactctcaaaaatatgatcagcagtaatttagctgtcatccagtgtcttgtcacattacaggaaagaatggggataaatcttttcatgtctttgtaggagtacacattggataccacctcaagcagggccttctggggactccccacctagatacccaaattatagaacactttacaaagtgttgagaataacctcaagcttcctcaggttctctgacaacttctcttccagcccaggctgatttcttgttgaggtcatacatttcttgttgaggatgatagaagctggatatttcccttttgcatctcttttaaatctgcttggttcttttttaaaaatagtatctattcctttctctcgtttttaattcccttttagacttataataatagtttaaaaccagcttgttttatagctcttcctgataattctattatgtgaagttcatattttgctgttttctgctgagccttggttatggtgctgtgtttccccaggtgttttgtgagttaaggttgcaagctttcgttatctgtgagaatcctgtgtgaccttatttgaggatgtgttcttaccaagaggcttcttcttttcttctaccaggacctcagcaatgacatctgggaatccattttcatgttaatttatctgcttggggtttacctgcccttgtagtagtgtaaatctgtatctcaaacccacatgagggcaggtctgtggttataaattctcaggggaaatttttttcccttcacccagagctcagcctgagatagaggaggttccttgttgcttacttctgtgggtggattttttttttttccagtccacctgttttcagaggatatagacctctagggtcctggttcatcataagaatctcagttttatcaccctaccttgtggccactccatgtgtcatttacacacaagaccctttgttacttagattggcagtgacatttagagttacaaaagtttgagtccttgttttccagatttctctttttgttgggactttgagggtttcacttttcattcctgagagtttatacatttaaaaaattgttggttatattttatgcagcatttccaggtgcttggcggcaggagtatttcaagatatttagtccacttttagcaaaaaaaaaaaaaaaaaaaaaaaaaaaaagacagtaagcattcataaatgtcataatgctagtcaaaagtgactcaggttattttaatagttgtggtcttcctaattgctgactccttgaccagtgtcctcattgtggttgagaatccaacatccattccactctgctccaaaccaatggttcacaaacttaagtgcatctgaatctcctggaattcttattaaaacacagattgctctgctgctgtgcttcaactctagagattctgatccagtaagtctggagtggatcctaacagtttgcatttttctcaaatgctgctggtggcctggggaccacaatataagaatcagtcatgataatcctattctttccacttgagactagtttaggaatgggcatacgatctaaatctaccagaagagatgaggggaagtctgctgggggcttccaggaaagtttacctcaatcttgagaaaaaggcatagaaaaaaatggttctgttttcctctggacattgtcatgtaaggacatgatgcctagaactgtcacaggcctcttaccttcctcgtgagaatgaagctaatctagggtataggggcagagccaggagaatctcaggggagcagagaaggaatcctgatagctcttccttggctaggtcctgccctacttctgttatttcattatgtgagatattccataaatagaaaaaaaattaaaaattgaaatgagtcagggttttctggttacttgtagccccaaagattctaagtggtacaactatcatatgggtatgttgagtcttattacctgccacccccagctacagagtgccgaagcaagttcatttcaaattatgtttttttatttctttttttgaactactaattttctgtgacacttttttctctactttaccccaccacacacacaatctcacccagccctctgggaatatgctgtaacacttcaaaattgtgaatctcttgaaaggaggcagctactccaaactttcatctcatttctacatgtgggactgcaggatccatttctagttgaatgcatgatgacagctttacaggaagtcgtcttccttatattctctttttatatattgctgttttctggcaaccctagctaattaataacttaatctgtctctccttagactttaattctaattttcagaatttcccaatcaagtcaacattgattttattggaatttcaaatatactctgtgctactgtgttgtatttttggtggaaagaattgtagcaggaatcaagcctcatgatgcaaatgcctaaatcctgaattgtgaccaggattgcaaagaaaataaaaaggtcgctctctagggagttgaactagcttagcacctccacatggaatctcagaatgagaacagtgattttttccctcctcttctgtttaatcctagtttggacagctctttattcagaacatcaaggactgttgacagttgaataaaaagggcggaggcttatgggattgctaatgagatacaaagccaccttggaataaaaataaatttctctctgttggctcctccggccatggagaggtaagttaagaacctcaaatcaatttctactgacaggtattcttatcatggtaaacagtgcaatgcacattttagttggcttctgagaaggaaggccaggggcttccagttgtgtgatatcttttcagcagatagctgggctaaggtgaacaaattgtactgatgtggcgtgaggcacactatctggtcagaaaataaagttcttagttatagttaacatacagcatttttcctaaaattaaatttttcagcccacaaattcaggtaagtgttaaaatgaagaattttattatttcctgatatcaaatgccttttcctactttctttccaatcctaataatttatctagaccaattcatagttcatgacctcttttgaagccttgcctgacaacccaagctagaaatgatatttcttttgagtgcctggagaactaatgtccctactcttgtcttattttgcaaacttgactatacagctgtttgaaggcagggattatataatatcttttcttgtattatccacacaagatccactgcagtgttttgcacatagcagttgctcaataaatgttggttggttggttgattttttttttttttctttgagacagagctttgctccgttgcctaggctggaatacagtggcgtgatctcggctcactgcaacctctgcttcatgggctccagcgattctcttgcctcagcctcctgagtagctgggactacaggcacatgccaccacacctggctaatttttttgtgtttttagtagagatgggttttcaccatgttggccaggctggtctagaactcctgacctcaagtgatctgcccaccttggcctcccaaagtgctgggattataggtgtgagccactgcgctcggctggttggttgattttttattcctgtgaagtatacaacactgtagacttagaaatcatccaagaagagggttttctcacatagaacctgtggatgcacatcaaggcttctggaaatttattgaaattgaatgcaaagtagacattttcttgggagagggaccatagctgtcaacagaatcacaaaggggttcttgattcctttccaaatgaggggaattactgaactaggctattcattttcttttcttcttgacaaaactattaataggtcccgagatgttgataatactgtcatgacctcacaaatactatagcagtaagagttctcttgggatacctctgttcccatttttaactgttgttcctgaaagagaaatggagattaaattgaattcatgtgctgtgattagactgattgtattttttaaattgcacaccattaaaaggactgcgttctgaagttctggtagagacagtatatcatggtagttagatgtatgtgctcagagccaagcctgtgcttgtatctcagctctgttacttactagctgtgtgaccttgggcaaataacttaaaccttcccagtctcagtttcttcatctgtaagatgggaatagttatagtgatctacctctcagggttgctctgaggattaaatgaatcaatgcatgaaaaacatttaaagcagtgctttgcacacatattaacagtaaacataatgtaagtgttagctattaatattgctgatgcttttgttgttgttcaactgtagctctcattttcatgaataccgattagccatggtaaatgtatcttctgcagcccttctcaccaccaaattcacttctgagtcatcacattgaggtcagatcagattgttgaattattttgcagaaattatgtggttttattgtctgctaggtgtaattctaagttttctttcttgtgtttgcttggcattttgaaatcaagttctcacgctctgagggtatttaagtcatttaaagattaccaggctaaagaatcaagatcctttgaatttcagtgaatgtacttttttatcccatgaaatattttttttgaaaaatattaacaaaaatattctaagaaaaacttttagtagagtcttttagtcatctttatagttgtagttaacttggaaaaggaaaaaatgaaatgcaaaggattctgacagattgaagtcactgctgcctggaattaattctttccattagccttaatattaacccctttaaaatgatgaaaggttttggttaatcctagaattcttaatccccaccttttggagaagcagaaaaaaatactgaagtgatttttgttgggggagtgcttatgctaagtgaggcagtttgtcagattttacttttatgagttgactgtcaagcatttgagaagggagggtgttttttagaaggctgtgctgcagcagattcctcagctaagtgcacatcctgtgatatttcccccactcttccctgatcagtgaaattgcaattaaataactaatatcaactgctccatttccatgatcctcagagcctatggaattagaatatacatatttaaggaggagaaaattttccacttgatgtctaggataatgaagagtgatggagagtggggttatgaggagtcaggagatatatatatatatatatattagtcagaatgtcagcaggaaatagttgatacatgaaaattgggtaattttcagagttaaaataaaactaaatttataaaggtgtgggctgggtataggaaaagtacaaagggtagtgcaatattcttaggctagtaaggtgagggcagtgtctttccatccctgggtctgaactggcaagacagatgggcaagcaataactgtattccaggagggagggagggagggtggaagagagaagagagagagagaatgttgagaactagctgtgtggggagggcccctgatgacagctgtgacctctggtctaagtcaaagtatgttggcaaactagagcaagcctgcagggaggggaagggataaatgtcctaacctcactcttctcttttcctaatctcaagccagtggtcctgtatgaacccaatcagaagccagagggcagagggcagagcttgcagcaaatgccattctgggatcattttgtaccatactttattcatattctccttccctggatgcctccaactctcacccaagtgcttccatttatgtgccttcctcttcttcctgcttctgcatgctccatactggctgacacctagagcagatcattttaaatacccctccccttgcttgtacaggacaaaattattttcaataatgatgtcataatgattgtttttttgactcattcttaaatttcacaacaaatataattgacaattttaaaagactaaattacaatgttgacattattcaaatttggtaaaatatttcatgtataatctcaaattttcatttaccaaacaaaaatatttcagatttcagtttgcagttcattctctgtttcattatgatatggtttgattgtgtccccacccaaaatctcatcttgaattataatccccaaatccccacgtgtcaatggtgggaccaggtggatgtaattgaatcatgggggcagtttcccccatactgttcttgtgatagtgagtgagttctcatgagatctgatggttttataaccatctagcttttcccctgctagcacccattctctctcctgccaccctgtgaagaggtgccttctgccatgattgcaatatttcctgaggcctccccagtcatgcagaactgtgatgagattacccggtctcctgtatttcttcatagcagtgtgagaattgactaatacacactcttttaaattttaaacataaattaaaaattccaagtgtccatgaagaatgacagaattgatataactcaagtttcagttcttccttttgaaaatcagtttctaatctactgtttaaacaaggaataggtagcactctggaggccagaggtaggaactgctcctgcagcaaacttgaatggttctagacccttagaatgtatcctgggaaggagtgtagctggctttaagtgtgtcaggactgatagtgtaacgaaagctctctgaattagcttccatgtagaatagaatacaattttttgtttgtttgtttgttttgagacagagtcttgctctgttgcccaggtgggagggagtgcagtggtgtgatcttggctcactgtaacctctgcctcctgggttcaagcgattctcctgcctcagcctcccgagtagctgggattacaggcatgtgccactatgcccagctaatttttgtatttttagtagagacggggtttccctatgttggccaggctggtcttgggctcctgacctcgtgatctgcccaccttggcctctcaaagtcctgggattacagacatgagccactgggcctggggaatacaatgtttttataaagaaaattttaaaaagagagagaattggaggcttatatgttgttaaaattgcagtaattcttagtttaagaatgttagccctggtgttaataaaaagcaagttgacttttggtcagtttattattgttttacaattctccacaaacaattcagtcccttattgtctataccctgggcacagcaaagtaaagtagaaaagaaagagagtgaatctaggggccgcaggaaggcagcttacccaggacattaagttataaattgagaactttccaagtcattccttatctgttttcatgaaattgtcaagcccattagtgtcttatccttacagatttttgtgacagccatgtacttgtggtgagtgcttgagtggggatgattataacaaaatggaagaaagatctataattctacataacaaatgaaaaccttggaagttctctttttgccgtaagactgcttcctagagcttgtggcaagtgccattctggatcattttataccatactttattcatattctccttccctggatgcctccaactctcacccaagtgcctccatttatgtgccttcctcatcttcctacgtccacatgtcacaggacaggctggttcctttttccatcttggctttcctttcccatccccttcttggctacccctgtttccttcttctttcttcactggaccagacatgaatttgttctgggaacttttactaatctatggaaaaggttgttaataggcttcatgtcagatgttcagttgcttagtaacccaaaggacctcctgccaagtttatgttcagagaattagacaaaccatccagtccccactgttctcaggcctgggctgcatcagctctccagctcggctatgtgtgaggagatcccacacaggctcagaaaggagcctcagcctccacagagcaatgagtgtgagggcagagtctgagcctacctggcccagtctgaagaggaatctggggaggctgacctgaacagatgtgcaggcatgttttcagatctcctaaaactgatatttactgcatgttagtgaggtggtttgaatttttcagtttctctgcttcttcctttgttccgcttcctgatctatctctccttctcatttcagttcctagtgtttttcaggaaacccatggttttagacttacaggctctctatcaaatggtaccatgtagacttagagcagtggagtagtactcatctcttgttgccaacctccacaaacacacagaaaccatacaaaatccccacggattctggattaggatgtatcaacgtggaggagaagggtttctacactggtaggaggaatgaatctgggtaaaataattgcttttaatgaccgctaggagtttagaaacatcctacggcacagcaaagagtttccttgctgaactgcagatggtgtttattgccagatgatgtgcagaaaagtgccagatgattaggctctttctaggggatgtcagaatcttccataacccatgcaaataattggctttctaacacccccagactgtaacacaagggaggtaggaaaacttctaagaaggtagttatcatggcatgagtaaaaatttctgtttgccacaccatggctagcagcggggagtgggtggttgaacaagaactcctccaagactctggctggctgggagccaggattcttcaactggaaatgaacagggaaggaggggaaaagaacaaaaatctgctgagggataataaaaattttaatgattcttcaaatgttgcattgtcttgtaaacgtagttgtaaatttaactttaaaatgacttttactcaattgggtcagagacgtaaaaatgattaaaagaaaggaataggtctcagattagcaataatatttgtacaaaaaggttttcagtgttcagagtaattgacggactggttttgggtgatggttttaattactgggagcttatatataattatataatttataatatataatatataatttataaaattatataattttcaatgagcaaccactctaaacataaggatgagagctcaggtatcagctgtggagtttttcttaagaatacaagtaaattgagtgtgacctgaccttagtctgttattgtaaccagagttactattctttgctctagtctagaaatatctccaagtaggagatatgtgtagggaaggtagatgatctttgtgccttcactctaatggtcttggagtaggaatgtagatcatggtttgatggagggatattggtgatgggtggggctttcttatccatggcaaggaaaatgctggtggaagacttcatgtgtggcatgattagttgatataacccaataagattagtttatataggcagggtgtggtggctcacccctatatcgcctgtaatcccagcactttgggaggccgatgcaggtggatcacctgaggtcaggagtttgataccagcctggccaacatggtgaaacactgtctctactaaaaatacaaaaattagccaggcatggtggcatacgcttgtaatcccagccactcaggaggctgaggcaggagaatcacttgaacctggcaggtggaggttgcagtgagccaagattgcaccactgcactccagcctgggccacagagcaagactccgtctcaaaaaacaaaacaaaacaaaaaagattagcatatgaactaattcatacaagatgcccttcactttgaaaatgccagctacctagatgactaggatgtttgaagggagttagatacaggcttagacatatcttagggactacagaactacacagatgacaaaggagcccagaattcttgaactgaaacagatgagttagagagaaaaacagtttttttcccctttaaaggctagactagtgtacaaaagttataaaagcagacttgggcacctttctaggtgattcacaactgaaccatcttcttcaaaaaacagtagccccttatccttgaacatgttccaggactcttgaagtggtgattccttccttgggcaggaggttgacagatggcttctgaggttcctttctatctgaaattgtgtggttctcattaaaaagtttttccttatattcaaaatgtatttcacatagtaatatggcctaataacaaagattttcttcctcttctaatttgaaactgacaataaaacttgtaaaaaatgtgaaaggtaataaaattctacatgttccaactgatgtcagatgctcatctcttaaagaccagaacctcagaggcattccaggagagtccacttggtttactcacttctcttgattatgtatgaggactaaactctggccttttttttcttattttgcccaaatcctacctaaggaacctagggagtcatgccctgcaaaccataaagtctcatcagaggggttttatttaaccctgtgtaacgtggcctgctttccaacttgactctggcataacatcacataacaaataaggaaggaaatcaaaatatttttaccccaaatatatttccttgtcatatcttgaaactgccctgcaaagtcacctcttctgggaaaaatcgacattctgtagagaatccccttcccctcctcctttttttttctttccagatccaggagataatcaactaagagtcaggcacccttttaagtccaataagaaatattttataacctattctctgtgaagtctgctgtctgaaggtttcctctgcacaataaaacttggtctccatacccctttatcttaacccaaacatttcctttctgttgatcccaggtctttagataaacttaacccattgtcaaccagaaaaaatttaaatttacctatatcctggaagctccccactttgagttgtcctgcctttccaaaccaatgtacatcttaaatgtatttgtttgatgtctcatgtctccccaaaatgtataaaaccaggctgtgccgtaaccacctcaggcacatgttctcaggtcctccggagggctgtgtcacaggccatggtcactcacgtttggctcaaaataaatctcttcaaatattttatagagtttgactcttttcattgacatgtataatgagacttttttttaaagattattattaagataacaaatgttccttgagtgagaaagagcaaactatttagatatttatggggtaaagtaaatctcgatttattgcccataggtagaccatattaataggttttttgtttttgttttttactttttaattattttgggatactcttaactttagatgatgttgttagaaagattttttaaaaatttagatttcataaaataatcttagttgaaaacagctaaatcacactatgctttttaaattgttaattcaagcataaattgtaagtgcatctgtgctcaaccatgcataacttgaactagtatccattaatatctaagaagctgatttgaaactctgagtatatgagagggaattgtcagctatgagcctcactataaagcagtgattttcaaccaggagtgattttgctccttataggacatttggcaatatttagagacatttctgtttgtcatgactggagaggtcgtggcatctaatgagtagaggccacaggtactactactagacattctacaatgcacaggacagctctccacaacaaagaattttctggtcccaaatgtcgaaagtgccaagattgagaaatcctgctatataggttgatatgggctgtttattgatggaacatccttccatcaatatctttagatatttcctttagatttgatgagattcccacctgctgattgcactctgggaattgaatggaggaagaagacaggatttaaacatttaataagcatatgttgacctaatttcccagtttagggtaaggtgtccctgccttcaacattggtatcctttaatctagagaccctctattttattctctgcatagagaggcagactcccaagagagggaatctggggttttagctggttcttaaattggcttccaggtgattatcttaggtttaggcccactttcacccttcttccaggggaacaagatgtcatcagtttttgggcatttgggggctctacctataaatttgattgactctcagtttccccactgccagtttaggatttagctttcttagatctgctaaatcaattatttcttgcccatttattttctggtttccaaaatcctcttgttgttaccatctctcttactcttttttttttttttaattctttagtgatatttttatgggttttgggagggagcagaggctaatgagaacatttgatcttctgtctttaccagaagtagaaaattagtttttcttctctaatatgttttccgtaatgatagctgcttcatttacaagctaataccaggaaatggctttaaaaaaacacattggtaagtagaatggatttgtcaggatcttggtttttgtgaggcagagtccagattgaatgctacctcaaaagttcctttattacataaaacaagcaaacaaaaaaacattttccagtagttactttcagcttttctggattttcttttctctttaactatttcacaccctcttatttagtaggtagcatacaattgtctaccagctgatttatataaagactttattgaatttttatttcttcactaattgaatcattcatgcattcagtgtctcactcactccttgactcatttacatattcagtacaagtatatcacatgcctgctatgcagaagagtctgagtgagacaccatgtaggatgcaaaattgtgtcacacaatccttgcttttaaggagttataatcttttttgtatcttttggaaataaattacatgacatgtttccatgataattggacatacgtcataattttggtacataatattgacacaatacttactactctccccttttgtagcattaactttgaagagcatcttttggcaaggctatgtatacaaaaataatgcaggcattatgcattctatgaagggactctattttatcagatgccatagccaaaagaaatttactgttcactttcgttatggctctgttgagttcttaggaagtgaagctacaagttcattgctgtgtacttcaaaggagcttctaatagttacactcttcaagtctccaggaaatgattcccctaaaacaaatcagcatatgcaatgtgcccatatgcatagtagatcaataacacacaccacggatgatgttatcagcaacctgccttggtctagacctatatttcttaacaaatacaaatgcctttggttaaagaaaaaagatggtatggtgggctgagagtaggtatagacattgcacttttttctcaatcttgaaattggggattttcactgtaaacaagataatcaatctcaccatgtgccattttatatacagtgtcttctagatttctactctagaggctatccagaggtccttaagagtggagatactgttttaaaaatgcctttctttttaacagtatgttatctttatcaccaaaagatgttatgtaagaatagcatcagaaaggtcagggatggtcttagggacaaaaagaaagtatttattgaattttttttttttttttttttttagatggggtcttgctttgttgcccaggctggagttcagtggtgggatcatgattcactgcagccttgacctctcaagatccaagtgatcctcccacctcagcctcctgagtagctgggaccacaagcatgtgccaccacacctggctattttttaaaattgtttgtagcaatgggtctcattctgttgcccaggctgctctcaaactcctgggctcaagtgatctcctgcctttgtcttccaaagcgctggggttataggcacgagccactgtgccttgccaaaaaccattcttaaatccttgtgatatacagccatagaaggaggaacctcacagttactgaatcacaaatttctcccttgcttcctgggcccattcctccccaaaacctaactcaaaataaagtgccctgccattgtgatttctgctaaattctccatagctcttagcataatgtcttgaggacagaaggagctctttgagcatttcttcattgattgatggatgaatccaagttgcaagaaacatcattggatgtctctgtctctatggagcatatcctccttgtcacagtttgaagtttgcctttattaattttatcacaggcaggagggaggatgagcccaaagcagagacagacttaaattgtcaggcttctgtacaggatcaaaggtaaaagctatacactgagtacaaaagagtccagtgtcagaaggtagtcaggaatttggctagccagaatctagaatgccagaaatagaatcccagcctgaaacttagagaatgttgaaagggacataagcttattaaaaacagaatgggagattgagttgaaattagatggtaaataaaatgagaaaccagcacaaccttcagtattttctcctttacatactggtagcttgaggtcgagtaagcctggccatgaagtggggactgctgaggtcaaaggtttcagagacagtataagaaaggcctcttgcttttgatttcataaggtctagaatcacactgtatttgaatacaatgaatacttgaagttttttagagcagtgttccccaaagtgtataccagggagtgctggttctgttaataaagaaatgtatgtttggaaaagactgaattacagaaaaatgacaagtttctgaagactccttggaactaatgtgagctgcatatctctcttaagggctgtgtaagcaggatttcctggatgtatcaacctccaaacattttcttaaagtactttgcagaaccggtattacatgacccatgtttcaggaaatgatgctctgaatattatttatatttatgtcagaattgtgttaggatatactgttcccgctggtcatcggagctcaccttatgaaattttacagctgaatgaattggtctttttgtttgcatttgaatgggaaacagctgacttgaagtagctctactcgaatgggtattttcattttgaacatatatgtatataattaacatttttttgtccttatgtaggcagtgtttattaagatgacacaaagcattgaggaaaaatttgaagccctttcactttatagccaagtttaaaagagaatgatcaaacctaaacttttgggcaattcagcctctatttagctttgccctagccagtgaatgaccttgaataactcaccaggctaatgcactcactgaatttcgcttgcctttgttccaataactaaatttggatgcctgtttcgctttaagcacaagtaattacattatgtatttttaacccaccaattagttttgcatagagctaatggatctgattataacctaagaaagagattttggctatttttctccttaaatatttcatggacagagacataactggcaatactgatggaaaagaagtagaagacaagaagagtgggctaaatcagcacgatttacaaattctttgggagatattgcattacactggtacataagtctctctttaagccaatggatgatgtcatcctacagtgctattgtaagcagtcacacgtgtgtcttaaggtttgtatatgtgtgcctacaccagtgccttaactgagcagatactcaatcagtatttgggaattatctttgttatcttaagactttcattacttttatttttaggttgtatccggaattgttttttaattaaaattaattcatgtattaacttgagactttaagttaacttagtttatatgttttagatctacagatacttttatctatccatacttacattgctaacaacatttcttttctatttctcagtgcttttctcttctacttttaaaaaattgtggtaaaatgcatataacataaaatttattaccttagccatgttgaagtgtacagttcaaaggtattaactacattcatcgtatcgtgcagccatcaccaccatttatcttcatggcttgtttcatcttataaaactgaaagtctataccattaaacaataactccccatttcattcttcccttagcccctggaaaccacaattttactgtctgtctctatgattttgactactctaagtacctcatatcagtggaatcatatagtatttatctttttgtgaccatcttatttaatttagcataatgtcctcaaggttcatccatgttatagactatatcagattttccttcctttttaaggctgaataatattctgtcgtatgtatataccagattttgcttatctgttttgccattcatctgttgatggatacttgggttgctttcatttttttagctattgtgaataatgctgcttatgaagatgggggtacaaatatctctttaagaccctgctttcaatcaatttgggcatatacccaaaggggaattgctagcccatatggtaattgtatttttaattgtttgaggaactgccatactgttttctacagtagctgtaccattttacattcccaccaacaatgcacaaaggttccaatttcttcacattcttatcaacactaattattttctgtttgtgtgtttttgatagtacccataccagtcagtatgaggcaataccttgtagttttgattttcattcttccctaataagtgatgttgagcatctttttatgtgcttattgggcatttgtacatcttctttgaagaaatgtttatttgcccatttttgaattgggccttttgttgttattgagtgttgggagtttttgatatattcttgatattcatcccttatcagatatatgcaaatattctttcccattctacaggctgtctttttattttgttgatatggtcttttgatgcacaaaattttaaaactttcataaagtccaatttgtctatttattctttttccttttttgagatggaatctcttttctgtcgcccaggctggagtgcagtgatgcaatcttggctcactgcaacctctgcctcccgggttcaagtgattctcctgcctcagcctctcgagtagctgagattacaggtgcccaccaccatgcctggctaatttttgtatttttagtagagatggggtttcaccatgttggccaggctggactccaactcctgacctcaaatgatctgcccgcctcagtctcacaaagtgtattttttcttgattacttctttctgttttgttttaagacagagtcttgctgtcacccaggctggtgttctggactgtggtgtgatcttggctcactgcaacttccgcctcctgggttcaaccgactctcatgcctcagcatctcgagtaactgggattaaaggcatgtgccactgcaaccagataattttttgtatttttagtagaggtggagtttgactgtgtttgctaggctggtctcgagctcctgttttcaaatgatctgcccgcctcacctcccaaagtgctgggattaccttgattactttttgaataataaaaaacgatattatttagttcaagtgactgcttcacagtctgaatccaagatgctatttttaaaagttctgtcctcataaagagaaatattctaaatcttgtagtaaccttgcctgaacacagagatcctgttataagccttgttatatttaaatatatataaatcttgtcatattttaacagggttaaatataaatcttgttatgcgatccctatgaaacgataggcagatactttaaaaaaatatacatatagactgagaatctcagtttaaaagtacagagacttctttgggttcaagatcagtttttctccacgtatttctctgtaaaattcagttgaggagtaaatacacaaggaagctgccagttctttctttcctggacttgaaatttctggagggtggagggacaaaaaatgttgacttgcttgttagccagagctcagcaagggagtactaaacaaagtgagaggctcaataaataccttttattctgcttaactgtagtgtaaaaactgtcaggccgatatactcctctgccttcttataaatctaagtttttctttaaaatttttatgttattttgcacatttgacacagagaaaagtcatattcttcaggcttttttttgtattttaaaaaattaaaagaataaataaaactcttaccttatagactccagtttaattgaatgcaatcccaactgctcttatttaaaactggtcagctgaatgttaatgaaatattctagattattcattttcaggcatatgaagtatcatttcttgtttaggaaactcagtcagaggacctcgagtatccaaatcagtgtctgaatcatacggaactattaacaatgataagattaggccaaagagcacaatgaatagagttatgacaagcagaatttgtctgagattcatttgcgtttggctgcaaatgactaagtaagaccaacagtagcaatgtcatgagatgattgtgaagcattaactggaaaattataaatagatgatttctagaggctattgaaaaggaccagttgtttctgagtgtcatgtcaattatgagaaactattgctaacaaagagaaagaatgaaaaattaaaaagcataggggacaattaccttccaaacgtctgaatcactcttggatggcagccagctgctcaagtgctgggatgttaaagttttatccaagagggcaaaggagggcaaaaagtgaaaggctcagaaatcatgaccctgcttagaaactgctgcttccttcctaacacatcacagctagactttggttagtggtaagtaataaaagcaaatggctgatgggtctttgctttatcttaggccttagcactctcatggcagaggggagagaatatgggttgacctattataatgttcagcattccgtcccttatattcctgtgacttagagacacacctaaattttaaaaaaaatcttgtttctgtctttgctggatggaagagttggcaaagtatctggtaatatttaatctataactaattttctagggttgatgaaggacctactggattctttttagaggcatttcagtcattagctcttactcagcggttctcattgttgctatttatttcattgagcaagataataaataattatttaaaaagagacaaattgattgaaggtgaatttgtattgagctggtttgtgtcccatgcttttattatctaccagcttaaacagaacaaaaatatttataagctcgtactgtctagtttccactagaaaatacgcattttatgtaacaaattatttatctatgatatgtaacttaaattacttgttctagggattatttttcaaaataccaattcatcttgaagcaattcatactttatcaagcattcaccttcaatttaggtggctaattaagctgaaatgcttgactgtaatgaaattgatgcattttaagcaaaaccattagaaaatatttgaaataataggttctaccttgctgaaattgtttctttgaaaagccgacatagtagaagacctttattattctttctgtaataaagaatattcagagggaggatctctgatcacatcaaatctctggatattaacagcccttgctatctcttgttagtattttaaaatctgacatcagagtcttctaaggcaaactctttttacatgtctgggagtctatagtgagtaggaaataatagtgaataggaataatgcttttgaaaatcgtgctctttatgaaagttcatcacccatgaaatgtcttctgtttatgaaagaacagcagtgtgagtagttatttgatgtgttctcatgttgcagtatgaacagcaaaaacaaatgtaatattagctgacagatgtggcttaacgtattatttgatatctcagcctgattcaattgtcttaaaaaataaaagttattcactccacaatatatctactcatggggcagatactgaaataaccttactttcaacttgatcacttaatcacctgtggttttcatcctgagatcaggcttatttcacaggaagcagttctttcttgaagggattgaatgaagcaaatgcaacctcattattgatttgagtcacagtgagcattttgtattaaaaaaaaatacaatgttttaggagtggatagacacaattttgaaattttagcattttaaatttaatatcaaccaagttgtaccccacccagtcttatgacattctctacaaaaacaaaaacaaaaacaaaaacaaaagaaaaaaaacaaaaaataatgattttcatagtaaagtagattttggaactaatgcactctatctccttatcctccatttggaaatgctcaatgtacctgagagtgttaaaaccctgtcctgtaataaagaagttctttcattttttaatctaggtattttttaagctttatgtttgcatacaaatagttaaatcatataattctgaggtttcttaacatacacaacagtctccagcctctcttcttttccatttcccattctccagaggcaacacttttcatcttttagctgatacttttggtaactacctctatcttgaaacaataggatggtatggctactccctgagtattttttttccttagctttatctatttacctctcactgtaaaagatgagaatttatgtagctcattcccctaccctgtctctctctttctctcactttctcataggtatgcacttgcacatgcacacaattcccatccctcctttcttcctataaaactatgtcatgattttgggttattgcagcatttagtgtttaaattattaacactatttaagtgcagttggtagctatatcacaaagaggaatatgatttttgttctatttttccaacaacttttggtttctctctggaatttataattattattgtgtgcttagttttctatgtgtttatctccagttcaacccccaattctctactagttgggtaaatctcttctgagtatgttcatttacatcagattttctctcaacatcatctgtttgaagcagtcttgacaggagccttctgacctgttgtagtctggactggaagcccttcttgcctagtataccgccgcccttttgggatttcccttcctcttcactctggggaggtgggcctcctgttgcttcatcctgtgcctacttctttcttgctttactcctttgttttggcagagcatagcctctggtatcttttaagaaaagtgtgcaggagattgatttgtgtgtgtgtgtgtgtgtgtgtgtgtgtttgtgtgtctgaaaatacctttattctaccctctcattgattattagtctatattattcttggtatgaaattctaggttagaattatttttctttcttatgtaaaacaaattgtcttctggcttttaatgttgctgttgagaaatccaaatcaatctgatttatcatcctttgtatatgcctctacttccaccccaaagcttacttccctgcatcttctgaggtttcaaataatgtgactttggtgtgtgtctatttttagtgcactaggcaggtcttttaaatttggcaactcatgtcctccattttcttgaaagatttcattgacgattcctcctttctctttcctcttgccttcaggaactcctttcctctagaagttggacctcctgcaatagtcactaattatcttaccttttctctcctaatttatatctatttacctttttactttacattctgtgagatttcctcaactttatttttagctattatattgtgattttcatttttgctattatacatacttttattttcccagagtcctttttttgttccgcaaatatttcttttgaaatatagcatctttttcttattttatggatataatatcttatctctgataatctttcttttttaccgaaatcatattttccatggatggtgtgtttcctccaggttgagatttttgttgcttgctgtgactctgttatacaaattggagctttccctaaatctctgctaatccttgactgcccgctcatatttaggagtaaaagactagaaagctgattggatgctctgaatgtgtaggtgggcctgttgactgaatgtcactgtagggtaatctggatgtgccaatttcagtatcttgtcttcttggactgatcagatctcctagagagggaacctctagtctctcgactggagggttaaggaattgctcccagtgtatgaggagccaaatcagggaagagggctggggatctcaacattcagaatgtctgcattaattgaatcctcctgttttcagaatactcctcaactatgcatggcatctgccagtccagagaccctgtgattcattctttctaggtaataaacctccagtcttctgtctgaactgggggtggaagcaactacccagcaacacagagtaaggagagacctatagttctagctgatttttaaacatttttaaaaatcaagattaatcttcttaacatatgattgtctctttatctggagttaggccaagcttgaggttaagggcacagacctccaagactaacagttctgcccaagatttctgatgccagttgcaaatttgggggtccccagggccatcctcacttcagaccaactggctataaagttgagagttcacacagactctctcagatttgataatacactagaacaactcatagaactcaggaaagtgctattacttatcattacagttttattgtagcaaaaggatacaaataagagccagccacaggaaggaacatgtagggaagaatctggggctgggagaaatcttccaggccctcagggatgtattacccttctgttgttgatgtgtgacaatgcacatggaataccaccaatttgggaagcttgtctaagcttcaatgtccatagtttttattggggcttcattacataggcatgattgattgaatcaccacccacatggttgcccaaagcctcaaccctttgaccacatggttggtccttctgtctggccagccctcattctgagtcaccttattagcatacacttatcaggtatagtctaaggggcccatcataattaactcagatattcctaacacttgggaaatgccagctcctgggagctggggcaaaggcccaacttttctttagataaaggtaattcttccctacacacccctccatctctacttccagaggtacctggttccatcaatttcaaaatactttaaggattctgaagtaaaaatcaggttggttctttgttctctgtactgctgtcttaagatttagtttttgtgagttggttaagtcatttatcatttattcatctaatttctggcttccaaaatactgtttttcttcctattcttgagtggttatatttaacaaaaaacttttttcagtagtgttagtagggtttctggaaggagaaaaattaggtctgtgtattcagttggccatctttaatcagaaattgcccaggcctctcccaattaattttttgtgtgtttgttttttgagatagggtctcactttgtcacccaggctggaatacagtggtgagatcacagttcactgcagccttgacctcttgggatcagatgatcctcccacctcagcctccctggtatctgggactacgggtacatgccaccacgcctggctaagtttttgtatttttgtgtgtgtgtgtggagatggggttttattatgttttccaggctggtcttgaactcctgggcttaattgatcccccaccttcatctcctgaagtgctgggattacaggcatgagccaccatgcctagccataacttatttttattaacaacttttttgtagaatacttattaacacctggtaaatgctaaattagcaaatacttctatattgctgaattgtaatacaggtaactaattcagacttcagaatctttcaagatgacccttctcttagggctgattttcttcctactttacatattgaggtcacaacatataaatagctacttatcgcttgttgactgtggggaatgtggggctaaagagggatcttttatcttcaatcttgcctatttttacaacgttttaactaatatttatatattactctttaattaatttagaaataattttagaacaagaaaaaaagtagaaacattgcatgaaatgatccttaaaatttttccacttcaaatctataatgctaagattgtgagtagggttaatggataactaaaaatggagaattctttttatatttaatggagtaggtaggacagagtgcagaactcttttaatcattttgatccaaaagtcaaacttgtattcattctctttctctatcttttctttctgggctaggaagaggtttttaaggttacactttgtgttaataaagtctttgcttggaaaagtggatgttgatcctctcataatgctgatttcttatttcattttcttggtaaataagagtgcatgtattgactttcctgtaccattctaggatacaactgtaattgaattattcttttttgacaatctttttagaattcttgctccctgaaagatttattccaaactccataacatggcattctcatccctcttataatatggcagcaacttaccttgtagcttaatctgtttcttggccccatcaagcttcctgttcccttcaacactcaattatctgctgattctcccagcttcttggtgttgacgtatctttatccatgcagtttccccagcctagaattccttcacctcccttccatctctgcttatttaaataagaccctttttctctttaaaaaaaaatttgttttgtttatttttaacttttattttaagttcaggggtacaagtgcaggtctgttatataggaaaatttgtgtcattggggtttgttgtacagattatttcatcacccatgtattaagcctagtatccattagttatttttcctgatactctccctccccctactctctaccctctgaaaggccccagtgtatattgttcatctcagtgtgtccatgtgtcctcatcatttagctcccacttataagtgagaacatgcagtatttggttttctgttcatgtgttaatttgttaaggataatgacctccagctccatccacgtccctgcaaaggacatgatcttattcttttctatggctgcatagtactccatggtatatatgtacctcattttctttatccagtctatcattgatgggcatttaggttgattccatgtctttgctattgtgaatagtgctgcaatgaacatatgcatgtatgtgtctttataatagaatgaattatattcttttgggtataggattgctgggtcaaatagtatttctgtcattaggtctttgaggaatcaccacattgacttcctctatggctgaagtaatttacactcccaccaacagtgtataagtgttcctttttctccacaacctcaccagcatctgttattttttttgacgttttaataatagccattctgactggtgtcagatggtgtctcattttgtttttgatttgcatttctctaatgatcagtgatgttgagctttttttcatatgattgttggccacatgtataccttcttttgaaaagtgtctgttcattggctggatgcggtggcttgtgcctataattccagcactttgggaagtcaaggtgggccaatagctaggagtttgagaccagcctgggcaacatggtgacaccctgtctctccaaaaatcacaaaaattagacaggtgtggtggtgtgtgcctgtggtcatagctacttgggaggctgaggtgggaggatcatgtgaacccaggaggaagaggtgcagtgagctgagattgtgccactgcatcccagccagggcaacagaggaaagaaagaaagagagaaagagaaaggagggaaggagggaaggaaggaaggagaggaatgaaggagaggaaggaaggaaggaaggaagctgttcatatcctttgctcatttttaatggggttgtttttctcttgtaagtttgtttaagtttcttatagatgctggatagtagacctttgttagatgcatagtttgcaaaaattttctcccattcagtaggctgtccatttactctgttaatagtttcttttgctgtgcagatgttgttcagtttaattggatcccatttgtcaatttttgctattgttgcaattgcttttggtgtcttcatcatgaaatctttgcccatgcctatgtcctgaatagtattgcctaggttgtctccagggtttttatagttttaggttttacatttaagtctttaattcatcttgagttaatttttgaatatggtgttaggaagggtccagttttgatcttctgcatatggctagccagttatcccagcaccatttattaagtagggaatcccagacccatttttataagccatctgaaatgttaccttctctagtaaaggttcgcacttatctttcctttactcaggattaatgacacccctggggccttactgggcttttgtttgtttgtttttgcccttcatgtatttgagcatagcctgttggtgcagtaggtgtgagtatgtgtttgggttagggagagagggggagaggagagacagaggtgtgagaaagagattgtttctataaagttataatttccttgagggtgaatatgaagagtcacatatacatagaataccttttatatagttgattttcagtaatgtccgttgatttaaattctaaccactaaatgtcagttgatttgaaatgaatcttgtttcatttcctttaccttaatagcattgacaaaggcaacaactgtacaaattatatattaaagttttacaaatccagtctctgtcatgacaatttcttgaacaatagaaaggtgactgcctaatgcttaaaggtgatttttagcaacttgggatgagggtgagaagtatgaatgctcattagtgttcactgagtccaggtccacatattgatgaccgtgggtgccactgcggctgcctgcctgaagcagtcaaatgaatctctctgtgacaggaaatgactgctgtagaggaggaaagaaaatacaggaggcatgatgactatctgagtcaatctggatatccctgccatgggaagatctgaataattggggagaggggtagaaggaaggtttgaggggagaagatgattgattaagtgtgttatggttgacagcagactgtgttctgggcaagggagttagcgggtatttgaggaaagacccaggagatggtgcgtggtctctaagtgattagcagaatgtaatcacccatctgccgaggggcacagctgtacaaaaggaaatattcaagaggggaaaggagagagagaaacaccagtgataacaccgagatcttttaaattatggaaatctgtttgggctcccctattgacgtgctgtttcccccctggggcacttgcagtccttctcctcactgacatccacttgtaggctggcctgttattgcaagaggattagaaagtgagattaatctggggctactgcagtgatctcactaaacagtgttactctgcgtgagtgctggagggcattggggtgggcagggaaagagagcaaaggaggagaaggcatcaggcagcaattatggacatttccttaggagcatcttacagaagccactttaactttttccctaagtacagatttaacttaatacttggcagcaactctttgcctcttctatttaagagctgaaagccatttaaagtttcccagctcttgacccaacaaaaggcctgggaggtaggcaggcagcaagatttaaaactaagtgacgaactagatcctcattcatctggctaggcagtggcatttaattaaccaatttattaaatttgtttttgtgttttctttgcaaagcccaatctggtatcctggaatcatatacagggtacacctctggagtttctttctccttaatgcaatcaaatcatgagagctaaccttagacaaaaattgaaacaggccagaggatttttttatttctaaattcagtgtctatatgaataggttctatgaagagtggttataaaaatgtaagagaagaaatgaagtgggagaaaaaggaaacttatgtgatgcttaatataattttttctacctctgttctgtaataagtgctatgtagcaagcacatctgttaatttgactagaattatgctttaatcacttgcttatattttcaggataagcagggcacagaaagactgagaataagaatttaggcttagagttgatttacatgatgaaaagactgcctctcaaattgtactcatgataatgctcttacatggaaagaacagtttcttgctgagacagagcaggaatctatttggctgaagttggctttgtcagctagtcatgttaacacagtactattaatttatcctgctttaagattgctggggtttttgagagtaaagtcttgattcttctgaaccatgactggaagcgctctgtccacccaaagactcttttccatagtgatccttgttttggcaactgtctcctttttctcggtccactcatcactgcttgtttgcaaaaggtctgcctatgactgcacaatcctggagcttatacattagcttccaaatagggactgcatagcagccctctctgcacaagagatttaggccaccaagagagtatgaagctggtactctatactggcaccagtgtcctgccagcatggtgcagccccgacactggccttcatattgtttggccacaagaagagaaacaccggggagaggaggagccaaatgattaatcctgaagggccattagggaaaaaaccatttacagtgagtacaataggcaagatacccggcttttctgttcttttatttaagagagaaaattgtaaaagaaaggagagagaggtgggaagctttgatggcgatgtagctgaacttttttgtctcctgatttggtcgaatgaacttttctgatttaaatgtgtttgtttattcaagtcgaatgcattctgctagcgtcaagctccaacccaaaacttgtggacatgagatcgcagaaacagtccttgttagtaagccatccatggcatgtttctataggatgataaatagaataaggtggaaaaacccttttataatttaaaaaaaagccttaaaatcattactgctttcagctattgcactttaattattgcctcttctttggatttgtgtaaaggaagggatttgatggatgttatttttaacagcagctgggataaaggtggtattatcgctaatgctggaaaggtggccgcagacaagcatttgattagggggagggagatgagaggtcactgggttccaaaaagctgtctgatcactcctttcacaccgtcttggagccagagttgtaactcggtaggcacctgtgtgcacttgatcaaatttttttattttcaccatcagaacttgtagtctaagcttttaaaaaaatgtctctgtgactagaaaggaatcttatctcaagatgacttgtaaacaagaattcaaatcttatattatttacagatatagactcatgctcaatttcctgctttctgtttgcattcaaatggagtaattagtttgatgggaaagaaacttgaatagtcctgatgagaacaagaaaaatattcacaaagactgttactatacgtttctacaatttgaagcatttttaaaaaattataatttatctttaaaatcagatgtgattttgttaaaatcagaaaaagagtatgaccatccatatatgctacatttaaatgtgaactactaaaaattgaaaaatgtttgtagtaattgcttttcatgaaaatgggcaattaatccattttatgctactacccaggcttgctgtgcttaatgacacatataccattcttttcctagtggcaaaggtatatgtgaaggaaagtaaatagaagttgaaatgaaacttgagtaaagcacgctttgttttatctctatgggttatagaaattctcttgtgtgtagtctgatcagttgaatgtggaaacatagcatctagttagaagttttatagttacaggaaaattttgctttggcagcttgaatgtaagatttctttgtacttgactcatataggatgcacatcttctcctctccagctatgcttttgtttcatatttttattttattctggtttgtcttctacatatataaccacatctgttttgtcagtcttaagtggcaaacttctagaggggagaatctcccatgtttgttcctctgggaagaattaacaacacaaaacgtgtaaataatgacttacaaaacgctgttttcatgatagtaatttattccttttcattaagtaggacacatctatcaataatacttgtaggctttgacaaaatggagaaccatcatttagtagctacacagctctcaagataggcaggaaacttccaacagctttgaaatctctggataaataaccctaggcaatcacagattcttagggcaaatgggatcctattgactatctagttccgttttgtcattttacagatgaagaaactgaggccaagaaatgtatggaggattttgccccaaatcatataaaactgcagtgtgcttagtgcgtggactgatggtatatatggaaatgttgcaggttgggacataagctaattctttagtgtgttttttagtttacggtaggatgtgtattcccaagaaggccctgccttgacttaggagtttcagagaaaacacggtgactaagcactgttttttcagttgtgcagggctttggggcagggttttgcggtgagtgtgtatgtgtcagtgtagcttaaacagttcattgtatgctgccctggctcagcattcagttttctagtttcagtgactctggcttcttagaagagggaaccactgtgacaccagtgtcttcatttataaccagttctaagttcttgacctagaaaccttattaacctttatgtatcagattccttctatagcattgtgattctaaacttacccccagagggcagtgggtcgattaataattttttttaaatattaaaaatttggggctgggtgcggtggctcatgcctgtaatcccagcactttgggaggccgaggtgggcggatcacgaggtcaggagatggagaccatcctggataacacagtgaaaccctgtctctactaaaaaaagtacaattagccaggcatagtggcaggcacctgtagacccagctacctggggggttgaggcaggagaatggcgtgaacccgggaggcagagcttgcagtgagctgagatggcaccactgcactccagcctgggcaacagagtgagactccatctcaaaaaaaaaaaaattggagaaattggaatcagcctgaggctggggtatggtttatgaagaagtggtatggtagctcactcttcctggagttttatccctctcagtgaaattttgttatcttctgattgttttttgttttaatagctgggtctagtattattattacttgtaaaactgaatgcaagcatggttaaaaatatggggtatctgccttatattcatgggaaagaaaaaaagtgtggggtatggatttctgccttttgcattcaggtggcgaaggctgttgaattgaagcctgaagccattctctaaggcaggtatcaaagtgataaacctactttataacatatattttgctttttgcaaataactttgttttaaaaatttatctgtaattctcttttttattttttattttttgagacgtagtttcactcttgttgcccaggctagagtgcaatggtgcaatctcggctcagctcactgcaacctccccctcccgggttcaagccattcttctgtctcagcctcctgagtagctgggattacaggtgcctgccactacacccggctaatttttggtatttttagtagagacagggtttcaccatgttggctaggcaggcctcgaactcctgacctcaggtgatctgcctgcctcggcctcccaaagtgttgggattacaggcgtgagccaccacgtctggccttctcctcaccattgaattcaaaagttagatgcctgagaaattagggaaaaggattacactgcagtattggaaagattctgaaaaaatatgtcataggagtaacttagtcttaaggcttttgtcaactcaacaagtcttttttatttccactcctcattcctgtatggaaagatacatgtttctagtcaaattggaagcattttaaaaagtttcccctctattttggtatgtaaaaataattttgcttttctttttttttgctgaatatttgttactgtacaaatatgaaccactttttgacaatcacatttaatttctgatctttaggtcagtcacctttcatctttggggaaataacaatataaactaacttgaatttgtagaacccgaaaaaaaagtataaaagaaaaataaattcattgccttgagtagaagaagctgctcttgagactaaaaatagtgcttatttattttaaagtataagagcctaaaagttgatattttatactagactcgttccagaagaaagataaatttaatagctggataattaaactaattaaattcatcttaaaatgccaccttactttttgatgaattacacttatgttattttaacttatttggttaatattttactgtttatgtatttcagaccaatttattacccctaaaattccagaagcctctaaaaattccatataaccaaatattaatgtaatttagattgagagttaattagatctattcagtacaatccatgatttatactttctaggaaagtaaagatttgggattgtcacaggttattatttaactaacaaatcatagaaaggagcaacatctcctgaattcagctcagtgttttttgtgattagaacatcttcccacgtagctgtcccacgtattgaatatgttgattttatagtcaaaatgatgtttgaatatttctagtagaaaagcccaaaataatcctggcttgaacaagatagaagtttggttttttctcacataaaagaagtacagagcagcaatcagacctggtacggtagctcctccggtatcaagtggaacccgtgtttctaccctcatgctccaccgtcctctacccgtcatacgcaaaggcctctctgggtctgagttgccagctgctctagccatcaagtccacattacagcctggaagaaggggaggaaagtagaagggcataaagggagcccctcctaattgagtcagctccctgtaagcagctctcccagaatttcaacacaacaattccactcattggccagaacatggccacacctagctgcaagggagatagggaatgtagttttaaattctgtgcaggaatatgaacagctaaaaaccaggattttgttactaagaaataagggaagaatagatgggggcggtggggggagagtagtcaatatcacagtggttttatgttcatattatttcctggctcttggggctaccatgtagaaaatcaaaacacctctttctgtttttgttatgagctatggtttcttaatttagaaatctggcttaatttagaaatcctgtttcttctgtgaagtatcatttctttatttggcaatcttgactgactcttgctttcttctttcctcttgcctttcagctgttttggaaagaagtgaggtttagacttctccatgttaaccatgagcgtgacactttcccccctgaggtcacaggacctggatcccatggctactgatgcttcacccatggccatcaacatgacacccactgtggagcagggtgagggagaagaggcaatgaaggacatggactctgaccagcagtatgaaaagccacccccactacacacaggggctgactggaagattgtcctccacttacctgaaattgagacctggctccggatgacctcagagagggtccgagacctaacctattcagtccagcaggattcggacagcaagcatgtggatgtacatctagttcaactaaaggtaaggcaaggtctgtgatcctctcaggatagaagttttcaaaaggctgtggcacctagagactgtgttctgtaatttccagtgaggaattgtccaggaagaaaagcacagtaccaggtttcaaaccattatctttagagataaacatggaaataattaattcttctctgattttactacatgtgctgattatctagaatacaactggcctttggtgatagtgcagagaaatggggaaagggaggggtatttttgtgcagtgttatcaaaataagttacacagaataaaagtatttaaaaactcttacaaagggtttaataaaagactcttataggtaaaatatcaaatgcagctgtgattgtgagtatttgtatgtgactgttatcttcagttgaagctgatgctgcctttgtggcaaacaatgaattctgacatagtagggaagggcaatgttcttttacaatgagttgtttcatccaggcacaatgcttcatgtagaacaaaggtgattttatgacaactcatctaaagttcagacatttaaaaaaaaagtctgtggactcagaagccctttaaaagcctgactgttggcgataatgaaatggagttgctagtaaagagtactactaatagcgtttttggcctagggacttcaagataaggtgaacctcgccctgccatagtcactcctctctcccaggtccttgagggaaatacacactcaggtcagtgacctgcagagcaagacaggtttataaccaatcagggcactggccacaaaccccatggtaaatttctagtcaattagaagtaacactaaggaaacttcctttacctaaactggttcatcctaaataatctgaaatgaaaggtcaaacattcttggatcttaacacttaaatggtttacaggatgcagccatcagcctgagtgggaaagatgagcacttaaaatgaagcatagagcctagagcagagcaggctcagccttctcaggctggttcagcagatccagagcccagctgccccattacagaaagtgttcaaatgagtgtggtcgggggagagaacaaaagagccagaatcttaaaggtgactgggcttctcccaggttgagcaggtctagtgtctgatttctacaggttattagggaaaaaagtacaaaaaggcaacagagagatggctaggaattagcttcaacagaatgcaaaccccagccatctttctgctgttgcagcagggagtgatttgactcagtctgtgaaacatggtttgtataatcagaatagcaggtctccaactccttgaggttaaagtgaaatagaaatttggaggctctgctttgcccccttcccttctctgtcccctccaaggctacccttacatgtagctcccataagtagatagggggttaggtttataaggaaagtcaactactgctttctggaatctttcagacttacatagaaaaggtggggacaataaagggaaatatctttagaagtctcagtaaaaaaaatgtgttgttaagggctattaaaaacattaatgagtcaattaactttattgaattacattaacaacttggaagtgaaaatttaaattttagttccaaataagaatgtaaagtttttgtacaattaacatagggttatatttagtgtttgagaaaccaactctagggttgtatgtatttttctcattggaactgcctatcacgttcttaccttggtcaaaaggtatttcacacccacctccatcagctccatcccttagtgtggtctgtctcccctgctgagaaaggagccccaggagggcatgaagtcaacacagtaattacatagtagttactcagtcaataactattaaggggataaatataaattgtcctatgttcattttatcctaggatgtctatcatgacttttcggggtactagtttcattaggttacttaaccaatagagcctttccacattgagttcaaagtcaaggagctctggttactgcatgtggcctcaaaaaaggtctacacaagtgtttggttatatcgcttaatctacttagttaagtttctcttttattcgtataatatttctttattccaccaaataagcactgtcatgcattttttcaaaaatattttaaataaatatcactttttctgatttccacgttgatcataagaataaacgggaacttgggcacagagttttatatgtggaaacacaacaaaacaaccttgtagaagcagctctcaactgaggcctttggcaaagcagatgggcaggcccagactggggatggccagctgtgatggggcatcttagcttggctcctactaccttgataagttacccaatttattaatttacagtgaaaaataaccatctcaaggctgggaatgcccatggctttgaagatcatctaggcacagataattgcctaatttatatgttcatctcagtgttttcccaggagccccagctgcctaacttaatctccacttgtgtctctagtgggcatctcaagcccatcaaagagctgttaatcctctcccaatcttaccagtttcagtaaacgtcactactctgttaagccaaagcatgactctccactccacatacatgtctatcaacaagtcctgggaatccatctccaaaatatgccctaaagttactctcttctctccaacactactgctgccatcctagtcaagccacatcactgcttgcctaggctacttttagaactttctaactaatcttgctgcttcttttacctttagccttgcagtttattctccacccagtagccaatgggatcttttaaatacgtaaacaagcatggtgactcaagactatgatcctagcactttgggaggcagagatgggcagattgcttgagcccaggagtttgagaccagactgggcagcatggtgaaaccctgtctctactaaaaatacaaaaattagtaggcatggtggtgtgcacctgtaatcccagcttctctggaggctgagatgagagaatcacctgagcctgggaaattgaggctgctgatgctccactgcactacatcctgggtgacaaagtgagactctgtctcaaaaaactaaagtaataaatatgtaaatgaggtcatgtcacttccttgcttcctattggacttacaataaaactaaagctttttcctgtgactctgctcttggctgttcctctgatcctggctcctgtacttttctccttgttcataaagctccagattcactgtaagttccaaagaagcattgggtttgttcttgtctgacagcttttcctgttccttctgcggagaagctctctttccccattgttacatggcagattctggatcctcaccaagctatcagccagagggacagtcatgtttaatatctggagatgcaagcctgggagagggttgggcagggattggcagtgaggaagtagggtctgtgctgtgtttgatgaggggcaagcacaaaaaaagaagctactcattacctaacttgtctacacacttcatactccctttcacactgctggttctaagtcttttcatcatgctcttctctaccatcatgtcaatacataactttttaaaaaacgtagttggaaaatgcttttgaaaaatgcttagggtaggctctgtctcagctctttaattaaatgtccttttttcaaataagccattcctgatccctcttcttaaaacccctgccacccagccattatctagtccatcacctagctttattattattattatcattatttgagacagggtctcactccgtcacccagactggagtgcagtggcgcaatctgggctcactgcaacctttgaccctcaggctcaagagatgctcctgcctcagcctcccaagtagctgagactacaagtgcatgccactatgcccagctaatgtttgtattttgtgtagtagagatgggatttcaccatgttgcccaggctggtcttgaactcttgggctcaagcgatcttctagcctctgccttccaaagtgctggcattacaggcgtggcctttattatttttttaatggttcttatcactagctgcagttatttatttatttgcttgtttgtgttttccctaaggacctgagctgtcaagttttctattgtatgtctgttgtctaggacagggccaggcacttaggactcaattcacacctgttgttgtataggtgagtccaagcctatgtggtcagtgccttctttccccatagacaggcttgcacagcaagtcacataaggaaggctgctcaatgaggattgaattaggacaaaggcattggatgaatcaaggcccaatatgtttggggcattgctctcccactaggaagggtctgtgagtggttcagaaatctgggggatcttgtctggggagtctgcccaggaaagtctgttcttcttctgtaaatggttgtgcctggcccctctcacatccccctttttgttgtactccttctttggtaatgatttcggttaataagcatactctcaggtcttctaaacccagagacactctttttctttaaaagtgattttatcttctggtcattgtgttgatcctaaagtctgtttcccagagaccactcttatctcccttatttccaagttcttaggggaaattttacctccagaatgaactacagacaactgttataaagttcccatgggggagtgattattcttgagagtgaataaaagcagagattgaaaattggaaacaatgaaatatattatactgagtacttttttgcatcatttttaaaactgaaaatgaaacctacatattttgcttcttagcttccagatattcttcagtaagaagtatgagaaaccagctgaaccaaatttagaatctctccgccttctttggattcagaagctgtgctgtacaggaaaaccagatcaagaacctttaaaggttttgattttaactgagacctctggtttgggtgaatgtatttggttgctaaaaaggcaaagtaggtatctctgcttcctgattaacagtcttctcagggagaatattatttgttttcctggaaacgtgatagcaggaaagaggcaaggtgtaggctagctagcataggctaaatgatatggctggataacagacagaagccttgaagtggctttctggaatcagctcccccaaaacccacattaggtagattctgtcctaagccacctccacatgagatttgggtctgtatctttgattgattgtgacatgactctcaaagttagagtagtcaacagagactctgtttacaagatgttctgactgggctgtacccagactgagatgtctgggacatctgaagttaatgcacatacccagtgatcacatggggtctggagggcctactgggaaaaaggattgaatcctctccacagctgggatttggcaccatcagatggaccttatggacagaagatgttggaagtccaaggataatggggctcctaggagaggattctctgtcaccatgggacaaggagtctgccccagtgtggggaggaaaggggatggtgagttgtggtacagtatgttcccaggcctggaacctgggctggcaccagggcagtgtggataactaatgaggggaaagggctatggttgtgacttggaggacctccccagtggctgaagccaactttccccttgttcagcaggtgcaaaagggaaggattattctctttctcccactactggagcataactagtaaggctacctcagatggcagtggtgccaccaaggtgacaactgtggtgtctagggtccatagtcgtgacagtgagcaacagccagggttgattcatgggcatatctaaaacatgcccttggattctcataaattcttgataaggggaaggaactctgagtggaactaaacttctgacattaaaagttactggctcggtggattctgatcttaatgttaacttgactgtgtgttaaagcccgaagcattcaatttataccatctttgagtggtttccagcacatcttaaatataataagccctggtttaagattgaagacaaaatatctttcttttctgcgaagagtagttattttcatttttgccctttagatcactatttttcaacaaatagatcttaacccatttagcaggttgtgaaatcagtttagtgaaataaagagctaaacaatgaattagaaaaggatttcatgaataatgataagtgctatgttgtaaaatttggttttctgtccttgcgatagtttgctcagaatgacggtttccagcttcatccatgtccctacaaaggacatgaattcatccttttttatggctgcatagtattccatggtgtatatgtgccacattttcttaatccagtctattattgatggactcataggtgggaactgaacaatgagaacacttggacacagggtggggaacatcacacactggggcctgtcatggggtggggggagtggggagggatagcattaggagatatacctagtgtaaatgaccagttaacgggtgcagcacaccaacatggcgaacatatacatatgtaacaaacctgcacattgtgcacatgtaccctagaacttaaagtattaaaaaaaaaaacttgatttaattaaaaccaagttcttggtcatggtgtaaaaatgtatttttttgaatcaacgccataacagtttgatagtgactgctttaggccattcccaactttcttcaagatctttgatatatactttaattttggaacatattatgcaaggaaatgtaatctggtgctgtttgtgtaacattattgttttaattcttatatgggattaaaatttacacgaaatacccatcaaatcagcaaccccaaaagcatatcccaaatctctgaaaattggaagatgaggttgatgtatttgttgatgggtatgaggatggtaacatttattattttcccaaagcccagatttatggctgtaatcctttttttggtggatgggtgctatgatctcaaaattcgtatgttgaaacttaattgccaatgtgatagtattaagaggtggggtctttaggatctgattaaataataagggctctaccctcatgaatgaaattagtgacctcataaagaaaggttacagggagctacggcagcaacaaggtgccatattggaagcagagagtaagctctcaccagacacagaatctgctggtgctttgatcctagactttccagcctccaaaccatgagaaataaatttctagtgtttataaattacccagtctaaggtgttttgttatagtagtctgaatgactgactgtacattttccttagggtgtcttcttagggaagttggatactagtggtcaagtgtatagagagtgtggtttcattatggtggttattagtggaaatgctttttctacaattagtgctaagattgtgtaagactatttggtatcatcaactaataaaaatggttgaaataagaaggatgtctgatgtttgaatggctaattttagatatttagaagacccaattatgtgggaaaaagtctatctcaattaattgttgaataattatctctctctctcttccccatccaatgctggaaaacaggctaagtgctaaataaatccttttttgattgttgaatgattgatgtattttcatcatgatttggggagatgatataagcctcagacctagcacctgttttggactacttatgaacactcttgattaagatatagaaaaattaatgttggtggttcctggcacattatcgcagaagatctttggctatacatgaaccttagccacatgcactaatgtatttagagctcagaatgagagcattatttgtcaaggtggctcagtctaacagattgtatagctgtgtaatttttcattagcaaaagtagcatggaaactgaagattaatacaggttttacaatttgaaagaaataatgaaaacagtttagagaaagtaatacatttcataaaaggattttgagaaaaatctaaagaaactggcattactttgattagagaagtgttattggggttttttaaagatgtttgtttaataatgtcaccatgagctctcactgaacaacaatagctatctgtttttgtggtctcacaggattagatatttttaggggcatccaccagaggtaggatatgagttaactctttccttgccttgagagttttcatttcaattgcattcatagagtatctaatatatactaggagtcttacttatagtatcttatttaatcctcacaatcaccctctgttagaaatgaggagactgagtctcaaaaggttaagtgatcaacttgggagtcaaaccatgtattttgagcctcaagtctaatattctttctattttggtgcactggcttcatacccttgtacagatgtgagaaatttgagtggctataaagcataatagttccggctaggtacagaggcatgtgcctgtagtaccagctactggggaggctgaggcaggaggattgcttgagtccaggagtcctgggcagtagtgctctctgccaatctgatgtccacaccaagtttggcatcaatatggtgacctcctggaagcagaagaccatctggttgcctaagaaggggtgaactgaaccaggctggaaatggagcaggtcaaaactcccatgctgatcagtagtgggatcacgcctgtgaatagcccctgcactccagcctgagcaacatagcaagatcccgtctcttaaaaaaaaaaaaaaaattctggttttcttacattagacagttaagaggaacggatatgagggtggggggcttattttattaagaagatccaacctgtgtgtattttaattcatcataagtaggaatgtgagtgatttgaaatggggacatagatgaagtcctggggtccctttgagtagggttgtcatagctaccttgaataaggtacctatgctgctaccttgcccactctgctgtcttcaaaattttacatctcaaaagaggggaaacgtaatagaattaaagtgaaaaggaagtaagatgtgaatgactagtatcctaacatggaggtgagtggaacaagaaatgaacatctttaatgataaatgttaacaaatcaattgatttcaagctatggcatgtgttagagaccatggttctcacccttggctgcacagtagaatctcctgggaagctttaaaaaacccattgtccggccaggcgtggtgtctcacgcctgtaatcccagtactttgggcggccgaggcaggtggatcacaaagtcaggagttcaagaccagcctggccaagatggtgaaatcctgtttctactaaaaatacaaaaatttgctgggcgtggtggtgggcgcctataatcccagctactcaggaggctgaggcagagaattgcttgaacttgagagatggaggttgcagtgagctgagatcacaccactgcactccagcctgggcagcagagtaagactccatctcaaaacaaaacaaaacaaaaaaaaaacaaaaaaacaaaaaaaccccacacaactcattgcccaggccatgttccagagcagtcatgtcagaatctgggtttggacccagacatcagtcttttaaagactccccaggtgattccattgcatagccaaagctgacaacacctggaaggagatgcttcagagcagagggcttttggatacatcttgcttgttccattcattctccctttccttccaaacagacagccaaggatttaaatacacttttttttcccctcaggagcgagggcttccacatgatttgtttgaacttcttcagtttttcaagtaacttcataaagtcagtatacgcaaagggaaggaagggagtaagtacatgccagatacttgcctatatactttaaatgtactatcttatgctgcccatctatggtttttcgggttacatatgaaagacacctgttgaagttgtcagtgtaccacctgcagggccttatgtggctattttacatcgtcatgagagacacaaacatctttgtataggcaaaggtgttttggatatgaaagacagaatggttcttttcttgtctggagccaaggcatgatgggaggtatatacatattattgagcctggtggaaacacattatgaaagaccacaaaaatttaaaatggctcagagaagtctggtcttgattaaggtagtcataaagacacccacaaataaagcaataatgtggtaaaaaaacaaaactgtgtcttagggtgattttgcaagtgtgttcaggttagtctggaaaggggagagatgtgagacagttatgaggctgttgagtaagtgatgcagagtagctgggcttgggtggtggaagtgggaagcaagaaaaagttcatcagaccagagagcaagcagaggagttagaggcaattggttttcttagtttaatttgctctcgtcacgctcaaactgaacttatatgtctcttgtcacttggtattagggctgagggttgttttttctttgtataaatgtgaatagaataaaaaggaactgaatagaaatctcttctctgtccactttaacaatgtggctgttatcagttggctttctggtataagctgcttctattgttctgtgatactttaatgcaccatttttcttcattatttgaataaggaagatttgccaaatatatcattaaatggagaaggaatatgtgaaattcaatatgggaagtgatctgctgttctctcaagaaagagggaataattataaggtctactggagaatgagttcagaagtctgacaaactggcctttggcaaattatgaagaaggtcttcagtgcttcttgcattttttcctcttttccaaaaatgtaatttctattaaaagcctctataaagtaattcaagcagtagtattaacaacagctgcatcttcaacatttacctctgcaaagggaaaatggaatctatttctgtaatagtgagagtcaggcatgatgaggagagagattgtcactaagggtgattcttgagtccttcaagtaataccacataggagactacctcttatgtatgtatctatgctcctatcttggaagtaactaggaataaaatgctgtttcataatacatttaagtgcagtgtttacttctgttagcttctatctgtcctcccacagtccaaatgcttgggcatggcctctaagttccttgaaaatctagaccagctggcctgttgttccttctctcgacattttccttcctgcatctgtaacaagccatgctcattcagaaattcataccttggaatatggtttcttctctgtctgggaaattaccttattctttaccccaaacttctctgcctggaaaaattgctgtacgtactctgaatgatagctaaaatgtcatctgcttggttaaaccatcttgccagctaagctggttaatccttttgtgggtttccggttcttttctctttttttgagatggagtctcactctgttgcccaggctggagtgcaatgatgcaatcttggctcactgcaacctctgcctccctggttctaccaattctcctgcctcagcctcctgagtagctgggactacaggcatgtgacaccatgcccagctaatttttttttgtatttttagtagagacggggttttgccatgttggccaggctggtcttgaacccctgacctcaagtgatctgcctgctttggcctcccaaaatgctaggattacaggcgtgagccactgtgccctgccagttctccccttattttcatatggtgtctgtcataacataatcatagacacagcattcaatttgagatattactactccagctgtttttttttctattccataagtacctatttttgttgatacatttgtatgactttgaaatccagagacaattagcatacaatttgtttcctttattttgttgattaaatacatacaaactaacagactttaaataattggcagatcttccttagggaaagctagctctcatacctatactggaaatctgagggtgtgaatcagattcctgggcgtgctggacattttgtatttaggaatgatttgagggagaaagcctcacctcaaaagttctattggcaattttatatataatgcatcaaagaatatttaaaggtaaattatgttggttgataacttgatgtcattaccataagaagagattcaaagatggtgtattttagcttatttgaattttctgtgcaatattttgtatagacaaatgtaggatttgtataagtgggtacacagttacctcattataatggcaaaaactatttgttaaataccatatggacttgatgtgctcaattctatataaatgtgttaattctggtagttatcccataatctgttggattatgctcttttataatgagtaacgagctaggtaaataaaaatgaatctaaactttgtatggattaatacagaagatgtcattttgtatatgtaggatacaaggtttccttttcatttttctcctttctgcttcttgtgatctgcatgtatctcttcttagtagttataaacctgagatatctgtatttcaaaaaaaaatttatttttactatcatagattaagttatagacatgtaagaatagattgttagaaaatgataagttttcttagagctagtagacatctgtttttttttttaattttcaagattattaggcttagatttcctatagatctacaagcaactattttttttgtctgttacgggatcaaaagtataaatattttataactgtttaatgtagttactttaaaattcagtacatctttaaaaatgcaattccatgaatgtgttgcaggtttccagaacaagtttattgacacttaaagcacaaggctttataaagacaatgtatttatttgatagaattttatggtttctacttttattttaaaaagcaaatgtggtatttttttactcatcacacttaaattatttgtttgtggtcttttattgattttttatagatttgttacccaaagatagcaaaaaattcttattctgaaatgaaactatttaagataattatgttttcctctcctcatgttatgaccccagctaggcatcacagtatgaattccatatttacaactattctcagccatatttgacttaaaaccagtgattcaaggcctagcaaacaactcgtctctctacttaaaaaacttcatgcacactcagcctgcactgctctgagagcaccttgtctcttgatacataatttagcaccagtgtttactaccttgcattctcatttgcttttttcatatgttgttttctagtttcctcaaacaaagctaagagctttttaagggcagtttctcctacttttttgtataaaattgcaaattctattttggtcaactaattgactgaatcctcgtgttatgattttaaattttccttctgttctttctaagtggcattggcgtactaaaaataaccataacttcccaaggacatttcattcacaagtatttaaaaattagtgtaattgttcatagaagctttggagttaggactcggccaaaaaagcagaattttcctggaattaacccagagcaaaatttgacatttttaaacaataagaatgagatgttgggtaaccttaattaagtttcttcaaagatagcagactctagttaatacgacctaaagtttgggtcaagttaaattttgaaaccctttgaaagtcttttattaattcaactcttcaaaattatcagtgtatcacataatcatgtttgagagaaagtagaattatgcatctccctccatcttggactagttggcaacttaatcattcatttacatccattatctgtccaaatgagaggatgtgctcactcatggccttctctctaacagctcctacagtgggagtcttggtttcaaaggttaaaacaagtacaccgacatatttaaatcagttacaaatctacccatgcacattgctttttctgtggtaaggacagcaaatgggaagaactagaaatgaaatgcactggacattttgattaatgatgccccggaccaaaggtcctttttcagggaaggaaaaacatctataaatgaggtaaagttgagtgattttcatttgtagttggataacaatacttcagtggcagcttctctttgttctcaattgcctggactagaaccaaaatctggcatccacatcttattactaactttataacgtggcaatgcctccctttcctgggtctcagcttcatcactgtaagcggagggaactacagagtaccttctaaccctaacatttcgtgacaataaccaagtacaccctaagcaaactgtaaatttgttgccaagtttgtggccttgatccccaatctattctttctgcatctgggtgaggaccctttcttcctcttaaaatttctcaagtcctttactcttctagtaataattcgagtgagctacctatcctttatgctttgttttcctcaaagcacatgaattatctcagttaatctttaaaataatatctggccctctagtgtgggacctgaggtacaaagagggtaatttacttgcctaaaatcacacaactacaaagtggtagagctaggaataaaaactaggtctttctaatcctaaagtgtgtgttaacctttttagattggtaattttttgagaatatgatgaaaactataaactgtcttctcaagacattgcacacatgtgccagtaatattttgcatactatatcaagagaccctttgaaacccattcatgggggactccaagttaatacctgtagtatactatatcatattgctttttcagtttacttttttcctgatttcaaaatggaaagatcctgagagagtaagggagatattagcaatgcatacttaattctacaatcttgattctacaagggagatattattctaaagggagatattagcaatgcatacttgattctacaatcttgattctacaatgtttagtaaaagatagatacctggattcttgtttgcattaggtttcctcacatacatgagcatcagcaactttggggaagctctcattcccaggtagaagatgagattgcaggagagatcatcaccctgacaaattaactctccagtctgctctacaatgtccgaatttcctttaccctctacaaaggctttctataattagaagttaggcattaaaaattaatgtcattgggagaagtaatgcattcacttccatttacatcaagaataaataccaggctggtgcagtgactcatgcctgtaatcccagcactttgggaggccgaggtgagtgtattacttgagatcaggagtttgagaccagccttgccaatgtggtaaaaccctgtcttttctaaaaatacaaaacaaacaaacaaaaaattaggcaggcatggaggtgcatgcctctaatcccagccactcaggaggctgaggcaggagaatcgcttgaacccaggaggcagaggttgcagtgagccaagatagtgccactgcactccagcctgggcaatggagctagactccatctcaaaaaaaaaaaaaaaaaagaaaaaggaaaagaataaatactttcttagaaaagattttttgatggagaagacagctctggtcccataaagagggaagggaaatgcttcagaaagaggccctgccaatcaactgccagtttttactttgagtcatatggcctgaggactgataatctaatttaagtagaacaaattagattccaagcaagtaggtagtaactgctaaaatagtggaaggtattcttgaaactagattggggctgtcttccagaatttatagggcatattgagatgtcctggccccttttcttgatagtggttaatttagttcaaactgcctcagagatttcagaagcacactgagagcaataaaagcttgatgcctctttagtgtcagccagcttttaatggctggaatgggagttcttcaaattagtgatagtcagttgtcatgcctaccctcgtgcctccttcttgcctgctggctggttccaggagtgaggcagagtggaaagcccccaggatttggagatggcaggcctagttctgctcctgtttctgctacttactagaagttggacaccaggcaatttagtaatttctatgaacctgaatttccttagctgtaaatattcacctctgaagattgttgtaaaaatcaagatcattctttagaagaattttgaaatttctgatgctacatgaaatgttagtagttctgattatgattctatcccaatccaaatactgcttgctgattttgtgactgtggtagggtgagctgggatgtgtgtgtgtgtgtgagagagagagagagagggagagggagagggattgatttgtggcaacttatatatgctaccaatcaaaatacactcttctataatttggttttggtcattaaaacacaatgaaatataggaaatatagcctcacttaacaaggcctgcaaggggcagggcatattttgtttgaaatttttagttaacacaatgagataaaaataagtttgactctccattgtactatatttttattgtgtattagtacactttctctttcaaaaatcaagtgcatagtactgaacatacctaaagctttctcaggattaatgatactgaagtttttgaagtcatcagttataatatcattttcacgtaagagtaacagatttggatgtattaagagatttatactgcaagtttgctccttgcttcaatatcttttcttgaggtttctttttttccttctaaaaagtagaaggagggaggaatcgaattaattgagggccttggttagttatagttttactgttaagaatgctacaatttgggccaatttggtctttaagaaagcttctttaaatcccaatatagaaaaaatcccttctatgtgaatatgtttactatatcatttataatagtaaaatgttgaaaataacaaaacgaggaaagtggctttattattatgttttatctatctaatatctggtagtggaaaaaattagtttactctattgctttatatttgcaagtggattggaatttggaaatacttatgaacaaacaaacatgtctcctactttgtgcaggtctgaaagtcagattagcctttagctagtttgcatgattcatcaagactaaattttatactggctggtatacaagaaaataagatattttgttgcttcagtaattttgatataatcaaaactcataagaagaaaacatgagcttcctaattactacatattcacttagtgagttgaataatttattatccttttttaaaaaacctgatcctactttcaatgttccagttcccattttctgcttccttccatttatttttctttctggcctgttctgcagagtttgcacaaaagatatagctttatttgtatacagctatttatttcctagtatgtggactagtatctaggaaacttgccaaattagcatagttatgccaaagtacagaaactatgtgtataaaatgtgcacttgggcctaatattgcaggcattgcagctttttagataaagctgtcgttgactaatttatttctgtatcttctagttgtctcctagacacaagttggttgtttttgttgttgtttaaacaaaacatttaatattttttattataaaataacacataaaatatctatgttgactgcattgcccaatatggtagccactagttacatgtggctatttaaatttaaataaattataatgaaataaaactgaaaaaaatgcaatttcttagtcacactagccaccttttaatagtagttagtggcaactgtactggacagcaaagatttccaaattgtatagaattctattggatagtgctgattgatgtcttaaccctacttcctccaccccttttctccaaatcaaaggtaagttgtggccatatttctactttaccaactataactctatgctatcatttttctttttctttttcttttctttacatttttttttttttttttttttttgagacatggtattgctctgttgcccaggctggagtccagtggtgcaatcacggctcactgcagccttcacctctggggctccagcaatcctcccacctcagcttcctagctgggactacaagcatgcaccaccacacccaggtcaccatgcttggctaatttttctatatgttttgtagagatgggcttttgccttgttgcccaggctggtctcaaactcctgagctcaagcaatctgccgaccttggcctcctaaagtgctgggattacaggtgtgggccaccatgcccagcctatgctataatttttaacgctgcatattaatccactgcctggctgtgttttaatatattttcctagtctcctattcatggatatataggttgcttctgttttttccctattataaaaagtgtggtgattattttctttgagaatacatctttgtatacttgtctaaaatatttaaaattggaattgcttagtcagactgggcacagaggcttatacctgtaattccagcacttggggaggctggtgagggagaattgcttgaggccaggagtttgtgaccagcctgggcaaaatagggagaccctgtttctacagaaaaaaaaagaaggaaaaggaattgcttggtcaaaggctatgcatgttttacattttagtacatgttgttgaactgtgctccagagaccatattaataaacaattccttggttgattgtgaatattcttatgtactggggcaagtgactgaaattctctaagtctcatttaatttttctgttcaaaataggaataatagtatctaccatttaccttactaggtagctgtgagatacaaattaaataatacatgtaaatacttttaaaaaatgaaagtgctactgtcacgtatagtattcatactatgaagccatccgttgttggaaggatgaaagtcagagaccctgaatcctctgtgatcttagtttaacactcaaaataaggaatggtggtaacatgagctttaaagacttcctcatgggaaagagaatcctagcttcagaaacataatttattattgtagacataagcacaccaatatgaatgtaggattttccattcaaggacatttagagaagtgggataatttttgttttaatctgagaattgggtaacatatcatccagctccactcctcattctacagatgagaaagcagaggccccgagaagttgaattctcatgttcaaactgctgacatgtggcagaatctaggttagacctcagccctctgaccctctatccagcgtcctttcctctatatcccacagctctaatgatatagtcacgaggtggcgggattttttttctatccctcagatgaaaattaagccagtgttgtaatctagtttgataactattagttatctagaagtgtattcttaaaatcaatgcctgtataggcttactgggctatttgaaagtcaggctactaaattcttattagccacttgaaattcctgtggagataatagaatttttcttttctttttttttttttcttttcttttttttttttttttttttgagacggagtctcgttctgtcgcccaggcgggagtgcagtggcgcgatctccgctcactgcaagctccgcctcccgggttcacgccattctcctgcctcagcctcccgagtagctgggactacaggcgcccgccactgcgcccggctaatttttttgtatttttagtagagacggggtttcaccgtggtctcgatctcctgacctcatgatccgcccgcctcggcctcccaaagtgctgggattacaggcgtgagccactgcgcccggccgaatttttcaaactgactctttaagccaaattagaaataaaatctttttctcatgaatggcatccaagttagacagcattccttagaagtgaattatttggtaaagctctcagagtctgtctgtctttggctcatctctgaactttagttcatttcattttatgactttacatgaagaaaccatgagtacggatggcctcaagttatgcaggagatttcagtcagcctgcaaaacaaaccagatggccaagtcctctcagaactgtctgaacatgtctcaaagtccattccctgaatctatccccaggtaccttcctcaggatctctcttttcactggcattttaaaaaatatatctgatagaagctagcaataaataactaagagaaattgagattgatggcccttttatttctttgcatctaggtcttgtatgaagcagcagagcttttatatttagaaagggaacacccccttcagcgagtcatgtgctagaacacaaccgatgagaatgcttgtccttctatagcaaggctcgcaaggtttctgggcagagctcagcttctcatgtggccatgcctgactcccgtgccacaaggctttacatgcaaagcagtagttggtcttgcacttgctaatgttttcaactatgaaacagtagaaaatgaggtcacatgaggcaaggactaatgctggagcagaccagcaggaagataaattacagtgaaaacttgaccttccttccttccttccctccctccctccttccctctctccttccctccttccctccttccctccttccctccctccctccctccctccttccctccttctctccttccctccttccctccctccctccttccctccctccctccctccttccctccttccctccctccctccttccctccctccctccctccctccctccttccctccttctctccttccctccctccctccttccctccctccctccctccctccctccttccctccctccttccctccttctctccttccctccttctctccttccctgctttctctcttcctctcttcctctgtttctccctttctccctttcttcctttcattctgggtcttgctttttcacccagaccagaatgtggtagcatgaccatggctcattgcagcttcaacctcctgggctcaagctatcctcccacctcagcctcctgagtagctgggactacaggtgtgggccaccacacccagctatttttgtttcaattaaaaaacaatttttttttttagagatgggcctcactatgttgcccaggctggtctcaagcaatccttccaccttggcctcccaaagtgctgggattacaagtgtgagccaccatgcctggccaaaaacttgatttgtatgtgatatgaaaatatgcagataatacacatatttaggtctttaaagagttttgctttttaaatttcagatttctcttttgctatatataaataggcatataattttagatttgaaatgagtaagattattttccccaatgtaagtgcttctttatgttaaattgttttctttcttttattcatttaaaaattgggttgtctatttttcttgaacatgcagcaattagatagtgtgatgatttggatgtgagaattatccattggaatactgtctcagtgtatttgccaaattgtcatcaagcataatttactcaaaatcctgagattcttccttgaaaattaatttgaaaataaatttgcttgccctctcctcttttgaagcaaaattggttcactttaaaattttcttttgtgatgttgttgctaggggaacaatatggtaaaccttgtaatctctgtcctctttattttctttagatctactctgatctgtttttatcagttctgtcctattttaaaattatataacacttgtaacctgcccccaacctactttggaagtactgaagtataaatcctaaacaaatgactgaatttactgactatgcatctgcctagataaatgggttgggggtaaaggtgattcaccaaagaaggacattctggagtggctgctttgattagaagaagggattttattgtaatcttaacctggtgatttttttaagagctgaagattttatttgtttctgttttttttcggtggtagaggagcatatgtagtaaaggacagatatatatgcatttcaaaaatttagaaatggctagacttaataaatacatgagtatagttgattataaagcagaaacagtaatagtgctaataccgatgggatccatggaaattggcctaaatgttttcacggtgtcttatatgaaaagcaacattcaccatggtttaattttaatgctgagcagtcttatactactttcaatgtcattagtgccatcttacttaatttgtcaaatctttcaaaatgaagaaaaaatagaaatattgtctttaggccacagaaatatagtttaattttgacttcaaaaaaaccaaagagatcaaaatctttttacaaaaaccaaaatacaagcacaaagctataatactatttaaacaaatcaccaaatacaactgttttcagaagtaaacatgcaaaattttttgttttattatcaaataacaaaaatatttagctgatgacaagtcttttaaagtgaattatgctatcaaattgaaatttttgtggatgtgtaatctaagtcaatcaagtacatgttatcattcgataatggtttgtcaaatggctgggtcaaaatatctgtctcaaaataggtaccttaaattatcatgtatctgtggttggcaggtaggactggtcgtgaccagagtcagagaagaggatcttgtccaaggaccccaaatataactcttaatggacgtgctgtttcttttgtgctaataattttatgcatttttaatcaaaggaagatactaacttacccaagaggagggaattacatgcattaggagaaataatttatatgaaaaaatcaatgatcttcaacttatgatgttgaaataaatggtagtcttcaaaatacttttaaaacttcaaaatatgggatggaaattataaatttagccaagatgtaacttcatagacagactttttttattgccctctgtctgaaattatatcaaatccacaaggtagctagcatctcttatatcatattagtcagggaactctgagcagcagttaaatgtgtcactgattaaatggaaaaaaacaaatcatttctgaataaatttaatttgttgaacaggcacaatagacgtttcttggtgaagacaaggctggactactactgagtggtatctactgagtagggcctgaggaaatccaatatagaaaaggtagatattgatcaagtgggaaagggggaaaggctgaagctcccttggcaatggacatttttagcagtatcaggtaaggtcttgaggattctgaaccctattacatcttcttcactgtttggcttcaaatggccctggtgtggaatagaggtaactcagaattagaaacttgccttgggtaactgagagttcttaatataacaaatatggtgagagtattccctctcccatcatacccagtaatgtgctaggggaggctgaactaaaaaaaaatcttaaccttcttgttaattaaagggtcaactttagaacttcaacacagtactagatgagagagcaaaaccaaacagaatgatgaccacgctggaaattcctccctgtgtgctgctggcgctgacatcctgatagagttcaggcgcctggtgaagctacacagacggtgcctggtctccagaccacatgcttttcatctacgtcataaacatgaaatttctgaattgttccattggcattttcatctctgtttagatagagatgttataaactttagttatataattgggacccatatcatgccaaagtaaaaaatttaaacatttccattcacttgcctgagacctccttctcctaattttgcaaagctgacttggtcatttcagtaactcacaattatttactctgacattttgggattacatcagacattctatggtacagttattttccaatgaccaaagtcatatcttattctatctgcctacttgatagcaagttagtgtgagtgaaaagccttggcaaatacatataagtatataaaagaaagttaatttgtttaggatggaaattcttttaccaccctagaactgcattagcatcataattatttcaaatttgctttcatttttaagaagggtgcccaaagtaaagtctacttagaaaaaacaattttttagattaagataatgatcatttttctaattatgtacatctttaatatatgctccaataactatgagctgagagttgtaatgttgtctccctataaacttgaagaagcttttaacttctggtatgttgtttttttcttcagtaaagtaaggataaatactgacttcaaaaaattcatgagtggtaatgatgttacctaatttttgcagatgacagaagctgtataattatatatgttgctgatgctatacttagttttatatattcttaggaagttttcctatattatttgtaattgtaaatgtcgctgaaagtattattagtagtcacaataggaatgaagaaaatgaacaacataaagagttgattaccatacaaagttattattttttacaaaagaggttaaggagcagaataacatctttgcagacaataaaagcatgccagaaataaatgcccacaaaataaatgaaaatgatacctaatatttccaactgagccaaaaacaattgaggaaatgatagaagctatgaaataaaaacatgaatcagaattttaaaaactcagaaatatgataattgaagagaaggaagattttaacagagaggtaaagtcaggaaagaattagaaataaaaggaaaaaagaatttcaggaatgaagactatgctagaaggaaggaatgcaaggacaaaataatgcaacagatattagtttaagaaaaacaaagtatgggtgggaggaaagacattcgtaatagccccaaactagaaacaacccagatatccatcgattggtgaaaagatagagaaaatgttattaataaaggaacactacttggcaataaaaataattgaactacttatacatacaacaatattaatctcaaaagcattatgctacatgaaataagtcggatataagaaagactatgtgctgtggagttcaattagatgacattctaaaagatggcaaaacataggaacaaaatacagatcagtggttgctagagattgaattatgtatatgtgggtaagggggaggcaattgactgcaaaggggcatgagataactttttggggcaatgaaaatgttctagagtttggtcatacagctgtttatgaatatttgccaaactatacttataaatgatgaactctattgtatgtttactacaattcagtaaaaaaataaataataaagggataaggttttgagaaaaagtgatagatacagacagattgctaagagtattcaacacatacataatagaaatctcaaagaaagaaaacaaaaacagtggaatagaaccaatattaacatcttcacttccctgaaataagatttaaatgatttaaaatttcttattggaaaggcatacatataagaaaaaaaatctacctagaaaagtaaaaatcactggattacaaaaaggaaaaaaaaaaaaagaagaaaaaattcagtggtcatccagtcttaacagccaagtcattaataagaaaaaagaatatcaaattgtcaccgaaatttgtcaactgatttttttttttcagaagacagtggagtaacgtatttaggatactcagggatggaaaatgggagctaagggtttagccacatagaacttcaggtataaaggccacagacaaacttgcaagaaataaggacatatttttcccataaatagttactgcggaatctcctggagaatatatgttaggtaatcagaatgatgggagaaatatccatgtaaggactgctggcagtgattggctgctcaaaaaacataaaaataaagacaaccatacaactcttgacaaaaccatacaacaccatcaataaattagtcttgccaaaaaagaaaggaaaaatacaacttaatataatcaagcctttagatctaactgtcaatttccaggagaattggacagagagagaggggaatgtgaattagtgaattagataaataatatcatggggctgcaatcagcaaaccccaggctgtgtgaaactctacaggacaaacaaccctatttcttcaacaaaatttccaggatagagagggagacagagagagaggaaaggtacagattaaaagagatataagagatatattaactggccaagatggctgaatagcaacagaaagcaggtgatttctccatttccaactgagttacccatttgatctcactggggctggttaggtagtgggtccaacccacagagggtgagcagaagcagggtggggcgttgcttcacccgggaagtgcaaggagatgtggggacctccctcccccagccaagagaagccttgagggactgtgctacctgtccagttactatgcttttcccacggtgtttgtaatctgcagatcaggagattccctcgagtgcccacatcaccagggccctgggtttcaagcacaaaactgggcagctgtttgggcagacaccaagctagctgcaggagtttttttcataccccatgggtgcctggaatgcctgagagacagaacagctcactcccctggaaagggggttgaagccaaggagccaagtggtcttgctcagcgggccccactcccatggagcccagcaagctaagaaccactggcttgaaattcttgctgccagcacagcagtctgaggtcagtctgggactaccaagcttagtgtggggaggggcatccaccattactgaggctttagtaggcagttttcccctgacagtgctaaggaggctgggaggtctggactgggcggaactcaccacagtgcagcaaagtagctgtggccagaccttttctctaaattcctcctcactgggcagggcatctctgaaggtaacagccccagtcacgggcttacagacaaaacctccatgtccctgggacagagcacctgggggaaggggcagctgtggttgctgcttcagcaggtttagttgttcctgcctgttctctgaaatgagcagctgatcctgacaagagggattctcccagcacagcccaccatctctgctaagggacagactgcctcctcatgttggtccctgacccccgtgcctcctgatggggagacacctcccaacaggggtcaaagacacctcattcaggagagctcgggctaacatcaggccagtgcccctctgggacgaagcttccagaggaaggagcaggcagcaatctttgctgttctgcagtctccactgtgatacacaggtacacagggtctggagtggacctctagcaaactgtagcagacctgcagaagaggagcctggctgttagaagaaaaactaacaaacagaaagcaacaacaacatcaacatcaacataaaggacccccacacaaaaactccatctaaaggccatcagcctcaaagatcaaaggtagataaatccacagagatcaggaaaaaccagtgcaaaaaccctgaaaattccaaaaaccagaatgcctcttctcctccaaatgattgcgactcctcttgagcaagggcacaaaactaaatggagaatgagattgacaaattgacagaagtaggcttcagaaggtgggtaataatgaactcctctgagctaaaggaggatgttataatgcaatgcaaggaagctaagaaccttgaatagaggttatataaactgctaactagaataactactttagagaggaacataaatgacttgatggagctgaaaacacagcatgagaacttcgtgaagcatacacaagtatcaatagccaaatcaatcaagcagaagaaaggatatcagagattgaagatcaacttactgaataaggtgtgaagacaagattagaggaaaaagaatgaaaaggaatgaacaaagccttcaagaaatatgggactatgtgaaaagaccaaacctatgattgattggtgtacctgaaagtggcagggagaatggaaccaagttggaaaacacacttcaggatattatccaggagagcttccccaccctagcaagacaggcccacattcaaattcaggaaatacagagaataccactaagatactccttgagaagagcaaccccaagacacataatcgtcagattttccaaggttgtaatgaaggaaaaaatattaagggtagccagagagaaaggtcaggttacctacaaagggaagctcatcagactaacagcagatccctctgcagaaaccctgtgagccagaagagagtgggggccaatattcaacattcataaagaaaattttcaacctagaatttcacacccagccaaattaagcttcataagcaaaggagaaataaaattctttatagacagcaaatgtggagggattttgtcaccacaaggcctgccttataagagctcctcaaggaagcactgaatatggaaaggaaaaaccagtaccagccactgcaaaaacacaccaaaatataaagaccaattacactacgaagaaactgcatcaactaatatgcaaaataaccagctagcgtcatgatgacaggatcaaattcacacataacaatatttaccttaaatgtaaatgggctaaatgccccaattaaaagacacagactaaccaattggatagagccaagacctattggtgtgctgcattcaagagacccatctcacgtgcaaaaacacacataggctcaaaataaaggtatggaggaatatttaccaagcaaatggaaagcaaaaaaaaaaaaaaaaaaaaaaaaacccggggttgcaatcctaatctctgataaaacagactttaagccaacaaagattaaaaaaaaaaaaagacaaaggcattacataatggtaaagggatcaatgcaagaagaagaggtaactatgctaaacatatatgcacccaatacagcagcacccagatttataaaacaagtttttagagactgacaaagagacttagactcccacacagtaatagtgggagagtttaacacctcactgtcgatattaaatgatcaccaagacagaaaattaataaggatattcagggcttgaactcagctctggactaagcagacctaacagacatccacagaactctccaccccaaatcaacagaatatacattcttctcagtgccacatagcacttattctaaaatcaaccgcataactggaagtaaaacactcctcaccaaatgcgaaataatggaaatcataacaaacagtctctcagaccacagtgaaatcaaattagagctcaggattaagaatctcactcaaaactgcacaactacgtcgaaactgaacaacctgctcctgaatgtttacggggtaaagagtgaaattaaggcagaaataaataagttctttgaaaccaatgagaacaaagagacagtgtaccagaatctctgggccacatctaaagcagtgtttagagggaaatttatagcactaaatgcccacaggataaggcaggaaagatctaaaatcaacaccctaacatcacaataaaagaactagagaagcaagaacaaattccaaacctagaagaagacaagaaataactaaatcagagcagaactgaaggagatagagacacaaaaacccttcaaaaaatcgatgaacccaggagctggttttttgaaaacattaacaaaatacatagactgctagcaagactaataaagaaggaaacagagaagaatcaaatagacacaataaaaaatgataaaggggatataaccactgatcccacagaaatacaaactaccatcagagaatactataaacacctcaacacaaatgaactagaagatctagaagaaatggataaattcctgtacacattcatcctctcaagactaaacgaggaagaagtcaaatccctgaatagaccaataacaagttctgaaattgagacagtaattaatagcctaccaaccaaaaaaagcccaggaccagatggatacacagccgaattctaccagcagtacaaagaggagctggtatcattccttctgaaactattccaaacaatagaaaaagagggaatcctcgctaactcattttatgaggccagcatcatcctgataccaaagcctggcagggacacaacaaaaaaagagaatttcaggccaataaccctgatgaacattgacgtgaaaatcctcaataaaaatactggcaaactgaatccagtagcacatcaaaaagcttatccaccacaatcaagttggcttcatccctgggatgcaaggcttgttcaacatatgcaaatcaataaatgtaatccatcacataaacagatccaatgacaaaaaccacatgattatctcaatagatgcagaaaaggcctttgataaaattcaacatcccttcatgctaaaaactctcaataaactaggtattgatggaacatatctcaaaataataagagctatttatgacaaacccgtaaccaacatcatactgaatgggcaaaagctggaaacatcccatttgaaaaccggcacaagacaaggatgccctttctcaccactcctattcaacatagcactggaagttctggtcagggcaatcaggcaagagaaagaaataaagggtattcaattaggaaatgaggaagtcaaattgtctctatttgcaaatgacatgattgtatatttagaaaaccccattgtctcagcgcagaaactccttaagctgttaagtaacttcagcagactcaggatacaaaatcaatgtgcaaaatcacaagcattcctatacatcaacaatagacaaacagccaaatcacgagtgaactcccattcacaactgctacaaagagaataaaataccaagaaataaaacttacaagggatgcgaaggacctcttcaaggagaactacaaaccactgctcaaggaaacaagataggacacaaacaaatggaaaaactttccatgctcacggataggaagaatcaatatcatgaaaatggccatactgcccaaagtaatttaaatattcagtgctattcccatcaagctaccatgtctttctttgcagaattagaaaaaactactttaaatttcatagggaaccaaaaaagagcccgcacagccaagacaattccaagcaaaaagaacaaagctgtaggcatgatgctacctgacttcaaactatactacaagggtacagtaaccaaaacagcgtggtaccaaaacagatatatagaccaatggaacagaacagagacctcagaaataacaccacacatctacaaccaactgatcttcgacaaacctgacaaaaacaagcaatggggcaaggattccctatttaataaataatgttgggaaaactggctagccatatgtagaaacctgacactggaccccttccttacacctcatacaaaaattaactcaagatggattaagatataaatgtaagacctaaaaccataaaaaccctagaagaaaacctaggcattcagaacataggcttgggcaaagacttcatgactaaaacacaaaaagcaattgcaacaaaagccaaaattgacaaatgggatctaatcaaactaaagagcttctgcacgcaaaagaaattatcatcagcatgaacaggcgacctaagaatgggagaaaatttttgcaatctatccatctgacaaagggttgatatccagaatctacagggaacttaaacaaatttacaagaaaaaaacaacctcatcaaaatgtgggagaaggatatgaacagacacttctcaaaagaagacatttatgcagccaacaaacatatgaaaaaagctcatcatcattggtcattacagaaatgcaaatcaaaaccgtaatgagataccacctcacaccagttagaatggcgatcattaaaaagtcaggaaacaacagatgctggcgaggctgtggagaaataggaatgcttttatcctgttggtgggagtgtaaattatttcagccattgtggaagacagtgtggggattcctcaaggatctagaaccagaaatactatttgacccaacagtcccattactgggtaaatacccaaaggattataaatcattcttgtataaagatgcatgcacatgtatgtttactgcagcactatttacaatagcaaagacttggaaccaacccaaatgctcatcagtgataggctggataaagaatatgtggcacatgtacaccatggaatactatgcagccataaaaaagaatgagttcatgtcctttgcagggacatggatgaagctggaagccatcattctcagcaaactaacgcaggaacagaaaaccaaacactgcatgttctcacacataagtgggagttgaacagtgagaaacatggacacagggagggaaacgtcacacaccagagcctgttggggggtgggggacaaagggagggagagcattaggaccaatacctaatgcatgcggggcttaaaacctagatgacgggttgatacatgcagcaaaccaccatggcccatgtatacctatgtaacaaacctgcacgttctgcacatgtatcctagaacttaaagttcaaaaaaaaaaaaaaagagatatattaaccaatcgatgtgtagaccctttttggatcctgattcaaaatataagctgtaaaaacaagattatatatatatatatatattttctttcttagcaagactaattcattaatatatatgtatatatataaaaacaaaacaattgaggaaatatatacatatattggacatttgataatataaaggtattaatttttatggaagtataataatggtattgtggttgtatttgaaaagagtatacatggacacagatgaaaacaatagacacacgagcctacttgaggtgaagagtgggaggagggtacggatggaaaaactacctgttggttactctgatcattacctcggtgacgagacaattttttcaccaaactcctgtgacacacaatttacccatgtaacaaaactgcacatgaacccccgaacctaaaataaaagttggaaggaaaaaaaaacaaaaacaaaaagaagagttcttatcttttagcaatatgtactgaaatattatttaaacagaatgttaggatgcttaggatttgcttcaaattaatttgaggttgggggagtgggtaggaacaaacaagattggacaacagttaatacctgttattgctgggtgttgggtacatgggagttcattatcctcttctttctgtttttgtatgttttaaaatttccataataaaaagttttaaaaatggaatgactaccatttatataaagattttcacaaacctgtagtgaagcattattactctcttggacaagaaacagaatcttagagaggtgatgatttgccccaggacatggaactaaattgtcagaatcaggaatccagtctggatcctcggacactatcttgtctctgcttgtctataaaccatgctgtcttaaaaagcaggatggttcttttctttggttgtttggataactcttccctgtcctctgatcttcagtgtggaagaggtcagaatcccaagaagttggtctgtaattcctgcaatatcacacattttacttttcaatgagacccccaatatttccctcagcttccattcaggatgcacctctctgtttcttttcttttgccattacatgttaaattttcttggttttatttgcttttagtttctattttcttcttttttcacctttcatccccttcttctatattcccttttctccctagtctttgtcatcaagggacttttcaattgctggttacagcccttctgttcttgtatgtgttatagatattgttgcttctctctcattttcaccctaattgtcatctccctttcaaagagtctgataaactaaaccagcaaagggagctgtcacaaggcagccctaggataggagcccagacagcagcattcagaatctagaaaaacttgtgatttttctactgaaaatgattaagagaaacactggcaccttgaacacagtaggtactctgttaatatttactgatgacattaatgaagagaaaattaaatgacatattcagaagagctagttcttgccaaaaatatttcctactctgtgccttttgagttgtgggacttagttttcatccctggatgacttgctttctatatctgtgaagtgaatagaccaaagtcctgtgagacaatgccttgctctttcatgtagtaaaggttagcccacctctgtaagtatagcagagaaacactagattgggagcttcttgagggcagggactttgttgattcaagtttagatctctgtctttagacatcctgtaatcacaggatgttacctttcttgcatagatcaagtgttacaaagagcctggcaatttacacatctgtgctaccatgacttaagacaaaagcgcaaatcaggatttttgtttttgttatgttttattgtcctccctcctcccatctttgtccctccattctttctcccaggtactccatatccttatgttgttttcgtctcatcaaagccctgacagaaacacaaccacttccaaagacttgccattcctcaaatgtcctgcgttctaattggacttgcccccctttgctctaacaatcttattccaccttcatcaaaattattatttctaggatactgattttagagcatctgttttaagtgattattaataatatatgaataataggtaggtttagtccaaattaatctctgcctagtggaatgtgtgaaaaactgtcctaaactctacagtaatgaatgctattggaagaggtattaactaggcattccactagaaaatttgctgatccctcgtctgttttgtcatacctccctgactcatggggtgtactgtgagaactgttgcaactctggggaagtgttttcctgtcctgccactagactttgtgccaggaaataatttctaggcattgcctggtaaagttcatcaacttgctttgaagaagtcctgtgaaagcaatagagggttttgtgttgcttttcaacagtctccaacggaggagattttcacaacctccttggtatgccagtgtataacaaactatgatcactagcattcccccaagtaatttaagaagaattaaaaacaagataggcacacaaaagtttatacatttaaaaaaagttagattatttgacatattaaactaccagtagattcctagcgtttcttggtagtagaaaacttttgaaaacatgtccaataatctgtataataaagtcaagacagttttgatcttgatctgtaagaaagtgtaataataactaaatcattatttgaatgctgacaagaaaagtacttgctgtacatttactgtttacttgtattgtagcaccacctactgttgataaagaaacaagcttttatagctttcccatttttctttgcctcgctagttaaaagaatgtctttttttttttgagatctgatatttttaatgtcacaaatttttttttttttattatacttgtcttggctcgtcagccagacatgctgctcggagatgtttctaaagttatgatacagagattgcattatgtctgtttccaaaatgaaagattatgccttcagttacctaaagatcagaactgatgcttgacatgcatatatgacatattttatcgcttttcaaatcagatgtttatctttttattttctaataaaataggctgtagatgttgggaaattactgatttgctttaagttcagttgctcttccaatgaacaaatattaagtggtaaaacatcaagtcctctgaatataattactaatataaaatgatgtcatattagatccagggttagcacttacataccatcactccctttcctccaccctcaacagaatcttcatcactaaaaaacccacaaaacatcaactaggctatttgatatttagagctttactactcaaagtgtggtctgtggactggacgcttgggccacacctgggaactgttagaaatgcaggattcttgtctccctgcattttaacaagatccccaggtgattcagatgcacattaagatttgagaagcaatgtttcaggcatttcttgtatcccaccctacccatccctgccagaagactgaacagcagtcaaaccaagagtaaggtctttcattacaagtttgaatttacagtatcttattctcataaaaagttagatgatattctctgactcatggcttattgaatgtaaattgtatcactgctgtcgttagggctcacatcagcaactgaacaaagaaggcacagtcctttcccactggatctgtcagcttcatctctggggaaagtaatcagggagccatttaaagcagctgagaggaaaactgccagctctgaaattttagggcatgcaaatgccaacaaaatatttaagttcggtatgatagaatcgtagtttgaacagacaatagaggtaggcttaaataattcctgacaattgaagtagaaagcaatacttagagctagaattatgaataaattggaaaatttaaagcttgatttttcttaagtctaaattttcttttacccatctctttcttctatttaaaaatctagttagtttactacaagagcagtaacagccatttgatttttggttaatgttgaattagttcataagtttaacaaatgaatgtcattcacaaatttagttaattttcctaagacctttaatccatctaataatctcaaatactttagatacatgaggatagacttagaaacctaactaggccaaatctttcagtgaacttaggccagttttgaaaatgtaataaaccaaatttataactatgataaactaggttctttcatattacaaaattaatcaaattcttacctttattaaaatcatggccgatatccattcaacatttcaaattaaaacttcaaggcagttttgtattttggattctttaaaaacgtttcaataattttaaataataaacaccaagattgtctccataatcataaaatgtactgccaaagttagcactaagtaccatgggttaggcttatgtcattatctctgtatttctacattttcctagtgtttcatagtcacacagctaaagatagtagaagtcatctgatccatgaccagttctgtaatgcgtttatggacggtggtagtaataagaaattgtggaccaaaagcaagatcatagtgctacttcctaaactgtgaattagcaggctgaaccttttaatagtttaagtctttcttgtcagtgggggaatccaagtccatggcgagagctgagacttagtttcataggccattgtcttttctcctaagtgtattatacatttactcaattttcattgtaaaccctttcaacattctctcacccaatttgggtaggtggaatcctgtaccccccaccagggctatagctaatatcttcattgcacagttattgttcattgagacatgtacctccatccatggtataaactgtttttattatctgtctcacctccattttaacagtaattctgttgacattgcttctagactggagtttggctaataagacactggacactgtgttatctgtgctaaggaagcacagataacgcagcgtgttaagcattctgggtcaggatttttgtgctggcacaattgtgagtaaaccaagaaaaatagtccctatgagatttctttcagacttcagcacacagaaacctagtggattgttccttaagataaaagagaggtttgagaatttactttttgtcatagtttgggttcccaggaatcggattctgaggctctgagatctacatgctggaggtttattggggtgagttcttgggaaaagcacctctgagaggtgagggaagtaaatcaaccagagagaggagttgaactgcagctgtgacagagatggcagtattcctacccagaactctaaagtggctccccttttcccccaggctttatacctcctcccatttagcagacatgggatgtggaaagctcccagggaagggcatgaccttgggtgaggcagctgagggcaagtcccagggagggtctcagctgagagcaataagcagtcaacactgcttagcaggtggggtaaataagtgtcttgatcataaggtggggtaggaggagggcaagtataaatgctgtccaccgcattcaatagaagtgttttctctattattactaaagaatggcttgacccagaaaagatcatggtctttagccacagaacttaattctaggagaggcgatattacagcagactgatccctgtaatgcaaatggcaatgcccctctttgctgagaggcattgtggagaatgcatgaaaacatggcagtgatgttggcagggagatggcaacgaggttctctgcaccaactgtctcctgcagctgggaaaagacacacagcctggctgccaactgttgggctcattgtgctctggctgaatttagttccctcttatgtcagcttgcaattctatgttgaagaaaatcggtctggtctgccaccatcaccatctcttagcaactaagagagattgaaacaacagctgggtaatttgatattgggaacttaaaggtcgtgaaaatagaatataatggctgtttgtattaaaggaaaaaaaaagagaaaatgatgtaatcctaatgcttagaaatgtttggaatgccacatgggttacaaagagtgaaaatctagtttaaactggttggattctttctctctcagaatgattaaagttgagcccagaagctcacccaaacacacatatttgcctaaatataaatccctgtggaatgttggagctataatgtgaaaaacagtttctgtgtttttgtattttctctaagactgacctacagctttcttatcacaagttttgaagcaatacttataacatagatgataatttagagttattttttactttgctttttgtgggcaatggggatggggactgcagtgaagatgggagagaatgaggtgtggccctcagacatagtgctgtgcaggaagcctactacttcagaggctgcccacagcctcacatacaacgggtaataacagaattacatgtttgaaaactagaaaatgagaagtagaagccagatgaaattgttaaaacaagtttttcttttttccctagggccagtgaggagaccatctgtttttcaaattagaaaagccagaaaatataatgtttgctctcagaatgagtcaaatgtcatactctaatgaaaattccaaagcagaaagagagaaaggaagaagagcttgaaatgccaaattagtggggtgaggtgcttgctgcttgcattcctgcagatccaagcattttgcaactctagtaaacctgccaggacaaggttcatttgaaggggtgtggattaccgggaggtgcggggggactgacattctagtgctttagatggtaggtaactgcctggtcttgtttctcagaataacttgttcatccaccacatatgtggctttcatcccagcacagtgggcaggacgccactgttttcttcgtttggttaatagttacacttccttgacacctcatacagctgggtcatggatctgctgctgttctcaatgtgagcatcactgtctttttttctttttctttttctttttttgggacaggatctctgtcacccaggctggagtgcggtggcacgatctcagctcactgcagcctccacctcctgggttcaagcgattctcctgcctcagcctctcaagtagctgggattacaggcatgcaccaccgtgcctggcgaatttttgtatttttggtagaaacggggtttcactatgttggccaggctggtctcaaactcctgatctcaggtgatccacccgcctcggcctcccaaagtgctgggattacaggtgtgagccacggtgcccagcccactgtcttttttcatcaatgctaagagaatttaattctttccacatgaagcgattctacttcctcaacacgtgtttcgttttgtgacacaacaacttggaggaggtgaaattcattaacaaggaataaatatcttctctttatggagccacttccttaacccctcaaatcttcctagaccacttccatcttccatccaacgtagaataagtgaaccatatgaaattgctgtttttgtgggtcaaaggcaattgaatggtagtctcacatggttcaacatctgtatacaagcaagttctctgatgaaaaagctgagtgactgcgagtaccatccttagaattctttaggagagaagaaagatttcaaggtaaacaatctgacaaacttatttgtaatcaaactaaattccaggtggggctggcttatagttcacacacattaaagaaatagggattgaatcttgcaggaaactagcacttttccccaagggggatgaggatttaagtttccttcatggaatatgtttccagttcatttggtcctgcatttattttagaaattgtttgatatttgcacttcactcattttccaaaatttgttctgattccagatttctctgttaaatttctataaatttgtttatttgctatttgctttggagaataggaattatttgaatttcttggcaaaagggatgaaaattctaacccaccattcatttgggagaggtgtacatatgttcacttccacagctgtagcacatttgttctcagttttgtacttttgagacacaggaagtatatttctttaaatgttctctctggaaatacatacgtagagctacagcctgatgaacattccttatacaaaggaatgtacatctcagtgtagtactcgtctataatttactttcaatggtttatggatgtataataatcacagtgaacctttgttcagcgcttactatatgtcagatactttgcatgcactatcatgttttgtccttatcctgtgatgtgggtcctagtcctgacacacaacacaggaaactgaggcacagaggttaagcttctcttccaaagacccacagttgttattataataataatgctaaggctgatgttcagggcatctctaaagccttctgctctcttatttacaacaccattctaccttcacattggctacagctgattcaggcatcccctccattaatcctttttagtgaatgttagtttttgttgtgggttcttattttaaaggtgatattttgggcaagatgtcttgaaggactgatggcaggtgcatattgacaattctatgcagagcaaagcttccaaaaaggcatgctatgaattctgtcaatgtggaagatcgagcaaaaccagcttctctttgcagcactggcatgcaaccaacctgctcacctgcatccttacatcttaatctgatgagcagagtctgcagacagaaatcattttcagctctttttttttttttttttttgagacggagtctcgctgtgtcacccaggctggagtgcagtggcttatctctgctcactgcaagctccgtctcctgggttcatgccattctcctgccacagcctcccaagtagctgggactacaggcgcccgccaccacgcccggctaatttttttgtattttttttttagtagagaaggggtttcaccatgttagccaggatggtctcgatctcctgacctcatgatccgcccgcctcggcctcccaaagtgctgggattacaggcgtgagccactgcgcctggccttcagctcttttaactactcataaaaatgttttaagtacatttttaactagcagtacttgtataatattataattattatctatttggtacctttaaattttcatgtttatatgcagaaataaacaatatattgttcttaaacatatttttgtgatatattttctaggaccttatatttatcaattcaacaaatatttaatgcctaccatatgtcaaactattcttggcatagcagtaaacacaagtgacaaaaattctgacctcatgctcttaaagtttttataatgattagttttaaaaatctttatccatagaaggctaggcaaggaggatggatctatatagaagcacttccttactgagttgagaggcttggggagaaatgcatagtgcctccttatttggaagcccccaaagtcatctcagaccctacttggacataagtaaacagcgaagtaggatctggaagaggtttaagttgaactttccttgtgtgcattatcctcaaagatatattgcaataagatttttgtatagaatgcaagtctcctactggattttagccctgtttcccatcgaattttatctagtcatatttgacttgtgtcagataaagattaaaaccttcagacaccgggccgcaagttgaagatctttctgaatcacagtgctaaaataatagggagggattttccgtaagtgttaccaaactaaactgggatccccttgcctggtgtagcaaagccaaatactgacatagggattgctgcaagagaaagtgaagcatttatagcaggatgccaagcaaggagaatcagcagctcacacttaagacccagcctccacagtggcttacaagtaaggccttttaaaggtgaggaggcagaggttataggcaaagtcatcaatcaatacacagaggttatacattggtttggcctaaagaggtgggatatcttaaagcggggtcttacaagtcatagatagattcaaaggtttcctgatttgcaattggttaaggagatgaagctttatctaaaaatttgtgatcagcagaaaagaaagttagctctggctcatgggtatgacctcttccaggctcctcaggaagaaatttagaacaaagaacagcagtcagagttcagtcctcagttcccttttatctgaggtctacatgccagtggatccatttggaaggggtctgggtttctgaaaaacaactcacattaagatgttatctttaatttctacagggaacatctcatgaccctaacttccttggctattgttttaagctactgctaccttcttgcttaccaagttgctcatttacttctcagggctagctaggtgcctggaatttccattgaaggagctccagatcttcctttatttccatgcctggcggtgttgaaggggtgtgggagagaggatagcaggcccttaagaggggtcctgggtccatcttatacatagaagcaactgaagaggaaagctgagattggggttcgcagttctcccaagcagtggctgaggctggcaggttggagctcaactcttaggcaacttggctgttatatgtatgtgaatgtctgtcctaacaaatgaatttagtgctgcaatttcaagacggtgttgtatcaccgacttgcaaaaatgccttctggcatatttattactttggttccaaaaatcatatttagccagatcttttcagtaatgaagcatttttctttatagcaatcttgctacagctgagaggcaatttagaatggaggttaagagagttgattcttggggcccaactgtctgggttcagattccagctccatttcttacagggttacataaagcagctcactgtgcctcattttcttcttctgtaaaatgatggtcatgataatagcatctacctcatggaggtgcaatgagccttaagttagatagtatttgtgaaattgcttaaaatgatgcctggccatagtgagcactttataaatatagctagaatgatgagagagtcttagattctcctgtcaacaggcattgcatggctggggttgagcctccctagtgaatctttcacatagcttgacagacatagtgggcatcagccctaaatgccaaaagcaaacttgaagattcagagcaaaggcatgtgctgagcatttgccttgtatggagttttgggtgctcttattcagtgattaagagccaacattagtgaatgttgttgccaagaagtcacacacacacacacgtacgtgtgcccacaagccaagtccctgtgtgattgccatcagatgtgtcaggaagacatcatgcccagatctgtgaaactatggaatagatgtcagggaaatgcgggtccatctgctaaacagatgactgaatgattaagtgaatagtgaaaaggagaattccaagctccaactggagtcaagatgtgaagcagcagcagtaacactaacagcctgtgggtgacaaggatcaaagatgggctaaatgtcttccgagggaaaaccaaatgtggtaaaagacacatcagaggagacctctaccataaaaaaaacaaaaatttaattcgatgccagaaagagataatcagcaaggagaaaactagatttagcctgaaatataggtctgctcaaggctcgtcaggggaaagaaggtgaacattcaggttgattttatagagagctcctagaacacataaactacattgtgatgactaaatataaagaaagatgattatcactcttttaggcaggaaatggggatggatagagactggctgtgcagatggaggaagagaaaatggttagtgtgagataggaaatggaagagaagcataaacaggatcccttggtataatggccaagaattcctgatttctactgtgtcccccctttgactcagaataaaattagtatccacaaagaaagagatagtcttaaattagagggagctgaagaaaatattttggggggagaggagatgagaatttgacatgttaaaggactcctaggaatatagggagaatgctttctgaaaaggaattccattgactcagggtttagacttaggaacatgtgacttataccaagtagacatcgactcactttgatattttcagtattatatacaattgcttttaaaaattacttctattgttttccttgattacatgactgatacatattcttataaaaatgaggagaaaataaaaataatcagtggaccacatatgacttacaccaagtaaacatcgactcctcactttgattgattttcagtgttgtatacaattgcttttaaaaattacttctactgttttcttgattgtgtgattaatacatattcttataaaaatgagaagaaaataaaaaataatcagtggaccactagagatatccactattaccatttttgatatatttactttttctaattatttacatgtaataaaaaattggactcagattctataacaattttatacattgtttctttaacttaatattatttcctgaatagttttttgtgtgtcatatagatgggcctatatatttatttttctcacaacttttatgctcagaaaatctctactaaattaattactaaggggttttgctatggtatgaatgtttgtgtccccctacaaatttatatgttgaaatcctaacctccaaggagatatattagaaggtggggcctttgggaggtagtcacatcatgagggtggagcccttataaggcctgagagagaccccttgcctttctgtcacatgaggacacaagaagacactatctgtgaatcagaaagaggacccttgccacacactgaatctactggcaccttgatctgggacttcccagcctccagaactgtgacaaatacatttgtattgtttataatctacccagtttatggtattttattatagttgtccagatgggctaaggcagattacaaatctttaccttcctcatactggtgtgtgatggtgtaggccctgtggggctgatttaggatttcctgggtgccttgagttgtgagaggagaaaacagtatctctgcaaatgtaagggaattggaccttggagttggggtttgtgtctcttactagtctgtctttggggtattttgctaaacttctatttcctaattcaaacaaatgatagagagctgcttgactgagagaaaaatactaactcctatatcagatatttagaagaagcagttgaacagttctttagagttgggtgaaaaaaaatcatagccccaactaaaaatgctggggtcacaattgaagaggaaaaaaattcacaattgacctgaatagtaaattctctaatgtgggatcttgcattaatgaaagatctgggttaagccctcaagtctaatgattgaaacaatagtacagtatgcaggatccaaaggactttcttcttaaaaagttgtgccgtagtcatgatgaaggtgtccattcatggtcagttatgtgctctgatgttgaatttcttactgtaatttgtagatatttgtgtaaaatgactcatgcaactattctgagggaaggaagcagtttggtgatttagtataaaccagaatggagccagaatatttttagaacccaaagttttttaaaaatctgttttcatttatcatttatttgaatttaggtctcactatggtaggtgaggtttggtatgtaaagtgatgcaagacaaactctcaggagccagacttcaatatacttttatgcccaggtctgattcttcttattctccttgggccttcatttctgcccactcaagcctgaagatcctactggtccaggaaaatgtctagttggttttcttgttgcttcaacacacaattcatatttacagattaatatatggtaaagacactttaaaaatatgaaatacatatttctttctgatgtataagattgttacaaaaaacatcaagcaacagataagtgagaattctcttttcatgttctgtagagataactcctattgacaacttggtctgtattcttctagacttttagtccatatttcatatttatataatttttaaaacatttattactattatgtagccaactctcttactttgtatattttaggatctatttctgcatccatatataaagatctactttatctgttcagtagtgattgatctataacccgtgattagataatccatgcaaagaaataaaattccaagatggtaaacactgaaaggacacttctccctacccctattctcctgcctcacagttcgcagatccaatgatccagaggcaatcattgctatcaatttcatatacatccttccagagcaaatacaaatggcatcattcctgtattcctgtattagtttggtctcatgctgctaataaagacatacccgggactgggtaatttataaagaaaaagaggtttaatggactcacggttctacatggctggggaggcctcacattcatgacagaaggcaaaggagaagcaaaggcacaccttacttggtggcaggcaggaaaacatgtgcaggggaattgcccttttataaaaccgtcagatcttatgagacttattcattatcacgggaacaacaggggaaaaactgcccctatgattcaattacctcccaccgggtccctcccatgacatgtggggattatgggagctacaattcaacatgagattttggtggggacacagcaaaaccatataaatttccttctgtaaacaagcaagctgtaacatctcccagcctgaaagaggaggaactttctttgacttgtgtattcctttccagctaccacccaatttctttgctccttttagagcagtaatccttgaaaaattatctccaattactgtttccacttcctcttttctcactgtgatctcagttttcatcccatacttaaggactcattgttatgggagctatacaactctggctcctttgttccatcttggaacaaattgaagggccttcttggtttcaaagttccatatgtgggtggactggcccattagttgagactgtattatagcacaactttcctcagccctacttccttccttccccttgcttagggggtcatcccaagataactccttaataaacttcctgcacgctaatctccatatttgaatctccttctcaggaagacaacctgtgacattatctggtggtgtcctatctgagaataaaagcctgaagttcttgcaatggctctgtgtgaactgcccctctcttcccactgccaacatttctggctacatcttctatactctcccttttgttcagttttgtttagccattctctaaatatactaagactagtcatacttttgagcttttgcacttgctcttctgacttcctgggatatacttcccccagataccctcctgtctcaaccttcatttcctttaggtctcaattcaaatgtcacttgtcagagattatttcctgaccactctatataaagcagcatcctcactactgttctgcttttcttttcctttagagcaatcaacactgttggacacatactatattttatttacttactgtcttttcctgttttgttctctgctgtattccaagggcctggaaaagtgcttggcacagaaaatatgttcaagtaatatttatgagtgaatgagttatcttgttttttaatggaaatatatcttctacataaatgtattacagacttttaatataacaatacaactcagaaaacgtcccaaataagaatactatgagctgtaaacaactgcatagttttctaccatatgtaaaaacacaatttaattagtcctctattaatggaggttttatgttatttccagtaatgtggtgaataactttgtgatttcttctgtaatgtgactatatctgtgagaaattctagaattgtattttgctgggtcaaagggtgtgtgtgtgtgtctgtgtgtgtgtatatatatatatatatgtgtgtgtgtgtgtgtgtatcttgcattggtaattttgttagatataaccaaattgttctctgtaatcttacactaatttatattcttcccagcaagatatcagcatgtgtctttcaacacatcctcaccaatattttaatgttgctaatctgataggtaaaacatggtatttcagtgtgatttaatttttaattctgctattgaaagtgaggttgaaaatattttcatatatttaaaaggcagttgtattctcttttgtataatctttattataatactttttctttatgaaggttttgtgaactttgtccagtctttttgatttgtagaaaatagtgtgcatatttgcaaatacttttcttggtttgctgtttatcttttaactttgtttatagcattttctatttcaagtaggaatgtaaaacagttttatagtgaagtttgattttttttctcttataggttttgtgtcttttttaaaaaaattatttatttattttttatgagatggagtttcgctctttttgcccaggctggagcacaatggcatgatctcggctcactgcaacctccgcctccccggttcaagcaattctcctgcctcagcctcctgagtagctgggattacaggcatatgccaccactcccagctaattttgtatttttagtggagacggggtttctccatgttggtcaggctggtcttgaactcccaacctcaggtgatctgcatgcctcagcctcccaaagttctgggattacaggtgtgagccactgtgccccccagatttatttattgtactttaagttctgggatacatatgcagaacgtgcaggtttgttacatagtatacatgggctatggtggtggctgcacccatcaacctgtcgtctacattaggtatttctcctaatgctgtccctcaacttgcccccgatcccctgacagaccctggtgtgtatgttcccctccctgtgtccatatgttctcattgttcaactcccacttataagtgagaacatgtggtgtttggttttctgttcctgtgttagtttgctgagaatgatggtttccagcattatccatgtccctgcaagggacatgaactcattcttttttatggctgcataatattccatggtgtatatgtgccacatattctttatccagtctatcattgatgggcatttgagttggttccaagtctttgctattgtgaatagtgctgcaataaacatatgtgtgcatgtgtctttatagtagaatgatttataatcgtttgagtatacacccagtaatgggactgctgggtcaaatagtatttctggttctagatccttgaggaatcgccacactgtcttccacaatggttgaaataatttacactcccaccaacagtgtaaaagcattcctatttctccatagcctcaccagcatctgttgtttcctgactttttaatgattgccattctaactggtgtgagatggtatctcattgtggttttgatttgcatttctctaatgaccagtgatgatgagctttttttcatacgtgtgttggcagcataaatgtcttcttttgagaagtgtctgttcatacccttcgcccaccttttaatggggttgtttgtttttttcttgtaaatttgtttaagttccttgtagattctggatattagccctttgtcagatggatagattgcaaaatttttctcccattctgtaggttgcctgttcactctgatgataattcctttggctgtgcagaagctctttagtttgattagatcccatttgtcaattttggcttttgttgcaatagcttttggtgttttagtcatgaagtctttgcccatgcctatgtcctgaatggtattgcctaggttttcttcttctagagtttttatggttttaggccttacgtttaaatcttcaatccatcttgagttaatttttgtataaggtgtaaggaaggggtctagtttcagttttctgcatatggctagccagttttcccaacactgtttattaaatagggaatcctttttccattgcttgtttgtgtcaggtttgtcaagggtcagatggtcgtagatgtggtgttatttctgaggcctctgctctgttccattggtctatatatctgtttttgtaccagtaccatgctgttttggttaccgtatgcttgtagtatagtttgaagtcaggtagtatagtttgaagtcaggtagtatgatgcctccagctttgttctttttgcttaggattgtcttggctatatgggctcttttttggttccatattaaatttaaagtagttttttctaattctgcaaagaaagacgacggtagcttgatgggaatagcattgattctttaaattaatttgggcattatggctattttcacaatactgatttttcctatccatgagcgtggaatgtttttccatttgtttgtgtcgtatcttatttccttgagcagtggtttgtagttctccttgaagagatccttcacatcccttgtaagttttatttctaggtattttattccctttgtagcaattgtgaatgggagttcactcatgatttgactctctgtttgtctgttgttgttgtataggaatgcttgtaatttttgcacattgattttgtatcctgagactttgctgaagttacttatcagcttaaggaggttttgggctgagatgatggggttttctaaatatacaaacatgtcatctgtaaacagagataatttgacttcctctcttcctatgtgaatactctttatttctttctcttgcctgattgccctggccagaacttccaacgctatgttgaataggagtgatgagagagggcatcctcgtcttgtgctggttttcaaagggaatgcttccagcttttgcccatttggtatgatattggctgtgggttcgtcataaatagctcttattattgtgagaaatgctccatcaatacctagtttattgagtgtttttagcatgaagtggtgttgaattttatcccaggccttttctgcctctattgagataatcatgtggttttggtcattggttctgtttatgtgatggatgacatttattgatttgtgtatgttgaaccagccttgcatcccagtgataaagctgacttgatcatggtggataagtgttttaatgtactgctggatttgatttgtcagtattttattgaagattttcacatcaatgttcatcaaagatattggcctgaaattttctttttttgttgttgtctgtgccaggttttggtatcaggatgatgctggcctcataaaatgaggtatggaggagtccctctttttctattgtttggaatagtttcagctccatcaggtcatttatgtttttctctaaattggttattctagttagcagttcctgtaagcttttatcaaagttcttagctttcttgctttgggttagaacctgctcctttagctcagaggagtttgtcattacccaccttctgaagcctacttctgtcaatttgtcaatctcattctctgtccagttttttgcccttgctggcgaggagctgtgatcctttggaggagagaggcattctggtttttggaattttcagcctttttgcactggtttttcctcatcttcatggatttatctacctttggtctttgatgttagtgaacttcggatggggtttctgtgtggtcatcctttttgttgatgttgatgctattgctttctgtttgttagttttccttctaatagtcaggcccctcttctgcaggtctgctggagtttgctggaggtccactcgagaccctgtttgcctatcaccagcggaggctgaggaacagcaaagattgctgcctgctccttcctctggaagcttcgtcccagaggggcacccaccagatgccagctggagctctcctgtatgaggtgtctctcgacccctgctgggaggtatctccttggggtcagggacccacttgaggaggcagtctgtcccttatcagagcttgagtgctgtgttgggagatccgctggtctcttcatagctggcaggcaggcaaatttaagtctgctaaagctgcgcccacagctaccccttcccccaggtgctctgtcccagggaggtgggggttttatctataagcccctgactggggctgctgcctttcttttagagatgccctgcccggagaggaggaatctagagaggcagtctggccacagcagcttttgagagctgtggtgggctccacccagtccaaacttcctggtggctttgtttacactgtgaggggaaaactgcctactcaaacctcagtaatggtggacgcccctacccccaccaagctggagcattgtccaggtggatttcagactgctgtgctggcagagagaatttcaagccagtggatcttagtttgctgggctccatgggtgtgggatttgctgagcaagatcacttggctccctggcttcagccccctttccaggggactgaacagttctgtctcactggggttccaggcaccactgggatatgaaaagaaactcctgcagctagctaggtatctgctcaaatggccgcccagttttctgcttgaaactcagggcactggagggaatctcctggtctgcaggttgcaaagacagtgggaaaagcatagtatctggaccagatagcacggtccttcactcgtggccctaggggagggagtttcctgaccccttgtgcttcccaggtgaggcgacaccccaccctgcttctgctccccttggtgggctacacccactgtctaaccagtcccaatgaaatgaggtaggtatctcagttggaaatgcagaaatcacccgccttctgcgttggtcttgctgggcactacagactggaactgttcctattcggccatctttcccggtaatcccctggttttatgtctttatagcttatttttccattaaaattttgtaatcagcttgtctagtatcaaataaaatatttttggtgttttcattaggatgatgttacatttagagatgaatttaggtagacttgacatttccatagtgttgagtctctatatttagaacatagtatattttactattcaggtcttcctttattcccaacaatatgtattccctttttcatgattgattgactgattaatttttagagctgcaatctcactctgtcgcccaggctgtgtacagtagtgtgatcatagctcactacagtctcaaactcctgggctcaagcgatcttcctgcctcagcctaccaagtagctaggactccaggcagatgccaccacgtctagctaatttttaaaattttttatagagatgatgtctctctatgttgcctaggctggtctcgaactcctggcctcaagcaattcttccaatcagtctctcaaagtgctgggattacaggcatgcaccaccatgcccagcccctttctcttgtttttaaattgctacatatgtgtatatgcaatgtttttaattaaaaaaactttacagaaagcacctgacctgtaattacctagattaaaaaacaaaaatagaactttgccagagaaaggaaaatagaaactcttgatcagagaagagtacgtggaataccctgtggcccttcctaagtaatatactttttgacttagtgatcatcatttccttgctttacagtcttactgcccatgtaggcatctctaaataacatagtttgcctgatctggtgcttcaaataaatatagtcatgccacatatattcttttgtgtctcacgtgtccgtgtgaagagaccaccaaacaggctttgtgtgagcaacatggctgtttatttcacctgggtgcaggcgggctaagtccgaaaagagagtcagcaaaagggtggtgggattatcattagttcttataggttttgggataggcagtggagttaggagcaacgtttttcggacagggggtggatctcacaaagcacattctcaagggtggggagagttacagagaaccttcttaagggtgggggagattacaaagaaccttcttaaggatgggggaggtaacaaagtacattgatcagttagggtggggcagaaacaaatcacaatggtggaatgtcatcagttaaggctattttcacttcttttgtggatcttcagttgcttcaggccatctggatgtatatatgcaggtcacaggggatatgatggcttagctcgggctcagaggcctgacattgctgtcttttgctcaacatgtttatgaggtttgtccgtgaatgttgcctttttataaaacactttttaaaaattaatatattcagatcaccatataatttttaaaaatttctttcaaacatgaaacagaccttactttcctggaatgaatcaatccaacgtggatatataacttttatgttatattcatagtttatagccaaattcatcttacgaggactggtctacttctagtttacctttacctttactcctctgaagtggtcctttagaggtccttctgaaagcctaaatttttaccagggcctctcctccttagtgggttctgagctccagtttttgtccctgcagcactgaaaatggctagaagttcagtttagcttcttaagctctagattcggcttatacatctgcaaagaccttgagggggaaaatggtgccaaatgtcttacttctgtaaatttgcattctctatgagaatatttatactatatcttcagaactgattcttatttgtctagcttgtttggttgttctcagtgaggtagttggtctacataggctagtctgctataatcagaaggaaatatcaagaaataatataaattggcaatttaagattcagtcaaagtgcaaatagtattatcagtgaatagtgatgataattttatgtcgatgcctctgggaggaacaaaggtagcacaagctacctcaaataccagaaaagacatttaatatcctaagggttgctaaggtgatctggctgtggcatctgtcaccccaccaatctcagattaattctgatcatctcaaaagctgggcagaatctcccttctccctaattgcttcatatgtatcccaccagatgcttcctcctggtttaatcaattacccatgccaagaaatgaagagttatttatcctaacttctatgcatcttctcccacaatgtccaactggttaccaaattacgtctattttatctcccaatgtttatataatttgttcactcctttccatctccactgcctttgcttaggtctaactgttataatttgtctgagttattgaaaagacctctactgtcattcctctatcaaaacaaggaaagatctctctaaatacaaatctcgctcaaacttttggtactgtgcttaaaatccaaaagtggctctctataacccatagaatgaaattacatatgttatgtggctgtcctccctgtggcagatactgaaggcaggcaatgtgtgatgtgggatactcagaaacttctgtccttgttcagggactacccctttccagcatatgactggagcacatgacaacctctctggaccttgatttcctcctttacaagaagaggaaattgaaccagaatatttccaactccagtgactttgtgattctgaatcattgccttaaaatatattgtttgcttttaaaaattaatcttatgtttataccaacatccatattaggttgtacaaattttatgtagaataatctcagacatcaactatgtaatttttatgtagcaacaattgattttatctgcagtgattcatgactcaagtgggaaactaaatcccgatttaactaaatcattttaattgacgttctccaccattaaaaggcctgtagaagtccctcaagattaagatacatgcaacctgtgatcctagaaatcccttcctctgtactagcctgaagtgtgagggttatcttattatccagttacatctcttgactctctgctcattcccacccttgcaaactaagctcttctctgttattctcagccccctcaacaaaaatacctcatactatccttctacatctcatgtgatgccccttcctccttgcatgctttctcccattgcccatgtctggctctctcttacttggcctttagaactcagctttgcctcacctcctctaattgccttctctctctttttctgggttaggtgtccctcctctttttcctgttctcttgacacactctgtagatatcactgtgcttctcaaactacattgtaatatatatatatatatatagagagagagagagagagagagagagaggcatttggatacatgcatatatatatatatacctcacataactttcagtgtgtggcagatttatggaaaattatgtttgtatttttcttaagttctcttaggaatatgtttcaaataagcatagctttccagactgatgttaatacttggttctagtcagaaaatcttgtcttcattttgtcatctttcttcttttgtgctggcaagagctgacagctatttaaatgagaattaaaaatagatccctgtgaagtacatgttccttttttttccctgccaggatataactgaccacagaactgggattatctttctctctcttaaaaaaaattctccatgggctgtgctatctaatatagataaaatctagtgatgaaaaaaataactcctaagagatattccagtggtccaaatacttttgccactcctattagaaaatatgcctttttcttattcttaaaggatattcaaataatttaaaggttaaagtgccaccagtttatgtcaaactggtgtttatgaaaaccataaaaatgaaatgccaccattataatctgtgattaatctacattgtgaatttgctttgactatgggatgtgtcttgcctttctgtattattatcacaaatggaagaacctcagcctgtggaaagtcggaactggggtgctggagaaaaagggtaactgtttgtcagagaaggaactatgtttgaaaggcttttggcctgaggaaggtagattctaatttatcgtcagaagtgactggagcaaacctggcttaagactgaggctgagaatgggctctaaggcacactctttgtttgtttgtttgtttgttttttgagacagggtctctctctgtcacccaggctggagtatactggtgcgatcacggtgcactgcggccttgacttccagggcttgggcagtcctcccacctcagcctcccaagtagctgggaacaggcttgtaccactacacctggctaattttttattttaattcttttgtagagatggggtttcactatattgcttagggtggttttgtactccagggctcaagtgatcctcctgcttcagcctcccaaagtgcttggattacaggtgtgagctaccgcacccggcctaaggcacactaaaaagatttgatatgcgattggatcatttgtttgttctttcatcaaatattcattgagttttataatgtattttataatgaagcctacatgacatccattatgtcacctcagggctgctggtcactctgaactaacaatatctcaggagactgggagttggttgggggtagcttgctgaacccagaagcaagctatgtgtgctccattgattctataatattccagaattcattcatttagcaaacattcactgacatttgttaagggcccagtgctgttctaaaccagctctgcagagatgaccctgacatagcgactgccaactatggttttcttagttggggagtgagggaggtaaagagaacattaagatgtcaggcagaggcaaagcctgggagcactgaggaggggtcattaagccaggcaaggagagtcacgaggcttctagaggaggtggccattgaactgactgtcaggaagtttgagagagtggtagccaaggaaagagaagggactttcagactttatccactttggtgttctctcttttgggagaccatggctatccattcacgacagattaatttacccttttatttcaacttctctcataatgagatttgagtcattctttctacaagtagttctcagcaaatctccaacccaggaaattcttccctatatctagctatgcccaccccttcctggaaatccagactctgtcctggagttctgacttttgtggaaaccatgagtagggtgttgatgatgaagttggaagatttgtgaatttatcctgtgttacttctgggattcagaatgctcagtgctggcatggaggaactcacatcgtaaggaggcactatgcgttttccttccactgtttatttttttgctaatttcttttcttttctgcaaaacagtcatattagccagtcagtggagtactttattagaggtagcatgctttagtagctatgtgtcacattgtaaaggagaactaagtttcataattatgaaaaatgcttagagtattcttgtatttatagttttctctgtgaagggaatgagtattctttataggattctgggcagttagtttacttttactgggacttcctggggaatgatgcactatgtgactggatactgcagtcggaatctgaaattgctccgtaaaacagctgtccaagtcacttgcatgcctctcttgaattctatgctccctaacaatccacatctctaacaaaactgtcatagttctatgtttattagtgatgggtctaagctctctgtgggtttttaaagataggtgtataacttcagtgtttcccgtcagctaaagtaaactacaccccatgttgtggggtgttgaggaagcactgcacacagattgtaagctttacatgtgagctttctattgtaaccaagcaactgacacattagacacccctttgccatcagcttacattctctgagaacttaggtcagtgcctaaaataaccctgttaattgtgggggcacatgtggaatgaaattccacttagcagtctgggagctgagtgactgaggatttgaaaccttgctatagttacagttcataacaagcgtctaggcagttagaccttaagtgttcaggtatggaaagaaagtcatatgttatgttttagattctgtttgtaaagctggttaactagagacagctgatgaaaaaccaaatcgacttgagttacaagatctgggctttctctgctctgctttcaacctgttggttggtggtggagtagctgacagaagcgaatggcttggctgagggacatgaagtgacagcagcctgtttaggaccacaccacattttggacctcttgctgtgcagttcaggtaggctgttgtttatctggcattccttataagactgacagaagtcattaaactgttcagtttcagagttgggcatgagaatctcaagcctctctcctgcacatagcacgtttatgttagtggacactgcttcactccctaactagacagtatgccaaatgaacgtcttcgtattgttgttacccaagttcacttaaattctaggacataagggaggctgagagcattcacacaaagtgcgacttatctggcgcgtggtaaaatgcatctttaaaatttaccttcctcttttctgttttattttccttattcttgttccaaaaggcaggcttttgtgtttgtgggaaacagtgggagaaaatgttaagcctgttagtatattccagaacatatggttttcttatttttttaaactgcttaatagggtctgggttttatttgaagagtaagatgaaaatcaacactactcttttccaaataaactcagttaaactactgtttgtgcccgtatcagtgtaagtaacataaattgctgcaatattgttgttcttcttaccccaatgttgacctgtattataaagtatcaaatttagttttggcttcaagtatctggcacataaagtaagtatacaaatgctgtataataagtatgtgaatgctgtaaatgatgctttgggacttctacctgattaggttatttaatccagcatttattcaaacttatacctcatgtcacatgacagacatattcctaaaacatgtaaatcaggttttgtaattagaatgacttaacacatacttggaaagctgatcacttttaaggaatctatgtataaaatgaatagagagttacaactaaatttatgctttgatggttcttttttgcatgtcaggttcttaaattgagattcactgatggtgcataactttggataagtttctcaggaacaaaaactgcatttttatgatcttgaagtatacacacagatgtacatgtatatgtacatgtgtatatatatgtatattatatgatcacatgaagcccttgggggtccttagaaggatgtctaaggggatttgggagtggcctattgatatattggatgttaaattgtgccttcggtggagaaagattttctggagagaagggtcatggtctgagacttgagattaaaaaaaaaaagttgaaaagaatattttcctactgtttgtatattaatgtcactaatatacttgaaaagctgcagtattattacccatctaacatattgttaatgtattgcagcctcaggaattattagcttgaaccatatgaaattgccaatatttgacaatttttgacctataaaaatggcaattttgtatggctcaacctagttatttaatgaacattaactcatattaatgaaaggttagccttaagtgcccaacagtagtcgtatgaaccaaatatattcttataattgaagtatgagagctgtctagttaaaaagtagatcatccagagttacttcctgtgaataaatccagtatgcatgtgttatgtccttcttttaattcttaacttctttgtttggtctcttaaaaagaacttatgtttctgccaagtgctgcctacggtgtttttgagatccggagaccgtgggcatacatcctcaatggctgggagttgatatttagcaggatttgggggttatctttgagaaagttcatcctctggatagcttgccagtaatcgaatgtgtgtcacagtgttagggtctctctatgcatagtatcttagtgttctttttccttttctagagtgaaatctgaagtcattgatttgaaacctttcctcatttttatataggtgtttggtgctataaattatctcctaagtcctgcttttagtgagaatctcatgttgtatgtttgttttcattcatttaaaatgctttctcatttacattttgactttcttgactcatggagtatttagaagtgcattatttcttttctaagtatttggggattttccaaaagtctttctataattcagttgtggtcagagaacatactttttataagttgaatcttttaaaatttattgagactcattttatgatcatagtctatcttgggaaatgttccatagacacttgaaaagaatgtattctactgttttagtagaaaagaaagtattctactgttttggttgactctcctaatttacctaaaatggcactaggtcaagttggttgctagtgttgttcacatcttctctctatgcccttagtgattttatatatatatatatttttttccaatcaatttttgaaagaggggcattaaaatctccaattaaaattgtgaatttgtctgtttctccttgaagttctttcagtttttgctatatgtattttgaagctgtctcattaggtgaattaacatttaggattgttgtgctccttgatgaactcatccctttatcattataaaatgatcctttttatccttggttatagtctttgctctgaaatttactttttctcatgtcaatatagccatttcagctttctttgaaagtcttttcttttttagggagtttcaatctaaggtatttatgtaaaaactgtgaaactaatttattaaaatacttattcgattaatcaaggtataagtagaattcactgatagttttcagtcgtccttctacaattccatttctacaatgttatggcttttatagtccttcctcctccattgtcatgtgactgtcattttacagcccacataatgcaagattttcatatacttaacatttagcatgaaatgagcactggccaattagaatgagtgccagatataaaaggtatggcttcactggtgcatgctggctgaatatcagtcctgaatatataacaattaatgtctcctgagttaggtgcaggagccattttttttccagtcattcatatgaaactctagcttctatagataccttaaaaattaaaataatctttaacacttagaattctaagcactatttagtaatcaaatatatcaatatgtatatcaacatcttaaggcatgacttctttatattaagggaaaattccacaacagaacttattttagatattggccttaaaacttttattttagatattgactattttatgtagcaaatatttgttcattaatccaccagtttgtttgctttttttaattgaggctttcctgtaggtcagccattgggaattcgaggatgagcaacactacttggtcttgcccttaagaaactactgtagtcagggagcgagaactattcccagttctggtgcactcaagatatcatgtggcagaggggtaagtgggcgggagggtgtaagaggacatcccttggcctcacaagatctctcaaggtgtaagagccaaaaacaatttaacttcatttacatatgtccaaaaaggtagcaattaatttgtaatctatactttgttccattcattgagaaacttcacttaccttgtaatcagcataccttcaataattttttttttttggtccatgtctggggttttactggaacccttcctttgctttccatactctatgtagcacatactacctagtggagtactcacacattgttggcactcagtaaatatttgttgaacaaataaatgaatgaatatttgcccctggtaccatggaggatataggaaaaaattggagctgttgttcagccctttcatgaactgggtattacctgaagaaagtgaagcatcttggctgttagcaatgttcaatttctttatcagagtagtggttacacatgtgttcaccttatgattatttgttatgatttatcaacttttatcaagctatatttcacaacacaaaaacttaaaacacatgataaaaaataagtgtaacagcaaaaaaaaaaaaaaaaaaaagagagaaagagtggaagaaggaattttaatttttaagcctcccaaagttctgggataataagcatgagctactgtgcccagcctgggctgtcattttttatacaattaggaaagttgttctgctccctccttcagttttggatgatgtttgattttagtcttatgtagacagatctttctgtattataatttacactgtttagaagataaatatggtagataatacaaagcagtgttattgttgctcagaatagaacttggataacatttttgacactgtaataataatattaaatatcactattaatatattacatgatggttgagatatttacataatatttattaatcttatcattggtatgtattataaaactaaaaatgatactgaatattattaatatatattttacatgtttagtttttcaatcattaatcacttaaaaagagagcgagattagacacagtattaatttgttacatggtttttaacctaaaactctgacaattttagttgatgaatactcattcataccaaagacctattattaggaatagaacttgttaaatatgtacatatgtacctgattaaaaaaactaaagctttgcagtaagaatttgtatttgtatgtaccaaaacaatatatctatatttagctcttatctataaaaatctaattgtaattgatatgtctaagaaacacccaaaactcagattttgattcttttttccaggatctttgtactttatccagttagactaggtctttactttcaagaaaagagagacgagaagagggaaggaaaactcacttaacatgtttcatcagcatgatccatgaagttatcagcaggaaatataaacagattattttaagcaatgatcttgctaacaaaatacttgaatgtgctttgtagagaagtagttacccacacataacccatgacctgttcatttggcagattgccatgaagtatttacttgataagattatttattgacatctagcttaaaatgaatattgcattatgtctgaatgtgattcttattacaaggacagagggataatacaatagtgaaccaatgatcacttcctatacttctgtcactctgtgacgctgagcatacttccccagagtccctggttggaaggagggcacacttactatatgggatgcataggtgccaatggttgaagttgtgttcatgcagcatatctacccagaattggtatggtgttgccagtgtaggtgctaatactacttagaatggtgaagatttgagtacagaagcttccctgagaagttctgtactttagtcttaattaccatatatggggaaaagtctgtatcaaaagggctgtgtattcttgactgatctttgtgtctcccaaccttttctctttttctttgctagttatgccagatgtttctagtgtctacaggtatgatggtcatagtcaccaccatatcataagataccttcccccattccctttatcctgacttggtataaacaagttcctttttcctttaccttaactggggcaggtatgtatacagggaaccttcaaatggactcttaaagaacaaaggtcaagccctgaagtttcccattgcaagtgcattctagcctgtggcacaccaaagtatttggaaagctctgctctatcagttattcaaggactgaggttccttccctcctaagcaaccctgtccaataaaaatacagtagaagccacaaatgaatcatacttgcgatttttaaattttctaaatcaagaaagtaaaaacacaataaattttaatatctcttatttaacccaatttgtccaaaatattgttttaacatgtaattaatataaaattattaataaacaatttcaaattcttttttgcacacaaagtttttgaaatccagtgtgtatcttatacttagaatacatctcaatttggactagcaaaaacatttcaagtgctaccacattggacagtacagatctagaggttcatttttctaggacctcagaatcctcgatcttcagaatccagtcagcagacaaggaaaagagagtacataaaatatctcaaaggaagttttaaggattcaacctggcaccaaagtatatcacttctacccacgttccattggccagtatttagtccatatgacctgatctaactaactgcccagggcacctggaaaatgtcatttagctgtgtgcccaggaggaaaaaaaaataggtttggcgagtacagagtagagtctttaccacagcataaggtattattattaccatattttacagatcaggaaattgatgcccaggcagattaactgacactcttgttaatgagaaaatgtaagtagatgcgaggtcttcactctctggagtgatatttcttccatcagactgcccttctttctttcctttatttgtccttcaacctcccctttaactctgtgcatgtagatgcagctcttgcagtaaacctatgtcttcaatattttatcacattggctctcctaggctgtactctgacttaatgacagtatcctattacttctgttttagaaaatgataagcgcccagtataatgaagcaaatatgccttattactggatcgtttaactaatagtactattttcagcattgcattatcattttgagtgggccttttccttcctcatactgaagctcctcattcaaagcaaaagattgttaaggtcctcatcaagccatttcaatcaatgtataaattgtattttatgttataatgaacagtctgttcaattgaagtttttagctttttaaaagtgcttagaagaatagtaacagaagtgctcttaatggtgaaattattgaactgaagtgcttggataagctgttttatttcttaaatgaaaggagatattttagatggagaaatgagataaatattcctcaaaggagactggtggtaaagagtgactgctctccatggattactgattataacacaagtgtccatcaagagcagcttttattgaagacagtttaattggaccactgccctttagctttaaattacccacggcaaactggtttagagtttttgttgctgtctgtcttatatttgtgaatatgaaatacatttacagagccaaaaatttaaaaatatgaaaagatatacagtgaaaacgccaccttttatactccaatgcagagagctggcctttctaacagtttctcccttttgtaacccaactttgtaggtactcattcttctcttcttgcatattcttctagaatttgtatatgcatttataagcaaatgtgaatatatattcttagttttcctcctgttttatcctatacatactgttctgcaccttgctttttaaactttatacaccatgaagatctttctgcgtcagaatataaagtcttcttattatcctcattcttatagttgtgtagtgctctactgaataaatgtaccatactgatgaacatttagtctgtttccaatctttggatattacaaactgtattgcaataaataagcttgaacataagtcatttcacaaaaaatgtaaacatattgcatacataaattctcagaagtagaattgctagtcaatatatatagtatatgcatttggaatttaatagaaatggccaaactgctttccacagtggttgcactaatttaccgtccaaccaggaatacttaatagtgcctatttcatgtgcctttccccatagattgtgttatgaaatttttttttgctctgtgtctgaaaatgatattttagtgtagcttaaaattatatttcttttactgtgagaaaagtgagcatcttttcatatgtttaacgatcatttgtgttacttgttctatgaactgtgctcatatcctttccctatttttcagttgtgttgttggtcttttcttttttgacttataggagctctgtatttattatggggataagctgtgtggtataagctgcaatattttttctaccagtttttcatttgtcttttgactttacttatggcatcttttttcattactatgcattccttttctttttctactgtagtcaaatttatctttcttttaatggccctggattttgaattcagaagtctttcttcactacagggttatatgtaacttacagggtttttttttctagtaatttttacattttgatccccttttgaatctttgatacatttgggatttatcaagatgtataatggatccaacttactttttgtcagatatttatctagttgttactcttcactgatttgagatgccccctttatcacatgcccaaatactcatgtatatatatttgggtttattttttgacttattcttcccaattatctgtctgcattcttgtctcaatcacatagttttaattactgagactttacaatatattttaatatttgctagactaggttgcccttattgcccttttttcagttttgtctgactattcctattgtccatttttttgttagaatccaactctttcccatcctacctttcaacccttccccccataaaaaggcaagtttgttattatttatattaacatatattaatgcattatattgatatattaattattttataagtatacacatacattgataaaatagcttagtgaggttgctattttgaggatatggagttttcctatccaataatatattttattattcaatttttcttcttaaaaaattattccatagtactttaaagttttcttcatttaggtcttccacatttctcttaagtttattctaaggtattttatctttgttattgctatattgttaatggaaccttcagttatagctaaaaagagcttgttatttgtatattttattactattgattttcaggtattaatttttttgttgtttgttttgtttgttttttgatatagggtcttgccctgttgtccaggcttgagtgtggtggcatgatcttgggtcatggcaacctttgcctcccaggctcaagcaattctcctgccccagccaccaaggtagctggcactacaggtgtgtgccaccacacctggctaatttttgtatttttagtagagacaggtttcgccatattggccaggctggtctcgaactcctgagctcaagtaatctccccacctcggcctcccagggtgctaggattacaggcatgagccaccatgcctggccatttggagatattaattttttattccattatctgattgaatgtttttgctttttggaatttttagtcaattattgagttttcccaaatatacaatcatatcatctttgaataatggtaggcttacctttttcttcccaatagttactcctctggtcccattacctttcattaagttattttgtcacaataaacaactctcagatcttcatggctgacaacaataagatacagtcgtgctcatgttacatacccattagggtaggcctcagctctgctccatgtctttgtcatctgggactacactaaaggagtggctccatctgggatatactagtcttctgaaatcagacaggaaagcgtgacaacagaaccaattgatggcttttagaattccagctaccttattttggctcacatttcattgtataaagcaagtcatatggccaagcctgatatcaatggtgcaaggaagtacagtcctttcatagggaggagcactgaatattagaaatgaagagtacaatctactataacctctaattaatttttccagataggcacagcaaacttcaaataacataatcataactcttagagcccactagctccaagtacttaatttgtatagacctataattgttagtgttaattatcagttggttctttctatatgacaaaccactgcagttgactcaaggtggctgatgttggccaggcttagcaggcaagttccttttcacatatctcgtatctgccttgaatcagtgagttggccaaggtagggctgcatctatggtgaggcaaatgagggacttctcaggcacaaaatttaagaggatgacaaaaaaaacttggtaatcaagatatatgatattttaatatagtatttttgaaaaccaaaattaatgcaaccaaatccatgatgaacaaaatatcaaaattttaaacaaagacagaaataagaacaatgctgtgccaagccatattggagcctaagccaaaagggaaaattagtaatacttattctgtctttatgaaaaattattgaaaaagtatcccttgagtgttatgtgtaaagtattatgttacatgcaaaatgtatatttttatttatgaggtatatataaatagagatgattctacttagttaagaagtcatacggtatttatatcaaataattgtagctcttttcacaattacagtctgataatatgcacagtagtttgagaattcattttttgaaatctcctttagacatttttgcatttttctttgaaagtcttacatggtggctaattttcatgctttttatggtagatttttttaaaaaacaggcaaaaattattaagggtcaagtgttgggtaagtaagcagggttaagctgggtattaatcttgatcaaaaataagaaatgggctaagcgtcgtggcatggacctgtagttcaagctactcgggaggctgaggcaggagaatcacttgaacccgggaagcagaggttgcagtgagccaagatcatgtcactgcactccagcttgggtgacagagtgagactccatctcaaataataataataatgataataattataaaatgagatatacacataaaaaagttaataaactgcaaatgccataaagttgttatttattattgatatagctaaacaagtttgggtttatgtgtttctgaatcaggggctggataactgatccattcacagatttattgattaatgaatggactgccctcacctaatggccgataagtctaggtgtgtctagatactcacatatgcatacataatcaaggccagatcttacaaccaagcatgactgaaattctggaggaagggacagggaacagttgatatagatgtggtagggactggtcaccccatagtagagcatttgctactctttgtagtcttttattttcagtttctacatcacgacagaacaaatagaactgtggcttttgggttgggtgtcatggctcacacctgtaatcccaatactttgggaagtcgaggcaggaggattgcctgaagccaggatttcaagaactatgacttttgtcatagttgggattacaggcacctgctaccacacccggctaatttttatatttttaccagagacggggtttcaccatgttagccaggctggtcttgaactcttgacctcaagtgatctgcccactttggcctcccaaagtgttgggattacaggtgtgagccaccacacccagcccctcattttagttcttttacctcaaaaaaattgcgcatctctttttctctgtgtgcatgtataattatacacattcatacacacatatacacacacacttcttaggaaaacattaagaaaaaaagtctaggtaaatgcttaaaaatcattttttttcctgagttatacaaaggaaggagacactggtgactagcataagataaattaaatatattagagggtttttgtttgttggctggcaagattgagtaaaatttttgaccatcttctttccagcttagtcagttatacacatattgtctgtatctatccaacaattgcttgttatttgtcagtgatattagtcaggtaattatagcatagcaaacctcaattgggcatttatagaattacttatagaaaagtaatcagacctgttccaaaatttgtagtctaatgtttgcacaaggcacagtagtaatcactaggataagtaaggtacaattcttcccctcaaagactttaccatccagtatctcacaatgtaagaaataatcttaaggtggaaggctttacaattagcaaaacagaaacacaggcctcaaattaacttctacatttaaaataagggtgttggaaacatcaaaatgcaatggctgggtagttgtgcttattaagtggtgtgtttgagcatcagaatgtatttggctgattcagcacattgtggtggttttttttttttcttccatttccatcctttttttccttcctacacacgcagcaaggtatttcactcagctgtgaaatatttaccattgcaaggcaacatataattaagtgccggaatgagtgatgcagtcaagtgctattggagatcagcggacaaagaattcagtgtggcctgggacaggcattgtagaggagacagggcttaaattggatcttgaaaaatatttgatcgagcacagaggagggataggatgatgatgcaagcaacagcaatgccatgagcaaaaggcaagaaccagaatgagtcaggcttatttcaaggatagtatgaaacccatgttctctgaaatgaggatctgggtaggaggtgaagctggcaaggtagactgggaagcagctgataatggtagaaaggaacaagccatggcctgcaagcccagagacctgagttctgtcactaactggtctgtgtctttggcaatcattgaatcttctacttcaattatctgtgatgtgaaatgatgctttcagactaaaaaaatctctaaggtggcttcctgttttaaagtattttgtgattcttttatggtgatccttgataaactggaattaggacttttgaatctatcctaacagtccttaaggttgttcttaacaagaaaatcacataatgaaagagggaattcatcacatagtgaaagaggtaattattggtattaaattcagtgaagaatgattgccttgggaaaagggattagacatactggaggaaggaaaccagcttgaaggctatgctgatagttcatatgggaacagggtagttgaaatagaaatcaaaaggagacagacactagaaccattgtttattcattctatgttgatcatcaaaactatgctaggttctgaagatccggttgtaggaaagacagaagaggcccctattcttgtggaacttacattctaacaaaaggaaaaactcagcaggatttggtgattgaccaataggatatttgtgcctttaagagaatgacacttactgcaaggccagatgtctagctacaaaggattgaccacataaatgttgaacattcataaaatgaaatactaggcagccatacggaattatgaaacatacttatttacatgggagactattcatatgttattgagttagaaaaacacaaatatagaatatgatctagaaaattatataccattttatatgaataataggattattagtgatttatctgattactcttcattcggtggttgtttattgagtacctactttttttttttttgatacggagtctcgctctgttgccaggctggagtgcagtggtgcaatctcggctcactgcaacctccacctcctgggttcagcgattctcctgcctcagcttcccaggtagctgggactataggcgtgcaccaccatgcccagctaattttgtatttttagtagagacggagtttcaccatgttggccaggatggtcttgatctcttgaccttgtgatcctgccttggcctcccaaagtgctgagattacaggcgtaagccaccatgccctgcctcttttttttttttttttttttttttgagagagtcttgctctgtctccaaggctggagtgcagtggcgcgatctcggctcactgcaacctctggctcctgggttcaagcgattctcgtacctcagcctcctgagtagctgggattacatgtgtacactaccacgcctggctaattttttttgtatttttagtagagacggggtttcgccatgttgtccaggctggtcttaaactcctgagctcaggcaatctgcccaccttggcttgtttattgagtacctactttgtaccaagcattgtttggggctcttaaggataagtggtaaacaagatggacacagtctgttattagttttttgtcttatcttttctaacttttttttgtaaggaactcacattatttttatggcaaaataatttcttaaaaaagtttaaaaaaatccttccattggccatttgtgtggtatgtgtgttttatgaattctccttgaccatacatttggagtgggtgcactcttttaaattacactgttctgtcctgtgtcttgtccaggtcttgcacaagataggaggtggctccaggacaccagtctccttcttagggtagattagggcactgtctgccctttggtgaagccagcgtggtcagaactcccagatttggtttggctccaaggcaaatagagtcctgctgggactctgctggctgtttatagtcctttcaagggtccggtcattccaaccttggtgtctatttacgtttgccgtatgttacttgacgctccttcattcccgttgaagctgcctctcccggaaatctctgtcattccataagccctagctgctgcctcaccgtgcagctgacctcatgcagattgaaaaacaaaatgtattctggctacatttaaaggaagttttgaggccagttgatgggcaaggacttggctgtattactttgtgggcggagcgcttaaagggggatctagcactggctagcaccagattccagggctcttacacaaaagcctttgtgttattttttcctccctctgcccagctcttctcccatgactactaatagtgtctctctgctataatgcactcatcattgccttctatttttaaaatgctagatcttgcatatgccaaagaacaaacaggcaagcaaaaagccaccgaattattaaaaagtattccatgttcctataataaattatataagtaaacatatggatacatatatatatgtgtatatatatgtgatatatatgtgtatatatatatatatgtgtatatatatgtatatatacatatatatatgtgtatatatatatacatatatatatgtgtatatatatatatatgaagaattacctacaatcttattccctggagatattttgatacaatttctctgtatacttgtttttactttgtgctcacatggtttttctaagcttttgttctaccacttatatagcctacttatagaccttaagctgtgtctgtaccaatgttttccacctaagatagacctattctttctatagagaacaaatgctattataatttggtacttaactactttttctaacttcaagatggcctcttggccctcatcatatgatcacagaatatttgttcatttcaaggaagcattcatttagtttttcgtgttagctctagttatgtgaaatctctggagtcatgctggccaatctaatccttactgtttggattctgtgataacaccgagggctccttggggtcactgatgatcttgagctttgcaccaacctgaaggaagaaggaggagaagacgttcctctgaccaaaatcatcccacacttaccctctatcatctgtttagagtgttagaacattgttgacatttgtgtgagcagtcctggagcacaaatccttgatacagtgtaagtgaatggacaagcaacacggacaaagtttaattgcagggtccatttttttgctagtttcagaaataaattttccttaggaatttccttgttgtcagtgttttctctctgattattgagttcagctcttttcaggccagacctctgtacatctagctttctctgtcttccagagtctgattagtgtcacaaagatgccatgcaattccaaagaggcaagatctttcttgtttcagtgtttcaggtctttctttaattcattctgtttacagaaatcatctactgctaccttcttggttttttttttttttttttgagacggagtctcactctgtggtccaggctggctggagtgcagtggtggatctcagctcactgcaacctccacctcctgggttcaagcaattctcctgcctcagcctccaaagtagctgggactacaggtatgtgccaccacgcctggctaatttttgtattttttaatagagatggggtttcaccatgttggccaggctggtctagaactcctgacctcaggtgacccacccacctcggcctcccaaagtgctaggattacaggttgtattaactattgataacccctttatatatttagttccccataccagttctttttgttcggccgtctacttttggccacacattttttcctcttttcactgagctaaactgagtgctgaattgcagtaataatctcattttaaatgtctcgttcatctttctctttcctgtgttttaaaattttatctttaatagtgtaccttactatttgtaagtcacctgccttctcccctctgttttggaagcaggtaaagtataaatcatagagagatcatataagttgtcccatccttgtaaatctctcacatagtcttatgcatattttctgtatctccagctcagttgtccctcattttgtttctttaattttattacttactttacttgttaatttacttgtagacatttggattttcactagacattcacaagatggtttctgtctgtagttaaatagtggtgggatgggcataagatttagggtactgtggaggggtgctttttaatcatgttgattaatgttgaaagaaatgacttgaggtttggttgatatttatatttactcagagctaattttttgattctgtttttccttttgtttgccttctgaaactccactcgttgtttgatatgagtagaattctgtgtgtataatcagagagaagaaagttctttctcactaagtttatggtcaatctaagtaagcaatgagtttaaaaattactttatagacgaaattaatctggaggtttagaaagtgcattgaaattgaatttgtttcttagctggcaactgatttcaaaactgaagcacttttgagtgctttgagggatgttagccaatgttataggattatttgaatgaacccttcatcctccattttggtgtgacattgggacattaataatgaatgattactgtacttggtggtcagatatgctattctgatccatgtttatttcccagaggggcctctggaaaagggcaatgagggtggatttaaaaccacagtattggaattcgataactttagtcttgctttgtatgtctagggcttgctgaagagtagttataatacggacagtcagtcaagcaaggagcaggcaaaataccaaaatagattttcataactcagacataagctggattctgtgttttaatttaggctctaatgctcagcaataaattttccagaaaatgttctagattgaaaatctatcagtacaaattatttgggttagtgaaagtaaacataagtttatataaactaattagcaaaaattatatgttgcaataaaccctaaggaattttgaaggactgaaattttagtcatgcaaagtttatccccaagggaggactaagttctcagatgtctttactcccccagtaattactcaaaggcttgaaagtggaagattctgtatcttagggtgttggggtcactccaggaggtaaacaagatcttgctttgtcaagtgatggaaactgtccatagaactatctcctcccttgtgggtttatatgaaaatgtagaagaggattggtaatctattcagctatactccagggcaaagcaatcaatcaaattaaaaaggagatggagtgagtaaggttcacattcccactcttatttcagattaataagtgtattttccttacctatgtctttatttcaattctgctaaacttaaggaaaaaacaatcagagcaaacacagttaataatcctagtaaccagaattaatgatatgttatttatctgtatacctggctaatgttacctggccacctgacatagagccctaaaagaatgagggtgactgtggagtgagagatccctgcttacacaaaaagaatgctgggaatctgaggatcctgctgctttggtataattcagttgcctgctttgatattatactttgtatccttcttgtgcatagtttgacatgcattccctgactgttgttttgccatggaactgacttaacctcttggttgtttaactttttattttttttcttatttctcacaaaagaaatacatctctagtggagaaaaattttaaacatacagataaacagtacaataaaaatcatttgtaatgctgccacctagagaaaatactatgaatagctttgacatattttttactttagtatacatagctatactttttttctatatagaactcttttataacttacttcttttctggtaacaatatgccttgaacatcttctgatgcgattaaatatattttacaatgtttttagcatctgtgcattttttttcattatgtggaataccacatcatgttaaactcatctctctttttataatttttcaccattataaacaagtatttgacagcatttcagtaggtaaattcattattgccttagaaaagaatcctgtgaataaaattgttgggtcaatgggaggtaatggagctttccaaaggttaatcgacagcttgccttcccatctacccgatatgaaagaatgatactggcttcagaatctggatttgttgttatctaattttcagaaccttaaccaaaggactttgatcctatgaggcttcatttcctgttctggactctcagatgtgagacctaaaaacttgtgtctataatattagctctcaacagacatactgtagttgtttaaatacaaatcaacagtcaagccagttgctgtggatatttatttatgtgggggaggaaggcatagaaacacatccttagaagctgtgccatggtcttactgatctaaatagataaaaagtacatctaagaaagagctgccaaaggtcatacaatgagtcagcaatgaaatcccaaatagaactttgatttccttaacttctttctcccagtagaaaaagtactaatgaataggtcaggagaaagcatttgtaaattaacctgtaagatcctttataccttgaaacactccaaaatttcaatggagttactagaaatttacatcagataaaacaaatctaaactgctaatggatattgatagattctttacaagataaaatcttaaatgactgtaatgaagaaaaagcaacaggtggtatagggagttgaaaatgagactcaaaggaatctgtgtatacctcttgcctgggaaaggataagtaggagggtggaggagtaatggcctgaacccagcatagcaactaaggaaaacacaacaaaaagggcctctcaggacattaatcctggagtgaaggtgggggtcttaactttcattctgaatgaaccatagacctttcctcctcagcttggtggtatggatctgcactgttatttcagggcctgtggcagggtgacctgcaggagtcctagaatgtattagtctgttctcatgctactaaaaaaagacatacctgagactgggtaatttataaaggaaagaggtttaatgggctcagttccacatggctgggaggcctcacaatcatggcagaaggcaaaggagaaacaaaggcaagtcttgcatggcggcaggcaagagagcttgtgcaggggaacttccatttataaaaccatcagatctcataagacttattcactaccaagagaacggtgtgggggaaactgcccccatgattcaatgatctccacccggccccacctttgacacatggggattattacaattcaaggtgaattttggttggggacacagcaaaactatatcagagagatacctttcaatgtacctaggactggaactcaagtcttctgattctcacttagtactcgttctactacttggaagaaataacagtaattttacaaggtttttcagagatatgtaaaaacttctgggtaactaaagcttgggctgtcttatgggtggagtacacaaaataaaagagaaagaaaacaaaagaaaatctttgggcttgagagtacaggtcacccatctagcactgtctttatagatgaggaaactgaggctcagcaatctatggggatacagataaccaatacacacaggggccaagaattcagactctctgatgcctagcgtgatgcaaagtgatctagatacattttttgcttcatatattcttttcatgatcatcttgaagctttcgtttcatggtttgtgaattcaatatcggtaacatcagtatgtattaagacttcatttacatgtggtactaaactctgtgaagcaaaatagacaaagtgcttgccctacaagaatttcctaaggcaaagagacatagacagaaatgacctatacaccactgaacaaacaaagcaaatatataaattgcataatttttgccatgtgagatggtgaatgaagagatgcttacagtctgttgcttgaagagaagacccatcttcataaccctgtgacctacagtagttacattggaaagaaaaacaaaagagtgcttcacctggcatacctagcattagagttgagtttctttggtatatcattgatgactatcttcagtgatttttgtcctttttgcgtattctgtgatgatctgcaaagactagaaggtttgctgaggcagaaagcctctcagggtatgccttctaaaaccaaagggcttttccctctttggaggagaattaatgatcacgtgtttttgtcatatttttattgagcctttttttccttctggatggaccttgaagatggtaaaggaacttataaattcccaatttttaaaactgtataatatgaactgtggtgaacagtgagactaggatataagttgtttgctctcaaagaccagataaagacaaatcagaggtgaaactcctctcttctgtgctgaaaaaaggcaccttgatcaggtttcttataaatacctgtcctagtctttcgcttcagtaccagtactagtagtagtattaagatagtattgctattctgaaactatcgtatatgtaatgtgaaataaaacgaaaagtaagtatgagatcttctaattctattaccacaaatttttggggtggaagaaaggaaatacggatatactatagaagatattaggtaaaaaccctgtattcctgaatttgaattggatatatcaattgtgaactcataggtgttttatttttcaatacatgtttttcctagctctattaatgaaaaaagcctagacacagtgaccaattcagtagtaatgaacagccctattgccttgatggtggtctgaaaaatcttttcccattaaaggaaaccaagccttcttagaaaaatatctgattttacatcacatacaagatgagcaaagaagctatcaaagattactattacagaatagtcaacttgaagctagattgaaggagatcccactggccaaagatgggcaactctcaataaggttagaactgcagtgaatcaaaagtggatcatatatgtttaaatccatgagtatgcaatgatatcaagtaagacgaccagttggttaccttctgaatatgacagaatcaattcatttcctcgaaaactagctaaagaaaattaaagaatcaaatatttatcttaactttcctttatgaattttacctgtatgagcaaatagttgataaagggaagcatcttctattgaagttattctagctaataaatgaaaacaaaatgatagaatatcatcatgctggaggctgttcaaagatggcagaataggaacagctgcagtctacagctcccagtgtaagtgacgcagaagacgggtgatttctgcgtttccaactgaggtactgggttcatctcactgaggattgttggacagtgggtgcagcctatggagtgtgagccaaagcagggcggggcatcacctcaccctaatagctgtgcttttccagtggtcttaccaaatggcacaccaggagattatatcctgcttctggctcagagggtcctatgcccacggagcctcgctcactgctagcacagcagtatgagagcgaactgcaaggcagcagcaaggctgggggaggggcgtccaccattgctgaggcttgagtaggtaaacaaagcagcctggaagctcgaactgggtggagcccactgcagctcaaggaggcctgcctacctctgtagactccacctctgtgggcagggcatagctgaacaaaaggcaacagaaacttctgcacacttaaacctccctgtctgacagttttgaagagagcagtggttctcctagcacggagtttgagatctgagaagggacagaccgcctcctcaagtgggtccctgacgcccgagtagcctaactgggagacacgtcccagaaggggccgactgacacctcatacagctgggtgcccctctgagacgaagcttccagaggaaggatcaggcagcaacatttaccgttctgcaacatttgctgttctgcagcctgtgctggtgatacccaggcaaacaggttctggagtggacctccagcaaactccaaaagacttgcagagggtcctgactgttagaaggaaaactaacaaacagaaaggacatctacaccaaaaccccatctgtccatcaccatcatcaaagaccaaaggtagacaaaaccacaaagatagggagaaaccagagcagaaaagctgaaaattctaaaaatcagagcacctcttttcctccaaaggaaagcagttcctcaccagcaatggaacaaagctggatggggaatgactttgatgagagaagaaggcttcagaggatcggtaataacagacttctctgagctaaaggaggatgtttgaacccatcgcaaagaagataaaaaccttgaaaaaagattagacgaatggctaactagaataaacagcatagaaaagaccttaaatgaactgttggagctgaaaaccatggcacgagaactacgtgacacatgcacaagcttcagtagccaattcgatcaagtggaagaaagggtatcagtgattgaagatcaaatgtatgaaatgaagcgagaagagaagtttagaagaaaaagagtaaaaagaaacgaacaaagcctccaagaaatatgggactatgtgaaaagaccaaatctacgtctgattggtgtacctgaaagtgacggggagaatggaaccaagttggaaaacactattcaggatattatccaggagaacttcaccaacctagaaaggcagaccaacattcaaattcaggaaatacagagaatgccacaaagatactccttgagaagagaaactccaagacacataattgtcagattcaccaaagttgaaatgaagaaaaacatgttaagggcagccagagagaaaggtcgggttacccacaaagggaagcccatcagactaacagcagatctctcagcagaaactctacaagccagaagagagtgggagccaatattcaacatcttaaagaaaagaattttcaacccagaatttcttatccagccaaactaagcttcagaagtgaaggagaaataaaatcctttacagacaagcaaatgctgagagattttgtcaccaccaggcctgccttacaagaactcctgaaggaagcactgaacatggaaaggaacgaccagtaccagccactgcaaaaacatgccaaattgtaaagaccattgaggctaggaagtaactgcatcaactaacgagcaaaataaccaactaacatcataatgacaggatgaaattcacacataacaatattaaccgtaagtgtaaatgggctaaatgctccaattaaaagacacagactggcaaattggataaagtgtcaagacccatcagtgtgctgtattcaggagacccatctcacatgcagagacacacaaaaactcaaaataaagggatggaggaagacctaccaagcaaatggaaaacaaaaaaaaagcaggggttgcaatcttagtctctgataaaacagaccttaaaccaacaaagatcaaaagacacaaagaaggccattacatagtggtaaagggatcaattcaacaggaagagctaactgtcctaaatatatatgcacccaatacaggagtacccagattcataaagcaagtccttagagacctacaaagagacttagactcccacataataataatgggagactttaacaccccactgtcaacattagacagatcaacgagacagaaagttaacaaggatatccaggaattcaactcagctctgcaccaagcagacataatagacatctacagaactctccaccccaaatcaacagaatatacattcttctcagcaccacatcacacttattccaaaattgaccacatagttggaaataaagcacccctcagcaaatgtaaaagaacagaaattataacaaactgtctctcagaccacaaggcaatcaaattagagctcaggattaagaaactcactcaaaactgctcaactacatggaaactgaataacctgctcctgaatgactactgggtacataactaaatgaaggcagaaataaagatgttctttgaaaccaacaagaacaaagacacaacataccagaatctctgggacacatttaaagcagtgtgtagagggaaatttatagcactaaatgcccacaagagaaagcaggaaagatctaaaattgataccctaacatcacaattaaaagaactagagaagcaagagcaaacacattcaaaagctagcagaaggcaagaattaactaagatcagagcagaactgaaggagatagagacacaaaaaacccttcaaaaaatcaatgaatccaggagctggttttttgaaaagatcaacaaagttgatagatcgctagcaagactaataaacaagaaaagagagaagaatcgaataggcacaataaaaaatgataaaggggatatcaccaccaatcccacagaaatacaaactaccatcagagaatactataaacacctcaacacaaataaactagaaaatctagaagaaatggataaattcctggacacatacaccctcccaagactaaaccaggaagaagttgaatctcttaaaccaataacaggctctgaaattgaggcagtaattagtagcctaccaaccaaaaaaagtctaggaccagacgcgttcatagccgaattctaccagaggtacaaagtggagctgctaccattccttctgaaactattccaatcaatagaaaaagagggaatcctccctaactcattttatgagactatcatcatcctgataccaaagcctggcagacacaacaaaaaaataattttagaccaatatccctgatgaacatcaatgcaaaaatcctcaataaaatactggcaaaccgaatccagcagcacatcaaaacacttatctaccaagatcaagttggcttcatccctttgatgcaaggctggttcaccatatgcaaatcaataaacataatccatcatataaacagaaccacagaaaccacatgattatctcaatagatgcagaaaaggcctttgacaaaattcaacagcccttcatgctaaaaactctcaataaattaggtattgatgggatgtatctcaaaataataagagctatttatgataaactcacagccaatatcatactgaatgggcaaaaactggaagcattccctttgaaaacgggcaccagacagggatgccctctctcaccactcctattcaacatagtgttggaagttctggccagggcaatcaagcaggagaaagaaataaagggtattcaattaggaaaagaggaagtcaaattgtccctgtttgcagatgacatgattttatatttagaaaaccccatcatctcagcctaaaatctccttaagctgataagcaacttcagcaaagtctcaggatacaaaatcaatgtgcaaaaatcacaagcattcctatacaccactaacagacaaacagagagccaaatcatgagtgaactcccactgacaattgcttcaaagagaataaaatacctaggaatccaacttacaagggatgtgaaggacctcttcaaggagaactacaaaccactgctcaatgaaataaaagaagacacaaacaaatggaagaacattccatgctcatggttaggaagaatcaatatcctgaaaatggccatactgcccaaggtaatttatagattcaatgccatccccatcaagctaccaatgactttcttcacagaattggaaaaaaactactttaaagttcatgtgcaaccaaaaaagagcctgtattgccaagacaatcctaagctaaaaggacaaagctggagacatcatgctacctgacttcaaactatactacaaggctacagtaaccaaaacagcatggtactggtaccaaaacagagttatagaccaatggaacagaacagagacttcagaaataataccacacatctacaaccatttgatctttgacaaacctgacgaaaacaagaaatggggaaaggattccctatttaataaatggtgctgggaaaactggctagctatatgtagaaatctgaaactggatccttccttacaccttatacaaaaattaattcaatatggattaaagacttaaatgttagacctaaaaccataaaaaccctagaagaaaacctaggcaataccattcaggacataggcatgggcaagtacttcatgactgaaacaccaaaagcaatggcaacaaaagccaaaattgacaaatgggatctaattaaactaaagagcttctgcacagcaaaagaaactaccatcagagtgaacaggcaacctacagaatgggagaaaaattttacaatctacccatctgacaaagggctaatatccagaatctacaaagaacttaaacaaacttacaagaaaaaatcaaacaaccccaacaaaaagtgggcaaaggatatgaacagacacttttcaaaagaagacatttatgcagctaacagacacatgaaaaaaatgctcatcatcactggccatcagagaaatgcgaatcaaaatcacaatgagataccatctcacaccagttagaatggtgatcattaagaagtcaggaaacaacaggtgctggagaggatgtggagaaataggaacatttttatactgttggtgggagtgtaaactagttcaaccgttgtggaagacagtgtggcgattcctcggggatctagaactagaaataccattttacccagccatcccattactgggtatatacccaaaggattataaagacacatgcacacgttatgtttaatggggcactattcacaatagcaaagacttggaactaacccaaatgtccatcaatgatagactagattaagaaaatgtggcacatatacaccatggaatgctatgcagccacaaaaaaggatgagttcatgtcctttgtagggacatggatgaagctggaaaccatcattctgagcaaactatcaccaaggacaaaaaaccaaacaccgcatgttctcactcataggtgggaattgaacaatgagaacacttggacacagggtggggaacatcacacaccggggcctgtcttggggtgggggaaggggggggagggataacattaggagatatacctaatgtaaatgatgagttaatgggtgcagcacaccaacatggcacatgtatacatatgtaacaaacctgcacgttgtgcacatgttccctagaacttaaagtagaattttttaaaaaaagaatatcatcatgctacaactcccaatacattaacagatctaggcaccgctgaccagcaattactaaaatagttgatatcaccaactatcgaaaaaagaacaaaaatcaaagttgaatacctctctctctctcttttttttttttttgagacggggtctgattctgtcgcccaggctagagtgcagtgatgtgatctcagctcactgcaacatccgcctcccagggtcaagccatcctcccacctcagcttcctgaatagctgagaccacaggcacacatcactatgtctggctaatttttgtattttttgtagagatggggtctcactttgtcgcccagactggtctcgagctcctgagccaagcgatctgccggcctcagcctctcaaagtgccaggttgcaggtgtgagccaccatgcctggccatgaagttaaatactcctcctgattaaaaaaaaaaaaaaaaaaaaagactgtggtacttactgttttgtcaaagaaattgaagctgaggtgaatcaggcctcaggatccagatgccagtttttagaaagtaaagaggacagaataactggcaggctggattgcttcatgtggcttcaatcaacaaatccaaattgtggaaaactctgcaggtctaatgcccgaagttcttcaacagataaattgtatgaaaaaggaaatacagatagaaaaacagattaaaagagacttaagctgggtgtggtaacacgtgcctataatccagctactccaaaggctaaggtgggcacatcatttgagactagcctaggccaaacagcaagagcctgtttcaaaaaaaaaaatggagaagagacttaaaagacatatcaagataaaaactgggcaaaagtaaattattatatgcaggtactcttgtgcgggaatgattgctgtgcaaatcaggatagtggtcacttttggagggatgaagcctctgtgatggaaaggggacaggcggaagcagttctggggtggggatggctggtaaagttctaaattttggcctgggtggttgttacaagagtgttttccttataataatttactaagccatatatataaacatctggtatacatgtaaatagcatatttactatatacatatatattacatacatatattaaatatatttatttgtgtgtgtgagacagtcatttgtttcattttatgataaagtgtacaaaaaagcaaaagagaaggcatgttagaaaaatccacaaacctgatgctgccctagagattattacaacactatcagtactgggtaaataaagttatggaatgttgttttctggcgcacaaagaatgtaaattctactgtagatatatttgtgtaatatcagtggtgggctacctttcaagtgctgggagcttttgcttttacagtgcttagcagcaggcttgcacgtagttcccacttcagcatcagtcagcctagacagatgacccatttctggctccgtgtttttcaatgtgtggtgcatagaacaccagcatgatggccatcacatgcttaagaaaatgcaggttctttggccctagctgtcttgaaaaggagtagcccaggaatatgcatggttaacaagcacactgcaaggtaagaaccaccactgtcttctctattaatttctacctgaaacactgctaaaaaaaatcagttctatgaagatgtcttggggaaggtatagatattctgaacaatttccagaagagctattgagagtcaagaccacagccatgatttttttagtgaatgaactcagattttgatcctgcattgtgtcatgtagaatactgaatgcaagaatgactaagcagtagcttgcttagaaaaacaatttctccagtgtacaataacaatggtcagttttcctccaaactttttgtttagggtttattcctggtcaaataagtcagagcctggtattaggtatttaaagtgatagctcaataaatgaatcctctgaagctttttaataacaattttatgcaaaaaattttcaaagcatggaaagcaaagcaatctacgtttgtatatggccaggtatatcctgacagaacttctaattggtcctttctcagttgaaggcagaggagactttcagagacgtgaaggcagaagtgtgaatgcttccaagactgtattctgcatcttcatcattctctttctatcatctcttccacgcttccaaatctgctcgctttttcagaccctctcctaatcaaagcaggaggtgacccaatgtcagtgactgctgacattacttgctgagtaagtgccaattagtgtaaatatacttcagaaagaaatttaagctactatttgctttttaggggtttacctctaatttgtaaaatacaatattttatccaattgaattcgacttcacaaacatcctttgcatctgtatggcggtgtcctaacagtgtggcattatagataaccaagacaaataagacacatttcctgcttctagaaagatacagtctagttagggagatggatgagtaacagccaataataatagcaaatcatttccacataaattagctcattttagtcatcacactctcataattttagcactaaaaagaataactactgtttatagagttcttcaaactttggagagaagttctgtgattatcataaaaagtcaggattattcccactgcgctccattatggtcattctttttttattatttttaaatttgagacagggtctcactctattgcccaggctggagtacagtggtgtgatcatggctcactgtagccttgacctcctgggctcaagtgatcctccctcctcatcttcccaagtagctgggactacaggtgtatgccaccaggtctggataatttttttatttttatttttttgagacagccttgccctgtcgcccaggttggagtgcagtggcgaaatctcagctcactgcaacctctgcctcccggggtcaagtgatcctcctgcttcagcctccagagtagcttggatgacaggcacctgccaccatgccccactaatttttgtatttttagtagagatgcagtttcaccacattgccccggctggtctcaaactcatgaactcaagtgatccgtccaccttagcccccacaaagtgctggcattacagatgtgagccacagtgcctggcccaggcttgcatactttttgtatcttttgtagagatgggtttttgccacattgcccagggtggtctcaaactcctgggctcaaggggtccttcgaccttggcctcccaaagtgatgggattgcaggtgtgagccaccatgttcagcccattatagttaattcttaatatgacaaaagaagaaactaggcttattagaaaagtgtatttgctagaggaaaaataaagaagaggtagtctagtttgtgtttttttaaatagtatttttgtaaccagtttagattcacagcaaaattaagaggcaggcacagaggtagcccttatatccccttgcattaaggtttccacacatgcatagctttccacattgtcagcacctcccactagggtggtacatttgttacaattgatgaacctactttggcacatcattatcaccccaattccatagtgtacatagtgtacattgggttcactctgtcttgtacattctatagattttgaggaatattaaattatgtgtatccacctttatagtatatagaacagtttcactgccataaacatcctcttctctacttagtcttccctccttgccccaaacggtctgggagccactgctttgccttttccggaatgtcatataaatggaatagtacggtttgtagccttttcagattgacttctttcacttagtaatatacatttaaggttcctcatgtcttttcatagcttgatagcttacttctttttagcactgactaatattctattgtctagatataccaaagtttatccattcacctactgaactccttggttgcttccaagttttggcaatccttggttgcttccaagttgtggcaattatgaataaagccgctataaacatctgtgtgcaggtttttctgtggatatgagttttcaactcctttgggtaaaaaccaaggagtgcgattgctggtttttatggtgagaatatgtttagctttgtaagaaaccaccaaactgcattcccactacaatgaatgagagttcctcttactccacatcctcaccagcatttggtgttgtcaatattctgaattttggccattctaatgattatgtaatggtatctcattgttttaatggtatctcattgttttaatttgcatttccctgatgacttatcatatggaaccatcttttcatattcttatttgtcatctgtctattttctttggtgaggcatctgttaaggtctttggactgttttttaattgggttgtttgttttctttttgttgagctttaagacttctttatatattttgaataatgatccttcataagtcttttgcaaatattttctcccagtctgtggcttgtcttttcattcttttaatgatgtctttcacagaacataaatatttaattttaatgaagtcagcttattaattctttcatagattgtgcctttggtgttgtatctattaacaaaaagtcattgccaaacccaaggtaatctagattttcttctatgatatcttataggattttatggttttgcattttacccttaggtctgtgatatattttgagttaatttttgttaagggtgtaaggtctatgtctaggattatcattattattattacttgctagtagatgtccaattccagcaccatttgttgagaagactgtcttttctctattgtgttgcctttgctcctttgtcgaacatcagttaactattacttatgtgggtctacctctaggctgtctagtaggtctacccttaagtctgtgatatattttgagttaatttgtgttaagggtgtaaggtcaatgtctaggattatcattattattattatttgcttgtagatgtccagttccagcaccgtttgttgaaaagactgtcttttctctattgtgttgcctttgctcctttgtcaaagatcagttaactgttacttatgggggcctacctctaggctgtctattctgttcattgatctgtttgtctgttcttttgccaatataattgtcttgattaatgtagctttgtagtaaatcttgaagttgggtaatgttagtccccccgttgagttctttttaaacattgttttggatattctgggtcttttgcctcacataaactttattattattattattttttagacagagtctagctctgtcccccaggctggagtgcaatggcgtgatctcggctcactgcaacctctgcctcttgggttcaagtgattctcctgcctcagcttcccaagtagctgggattacaggcatgcaacaccgctcccagctaatttttgtattcttagtagagtttggatttcaccatgttggccaggcttgtcttaaactcctgacttcaggtgatccacctgcctcagcctcccagagtgctaggattacaggtgtgagccaccgtgccgagcctcttcacataaactttagaatcagtttgttatctataaaataactttctgggttttttactgagttgaggctgtacatcaagttgggaagaactaacatcttgataatattgagtcttcctatccagaaacatggaataccactgcatgtatttacttccttgatttctttcatcagagtttgcagttttcatatagatcttgtacatatgtttttagatttatacctaagatttcatttggggggatgctagtataaatggtattgtgttttttatttcatattccaattgttcattgctggtatataggaaagcaattgacttttgtatattaacctcatattctgcaacgttgctatgattgcttattagtcccaggagtctactttttttttccatcctgtcagattttctacatagacgatcatgtcatctttgaacaagacagtttcatttcttccttccaaatctatgccttttctttcctctttttatcttattgcaatagctaggacttctagtatgatgttgtaaaggagtgctgagaggaggcatccttgccttgctgtcagtctttgcgggaaaacttctagtttctcactgttaagtttgctgttagctataggttttttgtagatattctttatcaagttgagaaagttcccctgtacttctcctttactgagagggatagttcacttttggggaaataaaaatattttgccatagggaaatctatcactctgtttttggagaaagtatgattttgatagtcaactgaagattatactctgcaataggaagattttttgtataaagttgcaatttcaatttcaaaggtttacttgtgagttttattgcaactaactgtgatatttctttaatctgtattttaaaatataaaatacatgtattaggtcagaatctctttttagctttctgtaataaacacatacacatatggtgaacatatgggtaaagaaacttttttttttttttttttttttttggagacaggttcttgctttaagacagtttttttttggagacaggttcttgctttaagacaggttattttattgctttggccaggctggagtacagcggtacgatcatggctcactgcagcctacacctcgtgggctgaaggcattttcccacttcagcttcccaagtagctgggaccacaggtgtgtgccaccacacttgactaatttttaaaaatttttatagtgatggggtctcctgtgttgcccaggctggtctcgaactcctgagtccaagcaattctcctgcctcagtctcccaaagtgctgggattacaggcatgagccacctcacccagacattaggggaatttgcctttctttccttctttttttttgtgtgtgtgttttagaggattgcatttgtgcaactttgtggaactgaggtgccaagtgttgcttcagtacctgggtgaggatgttgctgggagggcagacttccttccagatgcacatggagccctggagattggcaatttgaggcaccttggcagaatgttgatccatgtacatttgtaatttcacagggaaacctttaagatgttttgagagtgattgagaaagggtatgatggcctcatgatgaggcagcaaagagatcgtctcccagggacaattagcaggaactgagaagtcacactcaagagttattacagtaagcattcagagcaatcacaagaagggtgcctcatttctgtctctagctggtgaaaactggacatactggttaaatatatgagttaccttaacatccctgtatttgtttagaagaaataagatacaatgaaaaagtgtacaataatatgttttacaaaaggaaaaggtacccctctcacataagcatacaacccaatttaaaaaacaaaaaacaaaaaacaaaaaacaaaaaaaccaacggactcagccaactagagtttatttgtaaacagtctcaggtcacctcagtgtttgtatcagctgcttcagtaaccacagaagattcctgtctcattgactggagacagcagcttcaattttgagacagcaaggtatctggaaggttgagtgaagtcagcaattggtaacataatgtattcaatacattttggtctgtgagtactgcatgccatggtgctattatgctatatgtgaattaaacaaagcaatgtagagggtcactttcccacattagcacagtaatatctgtggaaaaaaatcttatgcaacttttaagatattgttaaccattgtcatttgtgttaactcactttgagatgggcttctgattagcttcattttcctttatacttgctagaaaataatatgggagctacacagaattactatataaaattagtgctgatgatcacagtaccgtcatgactttaaagagttgtgctttttgtaattttcaagaatacgaaggcagtatgtgatccaaaatgaattttatgtgtattttactgagactataaactgcttttcctgtaattagtttaaaaattatcatacagcagagttgactttctttttggtgtacagcttaacccatgtgtagatttgcataacacctccacaatctataccaaacagttccatcagtctgcaaaactcccttgtgctatcagtttagaatcatgccctccccatccccagtctctagtagtcactcatctattgtctatcattatagttttgtcttatgagaatattatttatataaatagaattatacagtgtgtaacattttgagactggcttctttcacttagtgtaatgcctttgagatttatccaaattgttacatgtatagtggttcactttttaaaaaactgctgcatagtgtataggcataccatagttcatttatctgtttacacattgaaggaccacttacccatgatcagtttacctattgaaggttttagcaattgtgggtggagcttcttttcatttttgtgtgcatgtaagttttcatttctcttggataaacacccaggagtgggattgctgggtcatattggtaattgtatgcttaattttataagaaactgctaacctgttttccagagtgactgtgccattctgaattcccataagcagcataggagagttccagttgttctagaagtccttagcagttggtgctgtcagtaatttttttattctaggcatttgaacgggtgtaaactggtatctcattgtggttttaatttacatttccatcttggcttatgtagttgaagattttgtaatgtgtttatttgccatcattatatctactttggtaggtcagcacttatgggaagggtgtttttttccccttaggggtccatctgcttctgtgggaatggggccaatttaccttgcccagttatgtagggagtaggatgtgaaaacctaagttaactggcaccaatgataccttagtgccctttatatattgttttccctggatagtttcctggcaatcttgacccatgaccttgttctgactacgttcctacatctattacaaaggagccaaatcatgtataagaggaacagatggcatgtgcttttacatgatgctttcgtggtgccaagtctctatgtaacattttgtattgcaggatggtgtggagtagatgagaaatgtatatatggctattctgagctggtagcataaaggttacccaagtgtttttctctcctaggtatgtaagatattctgcatctttagcatcaaagtgagatgccagagacagaggctaacaaatctgagttatgaatcaggagtatgagggagtggagactactgccaagatagtagttgaacagtgataactatagatgctccccatatcagaggcataccccatagatgctagcaggagggtagtatttgaggaaagggtcactggagaagctggtggcatggatgaggctgaagagcacctgtagtgggagacaggagtgaaaaagttgaacaaatagaggttggtggcataggggaatttctgatattgttacacaggtgaagtgatagtgaagtccacagtagagctagggtagagacttgtcccagtggaatggatatgaaggtcctgggagctgtagagtaaaggaaatctgaggctaccatgttggttggttcatcattgtcaatactgacattaccaaagataacgccatgcttggtatagagagagtgaaatgtgaaccacttgcattcttcagtgtaatgtagaggagtaaaagggaagaatgtaggtaacagcaatgagggaggaagatggtaaggtttatcagactaggcacctactgggaaaaaagggtgttagtatgagagtgaaagagtaatgatcagaaagtgccaaagtggctaaaaggcattgaggccagcctttcccccatcatccctactatagtgtctcaggtgaggactgggagaatgagcagccttccctgggaggacaacaggggaagtgggattcttgggcagaatcaggtttgggtgagtccaggtagtagatggattctgtgaagaagttaaggagtgtttttttacaacagaatggggggaagtgtacagaatttggaagaactcagccgtgggagggagggagtttctcaaagtggcacagaacaacacagaaatgaacatcctaagaggacaaaagatacaggcatttattttggggtagtggtcaagaggtgtggggaatacatgaagtaggtgctccaaccagaaatcccgggcaatgtggaatatctgatgatagcagtgagagccctgctcttttgtgatgaggccagcagagacgagctaatctggctgtgattggttcccatgcactggctaatagattttttgccctaaatttcttttggattgcattaccttgtgggtcacatttgggagaaccttacctaattagtgcttcaaagttcatctagtttaaacttttgctctgtttcaagttataatcaccagtttgcaccactgtcaccaattagttcttgggtttcaagaactaatattggagcactcattggaattgtacaacaattaatattcataatttagcacaatttatcattcttcaatagattttttcccttgtacatttttaaatacagattatatattttcatttttctctttaaaaaagtaactgaattacatgaaatcagaaggttatgtttccagcatagaatgaccgttttgacactgatggtagggctcagaactcaaatgctatcttcaaattttggccttaacaaaaatcataaataaaagctcagttttaaaaaatcactaatgtaaaactaaaaacgagcaactgagcccttttagctgacaccatcattttgatgcttaatggtctcttaaattgtccaagtaaatactaccattgatgccactcatttcatgctgctggcctctgacagcacgatggaaatttgggaacttgtaagaacaagtgacatgtcagataccaaatcttcctacctaatagtatgtgtcaaggagactgagactgagttagtaatgtttttgtttaaaatgtctgcatgaaacgaaacaaaattgtattttgtcttttttcatctttggaatttttctggctttgtttcataagagtgattctgcttgcaaagtgtgggttgaaaatttcgatatccactgtgaatttaggctgggtgcggtggctcaggcctgtaatcccagcactttgggaggctgaggtgggtggatcacctgaggtcaggagttcaagaccagcctggccaacctggtgaaaccccgtctgtactaaaaacacaaaaattagcggggcgtgtggcagccgcctgtaatctcagctacttgggaagctgaggcaggagaattgcttgaacccgataggtggaggttgcagtgagctgagattgcgccattgcattccagcctatgtgacaagagtgaaactctatctaaaaaaaaaaaaacaaaaacaaaccaaaaaaaaaaaaaaaacactgaatttgaatattaagttgtatacttgtgggagagtgacaattgccccttacatcaaataccccgtagttcattgagaatggctgagagtgcctatgaagcacacattctaggttatctttcttcaaaggtgtctaggtgatgtttctaacctgaaatattgtgtgcccagtgtagcttagtgctagcaaataaaacagccactggttcccttccagaatacccaacaaacaataaaaaagagagcagtgaattggagagatgcacctctcaccttggctgactttcaatttgggcatctgatggaatagtaggatttgtgtggtttagaaaaagattgatttacctaaatgaccgaaggcccagtgcacaggaatatggcctgcaactgggtatctgaactaaaacaaaggccccaggtatccaatgtgctactgttggccctgataattggtgttaggtaagagtgtacttttctactaccctcacctccctccaggataaggcaaagtagtcctcacatatgttgcttttctttactgcaggacatttgtgaagatatttctgatcatgttgagcaaatccatgccctccttgaaacagagttctccctaaagctgctgtcttactctgtcaacgtgatagtggacatccacgcagtgcagctcctctggcaccagcttcgagtctcagtgctggttctgcgggagcgcattctgcaaggtctgcaggacgccaatggcaactacactaggcagacggacattctgcaagctttctctgaagagacaaaagaggtgagtgttttccttgaagttaagcaatgcatttccaggtatgaccaattgagaatgttttcagtttagagatgtaggataggaattctttgtaggtaaataagcaggccctgatgggctttgaatctaggcatagtgactagaagctagggcacttccaatatgaatggggctttagaccagagttagctcatacctggtaatttgcacatatgccattcattgttattgatgctaacctggcttccttttcctcttcaattatttaataaatatgtattgagtacttattatgtgtcagacactcagtgctaagaatataataatgatcaaaacatggtttctgtcttcaagtagctttgagtctagaggaaaatggagccaagtgaatagacattcaagccaaactgtgataagtctacaagatgccattggaggacagagaaagagtcacctaattcagatgggaggctttccaaaagaaatgactctacctgagacgtaaaggagagacaggaatagactggtgaacagaggcagaacatgttctaggcagaggacatggcattatcaaatacccagagataagaaagagaatggcaggcccagagagctgccagtagcactggagcaaaaagcccaaggaaccaggaggcgggatttgggctaataggtaagctgaggtcagatcatgaagataaagagctttctaaatccatattaagagatttggacttcattttgaggacaaaagaagtgtttgttcagcaaactcccatgattcatgttttagaagaatcattctagatacagtgaatcaaatggacattagaatattatacaaaatatatttgatttttcttatttatattcagtacctgaaagattttattgttattcttgatgaataacttaagaatggaccctgtacatctgaattcgagtgaactgtctcattcttaaatacaatggacatatatttatagaaaaaaaagtgtttttgcttgctaagcagcggctgtatgtatacatatatgtacggataccatatatggatacgttgcatgtagggagtggtgggtgtgtacgcgcaggcatgtgtgtttagtccttcggctcttaatacccagtttagtgttctactattagtttgtggaaaacatatattctacaagtttataaggcacttacattaatatatgagattaaaaggccttataatgagtgttgcataattcattaatttattgacattaatgtttcagtggctccaacattatcaacaacaccaaacaaatctgtgcctattctcataaatcatttattgttgttgatttttgtttattcaaaataaagtttcttgctgtggcaaactctccgcagtgcctagaagtctataggaatcaaaatcgactaggcttacctctaactttaagtcacagtctttgttttcagttagctctccttgttactgtggcaggacttcagtagagtaaccacgggatgaatatgtgagttgcgtgttagttcccagatgccatccctcccaagttagatccctagagggttctcaactgggactgttgtggttatgggagactacaaagaatctcaagctgaccaactttgccctaaatctgatatccttgatagaatgtgctaatggagatcagagatgaggaaggtttgtataacctctagagagatctttctttagatatctacctggcatcttcaagtctatatattcttttcttcccccttccccatttgttgtccaacacccagtgctctgtccaacatccaatgctggtcagtgatcaaatctgcctgctttctactactagaaggagattaaaaatcattgattcaaatcatatatttattaaatcaataaacatttattgataatcagctctgttgtaggagctggagatatagcagtgctctagggtttgttgttattattgttctgtggaatacattcatcatacacttaattgaacttgtatcattcatgaagtagtagctcaataaatgatgaagagccatggacggtaattgttgctggccactgtttttacaactgtgttgtgaatttacaataagtagcatctattctcacaacacgaactcagcaattatgaatggatttgattggaagcagtttagtgcattcttatgtttgaagtcagtctttagtcctgttgtagagattgcagaaaatttttgtgtgaggggtaaaggaacagtagattttcagttatccgctttatggatatatttctatgaattaaagttctgcctctataaccatacttcctgaaattagatttctgatcctttatttctgtgtgtctagtgtgactctatgaggatgtttaaaagactgcttagttttatttatttctgctagcacaatggaattgtaaaaagcaggaagataattaggataaaattatcagctttctcagaataaattcaactatgaaagatttgtagaatgatgagggaaatggcaaaataaaaaaacacccaaatttaaaaagcactggtaaattagaatagtagatgtccttccagtaaaggaagattcatttttctctttctggaagttagttaaatttcagagccatattaaagagcaagtttgaaactctggagagtggcaaattccatcttcttctcttcttgaaaaaacaatatatgaactttattctttatttaaatatggagcagaccatatctagtaaaaaaaaattggccaataccttactaaaataaaactagtcaataactaaacaaacaaataaagaacacttgaaggcaaagctcaaaactatttaaaaaatatgttgttctgcaattttctatattccagacattgtgataagcactttaaatttgtttcatttaggaaggaaggtgagggatattaaaagtagttcccttttatagatggaaaaattgaatttaagaataggttaagtgaatacttctatgtaacaaacctgcacatcctgcacatgtaccccagaactaaaaattaaaattaaatttaaattttaaaaaagaagaatttaagtgaatatttaaggatataaatctaggtgtacttaaataaaacaaaaccagtttttaactgatttctattttaataataattattgtttcttccctgcctttcttccttctatcttctctatttattggtttcttactatgtataagactctatgcattcaaaggtgaataacacatgttagaaatgaccttcataatttttttggtcctcacatagttctgagaggtaggcagagcaagtgctgttatcctcaatttacaggtattatgattgtattcatcttacagatgagagaattggggtcaagagaggtaatgtcacacaggtgataagagagtgataactcttaataatatcaacacaataggaaacattgattgagaacttaccatgtgctagatggtgtggtaagcacttacctaaatgataccttctgcgtggggatgcattggtccttccagagtgctcacaacatagcactttgtgggttcctccactggcacttataatgggccaaattgtatcaggccaaagtatgtgctatattttgaactacatgagggttagttccagattatattcatctgtgtatctcccacagcacatagttcatattgctgtaaaaaaatctgattagttgaattaaataatacagataatccctgctttagatgtggaagagggagacataatttcagtttgataaactgggaattaatcatgaagattaattgtttgattcataatttcagcaagtagaaaatggaagttctcttaagaactattaatattgtgtaaataaaaatattgaaagatttttgtatatgttttccccttgcctatgagaaacaaacctttgttgtacttcacagttgcttgtcattacttgctcttctcatcaactgctgttctctgggatgcattcggaatcatagaatcccaacgtggtagggctgaaaggaatctgacaaagtctagtccatgtagactaacatgtaaattgatgggcctcttactagaatgccacagcccccacaggtctgaggactcatgatctccgcatctctaagttacgaatgttagatttcatgttcagttggtggcgaaacatagtgttaacaaaaagaaagatctaagaaggcatttggaactaggcttcagttaattatggaaaaggaacagagtaaaatgtcttgcttagaattagaaaaaaaaaaggaggggtgttctttgctcgtgcgctctctctctctctctctctcgcactgtctctctctctatatatatatatatatatatagattttgattttttatttttttttttgagaacaagtctcactctgtttcccaggctggagtgcagtggcacgatcttggctcactgcaacttctgcctcccgggttcaagcaattctcctgcctcagcctccccagtagctgggattacaggcacatgccaccacgcccagctaatttttgtatttttagtagagatggacttttgccatgttgcccaggttagtcttgaactcctaggctcaagcaaaccacctgcctcatcctctcaaagtgctgggattacaggtgtaagctactgcgcctggcctgcttcataacatgttaaatggaggtatatttaagtggagtgggtacatggctaggcggctctcacccagctacaagtactacacaattacatgtgatatttctgaaataagggcagtaaaaccaacaggcaacacccctaactccatatcttcctgagactttattatgtatacacgttagaaaactatctgggaagatgatgtggagggaagcaacagaactaaaaacattagtattactaagcaatattttcagagataaaactcattcatctgctctgagaaactttagagaactttcttttcttacaattgcctctgcatagtgaaatactatatactgtttttggttttgctttgttttttttttcagggagggattttttttttgcattaaaaaatacagtttgaataaaaaatagttaccccgtgagggataaaagactacaaatagggtgcagtttatactgcttgggtgatgagtgcaccaaaatctcacacatcaccactaaagaacttattcatgtaaccaaataccacctgttccccgataacctatggaaataaaataaataaaaataaaaaatagttattaccccacaagtgataatcactcaactgtctcactggttaagatggtatttactcactagttgagatggttggccggactgatatggtgggacaggatgggagagagcttcctctgaagcattaagtgtttttgagtatggcgttttcttttctaaaccaggaactggctagagatttaagaaaaggcagctatactttattctctgagatgtattcagtaaacaatatattcatctaatatatatatatatatattcaatatattcatgtaacatcactgattgagcatcagttattctcgagcaagacagtaccctggtcttaaggtgcaataaccaccagaatggggaccaaatatatttgcaagactatcatgttccctgcttgtccaaaggcaggtggctgacacttcagtttggagtctaatttttacctggactctcaaatttcttttttttaaatctatcatataaatacttttctataacctcatataagcactgcggtgcagtaaccatgataaatgtaacagaaaatcatgttgcaaatttcagctacatattaatttaaataggttttatgagatagttttggaatttaaccatcgttttataatactatttctgtaaaagaataagttctgagtaatgaacaatgaaaagattaaagaaaatacaacctgcttttgaattgggaatctcactattactcttttaaaaattgcataaagtataacttttgtttggctgactgatttctagttcagttatgaagcacaaaagttatacaattccatttaggtgatttttgttgagattgatttcttattttgtgcagtataatttagtgttagcaataactctcatcttgaaactttcctcctcaatatacttcattattaaaaataataacgtaataagagtgaacattcattgagcactcatccatgtactagacttacatatattacatatcttacatatattacctcctttaagcctctcaacacccctatggcatggcttatcatttcctttttatagatgaaggaaataaagcttagcaacatcaagctactggctcatggtcacatagctaattagtgctacagccagaattcgaaacttgggcttttaattattggagttaactaaaactatgtaatcagagaaagaaattataggaaggcatagagagacattctaaaatgttgtcattcattcattcattcattcaacatatgtgcattctgtgtgcagatcactatgctatgtgctacgagtaccctggtaagacaaccattttctgtgtgatttatactgtcatagtacttacaaactagtgggaaaaacaaattgatcagataatcacaatagtatttatttataaattgagatcaatgcttaaagagaaagcagggcttacaataaaatattctgacttacatgtggatctggaatcttgaaaaagtgaaacttaagctgaaatctgagtgataaggaagagtcaactagttaaggggtataggttggaagctttccaggcagggcaagcagcatgtgccaaggccttgaggaaggagggaacatggtattttcagaaagtgaaagcaggatactgtggccgcgtgtggccagtgaggggagaatagcataagaaaggcctctttgggcctggccttgaaagggttttggttgtgttttaaaaatacttatctatgacatcgttgatttctgtcttcagtcatatacttggaagatcttcaaatattaaagcaatatatctttgcattgaagtgtgtcattttttgtttttattatttttaattgacacatgactgtacatatttatagggtacagtgtaatattttgatacatgcacacaatgcaatgatcaaatcagggaaattaacatacctgtcacttcaaacatttattgtgtcttcatgttgggaacattcaaaatccactcttctagctatttgaaaatgtagaataaattgcttttaattacagtcatctgaccctgctatagaaaccagaacttattcctcctatctagctgtaattttgtatccattaaccagcctctagctattcccacccgctacctttcccaacctctagtaactactattctgcttttggcttctctgagttcaacttttttagcttccacatatgagtgagaacatgtggtatttgtctttctgtgccttgcttatttcacttaacataatgtccttcaagctcatacatgttgtcacaaatgacaggatttccttctttttgaaggcaaaatagtattccattgtggatatatgccacattttctttatccattcacctgctgatggacactgaggttgattccatatcttggctatcatgaatagtgctgtaataaacatgggagttcagatatctctttgacatgctgatttccttttctttggatatatacctattagtgggattggtagttcaatttttagcctttttgaggaaaagtttggatttttaacttaacaacaacaggatgcttctaaaggactttaaacaaagaagtaacagatttgcaatttgtgtaggttattctggtggcagtgtggaaaacgaattggaggtgggggcatgccagtttaaagtaatatctaatgggcagaatacagactttggggacagcctctatccagggccggtgtcatcttttggtccaagctactcttatgtaagaaagggacaatagtacagacggcagaagaaaattttaaggattaaatgaaaaagtaattgtagtaatcaaccatcatcatttatagatgaggactctgaggcttagaaaagttaaataaggctttttgtctgtttatctagatgttatggaatgagagtgagtggagtaggagataaaggcagggtgaaggtctgaagggagagaacattccaaaaacaaaaacaaacaaatgagcagtaaaaccagatataagatcctggagaagccagatctgggaaaacctggttgaaaggatcacagggtccagcagccacatggaatccagcttcaattggctcaccacagttcttcctccagaaaaaaaggagatctggggatgtaacaacccttcacttttcagttttcttttttcatttcctaagggggctaggttagatcagtctgttatttagccagtaggcaaaataggatagttcccagggctcttctaccccaaacaaatcatcagtgaaaatcttcccatttgttgtatgaaatcagaaactgcattagtaatgagacaaaagccttaattacagaattaaagatttaacaaattaaaaatagttaatcgtaatgctgtttttttagtgtgagggagttttaaatcaaatcagcctatccagaattatgaatagtaagaaagatgggcacttaacagctcgcaaacaccagtgggagcaggacttggggagaaaaacatgcagagggaggagctgatgctatctctaatgataaagtttggacattcattaattttctccttcaaaagggtggggccaaacagaaactggtcttgaactattatgtatttgcaaattcagtagtttaccttcctttgattcatcaatatatgtttaacacaactggcttattataattaattattctacttaaaaatatttattgagcatctaccatgagttagccactgtggtaggtactggaatgatagcaaaaagcaaaacagacattcgtggagattttacttttacattattttgatcccagaaattgtattacttaaggctttgtttatgaaattcttattaaatgaataatatattatttttaagttgaaaattaagtcaagaatggatttttttggcttgctcttgacatttctgttaaggctgtatactccagattagtgaaaaatcttcaggtgtttaagaacaagatactatataaagcaatgtggtaattgattaatatccctttgtgtatgtcaaaccacaagcaatagggaccaatacatttgacctttatagtgccctgtactgcaatttcatttacatagcagctgatgttgtaattgatgttgcatttactgaaaccattgccattgtctgtttcagggccggcttgattctctaacagaagtggatgactcaggacaattaaccatcaaatgttctcaaaattacttgtctctggattgtggcattactgcattcgaactgtctgactacagtccaagtgaggatttgctcagtgggctaggtgacatgacctctagccaagtcaaaaccaaaccctttgactcttggagctacagtgagatggaaaaggagtttcctgagcttatccgaagtgttggtttacttacggtagctgctgactctatctctaccaatggcagtgaagcagttactgaggaggtatctcaagtatctctctcagtagacgacaaaggtggatgtgaggaagacaatgcttctgcagtcgaagagcaaccaggcttaacactgggggtgtcatcatcttcaggagaagctctgacaaatgctgctcaaccctcctctgagactgtgcagcaagaatccagttcctcctcccatcatgatgcaaagaatcagcagcctgttccttgtgaaaatgcaacccccaaacgaaccatcagagattgctttaattataacgaggactctcccacacagcctacattgccaaaaagaggactttttcttaaagaggaaacttttaagaatgatctgaaaggcaatggtggaaagaggcaaatggttgatctaaagcctgagatgagcagaagcaccccttcgctagtagatcctcctgacagatccaaactttgcctggtattgcagtcttcttaccccaacagcccttctgctgccagccagtcttatgagtgtttacacaaggtggggaatgggaaccttgaaaacacagtcaaatttcacattaaagaaatttcttccagcctgggaaggcttaacgactgctataaagagaaatctcgacttaaaaagccacacaagacctcagaagaggtgcctccatgccgaacacctaaacgggggactggttcaggcaaacaagctaaaaatacaaagagctcagcagtgccaaatggagagctttcttatacttccaaggccatagaggggccacaaacaaattctgcttccacatcctcacttgagccttgtaatcagagaagttggaatgccaaattgcaattgcagtcagaaacatccagttcaccagcttttactcagagcagtgaatcctctgttggctcagacaacatcatgtctccggtgccacttctttcaaaacacaaaagcaaaaaaggtcaagcctcctctccaagtcacgtcactaggaatggtgaggttgtggaggcctggtatggctctgatgaatacctagcactgccctctcaccttaagcagacagaagtattggctttgaagttggaaaacctaacaaagcttctgcctcagaaacccagaggagaaaccatccagaatattgatgactgggaactgtctgaaatgaattcagattctgaaatctatccaacctatcatgtcaaaaagaagcatacaaggctaggcagggtgtctccaagctcatctagtgacatagcctcttcactaggggagagcattgaatctgggcccctgagtgacattctttctgatgaggagtccagtatgcctctcgctggcatgaaaaagtatgctgatgagaagtcagaaagagcttcatcctctgagaaaaatgagagccattctgccactaaatcagctttaattcagaaactgatgcaagatattcagcaccaagacaactatgaagccatatgggaaaaaatagaggtaaggtggttttcttaacatgaatgatttctcacttgagttttggaagtattgctgggagaaggtcacactcctacactctattataaaatgtatggctatttttgataaatctgattctccaaagaaagaaaagaaaaagcacaatgatcaatgcatgtgacaaagagtatgaatcactaggaattgcccttgtcagtgcattagcttgatgtgctcctgcctggtatagaattctttgttgaaattgttcaaatctatcatgactactgatgaatgctggaaccccttggatctaatacaaaattaaatagaatgatagctgtgcacacacaagtagctcaggaatatatgcatagactattccagttaccccagagtgtttttattcatttcttctgactccagaatacattccacatctccaatgttaacttcttgtagaaatagaccagacatttctaatttattagggatcttttttttctttactcttcctcctctttgagaactctggctaataaccatattacctatacatgtaccacccatggactctgggatgtgaagttgacattttggctaaatctgtacttttgaacaaattactagatatgacgtaatgtttgaggacagacttatcaaaaatctcaggaccgacggcttgggcaatgtagggagaccccatctctatattagccaggagcggtggcacacacctgtggtcccagctactcaggaggctgaggcaggaggattgcttgagctgaggaggttgaggctgcagtgagttgtggtcatgccactgcactccaacctgggcaacagagtgagaccctgtctcaaaaaaaaaaaaaaatctcaggactgagctccatagtataagtaattatttgatcttttaagaggcatctgggcaaagagattcactatgattactgtggtaatggccgtttcctcaggaggccattggaagtagatccagctgacttgataattgttaatggtttcttgtttgatgacatatcaatggccatgcttgtctacatataatttgtgtatgactttatggtatgcaacgctctcccacatgctttttttttttttttttttttcctctgagcagagttttgctcctgttgcccaggctggagtggaatggcaccatctcagctcacttcaacctccacctcccaggttcaagagattaccctgcctcagcctctcgtgtagctgggattataggcccccacaaccatgcccagctaatttttgtatttttagtagagacggggtttcgccatgttggccaggctagtctcgaactcctgacctcaggtgatccgcctgccttggcatcccaaagtgctgggattacaggcgtgagccactgtgcgtggcccatacattttttttttttacttgatcttcacagctgtcctgtgaaggaagcaggccatgccagattattctcgctttacagagatggaaacagcctccatgagcttaagtgatttttctcaagctaaaatagatagatagatagatagatagatagatagatagatagatagatagatagatataaagagatggtaggtagctagatagagacaaacagacagacacagatagacagactgacagacagacaggcagagacagagacagacaaaccagacagaccttttgtgtaggaagctgagacgcaaactcacgtcttctgattcttagtccagttttcttctatagtatcatgttgcctccctgaaaggggttgtagtttctccttcgccgggaaactataagataggagagaagaaagagttcaggacccattcagactggatagagaatattgatgtaactgccatgggcactcctcctaatttttttttgttctgttttttgttttttttacatccattcgttgtcgaatactactctgagaccagcattgtgctagacactggataaaggtatagtgcatatggatagaataacctggaggaagaaaatgcaggtttataaacaaagaggaaaaagttatcaaatatacagcagtaataacatattaatcatcattaacatatatcaagtattcgtgtatctagtcctcacaacaaccctgatattaaccttattttatggctgaggagacaggctgagagagaccatgcagtctgctccagagcccatattattaactaaatgccctcattcctgtccatgaggaagtgatcaataagtactgaatataaaaactgtggtattgtagagtagtaataatatcagtggagctagaatttgactgggcagttcttgtgaagtactaaaccttaagtggagctttgaaggatgtacaggattcagacagataaaggaaaaggaaggtggcgtttcaggtaggaggagcataaactaaaacacagaggtagaaatgagaatgagcatggatatggggtacaaagagagctgtcctggttggaaggtttgtcatcagagatcagtgaaagtttccatacctaaagtaggtatggaaaggccatgaaggccacgccaaggcaattagaatttgttcaccaggcacccacagcaacttctctgaaagggactgacagtaataactaatacttcttaagcttttattttgtgtttggctctgtactaagtattttacgtggcttaccctacttaagtcccggaagggaggattttttcagatgaagaaactaaggcagtatgtgattaggaaacttgctcaagtcctcacagctagtaagtacaaagccaggatttgaacccataaccagcattcttaaagcagtgtaggccctggtctctagtagtctttccagaagggttaattggcaataacagaaagatggtcctggcagacatggcggtgaccagggcagaggtgttggcctgtggcagccaacctgaggaactgctgtgatgtggatcaggcaagaggaagggaggggagtgttgaaaaagtgaatgagtccagaaaactggttctagaccttgctagaaagaattcaggagccattcagtgattaaagcctggtgtggcccacagcttggcatattccattctgagccttgtttcatcttttgtaaagagatgttttaacccgatgatgactatgataccaacttccaatttgattccacagttctacaaaaatgcagctaggttttcagcatctggagactggtgtgtctttaatagaaggaaacatttggatgagtagctggtttgaagtagaggtggtgcaggtaattttttaaaaaccgtgcatagatagcatatgatgaaacttttaagaagaaatggtttataggcagttgaaaaatcccatactggagttgggatatgagggaagaggctaaaagaagatcaagttccttcctcaggccagctggaaattgttaatggtttgattgttaatggtggataattgttaatggtttcttgtttgatgacatataaatggccacgcttggctacatataatttgtatatgactttatgatatgcagcgctctcccgcatgctctcccttactacaccagatgagggcagctgccaacctccaggtcaactggccttggctatcacactctagctttggtctcctccttatagtgacccagagaacccattctgcctggaaaatataatgacagaggatattacttaatatcttctttatagaaggcatctgctaggcattttacctataataactctcccataaaattcttataacaaccctctaaggtaggtttttaatcctaaattaaccactaaccacttctctcctgttccattctggttctagcccccatcacctccttcctggattactgcagtagcctcctaactggtctctctgcttctattcttctctcactacagtctatttccaatagagtagccagagtgatccttttaaaagataaatcagattatgtcatccctctgctccaaactccacaatagagggttgccattgtattcagaggtcctacatggactgttccctgatttcctctctgacatcctttccaatgacttttccccatgctcactacactccctttcctagaacatacttggcatgcttcttgcctttaggatcattgtcagctgcttttgtctacatcctctccagcagatgccctcatttataattccttcacctgttccaagtctcagctaaaatattatcttctcagagaggactactctgaccatcttttaaaagatgtaacccagctgggcgccgtggctcatgcctgtaatcccagcactttgggaggctgaggtgggcagatcacttgaggtcaggagtttgagaccagcctggccaacatggtgaaaccccatctctactaaataaacaaaaattagccaggtgtgatggtgtgcacctgtaatcccagctatttgggaggctgaggcaggagaattgcttgaacccgggaggtggaggttcagtgagcttgggagcgtgccatggcactccagcctgggcaacggagcaagacttggtctcaaaaaaaaaaaaaaaaaaaggtgtaatctgaccttttctttcttttacagatctcaccacattctgtaatttttgtttgtttgtttgtttgtttgtttgtttgttgagatggagtcttgctctgtcgcccaggctggagtgcagtggcacgatctcggctcactgcaagctccgcctcccaggttcacgccattctcctgcctctgccttctgaggtagctgggactacaggtgcctgccaccacacccggctaattttttgtattttttttttttagtagagatggggtttcaccgtgagagccaggatggtctctatctcctgaccttgtgatccgccggcctcggcctcccaaagtgctgggattataggcgtgagccaccacgcccggcctacattctgtaattttatataattttctaatgtagtatatttattatttttggtctgtctccctctgttagaatgggaactctgtgagggcaggaatatttatctgtttagtttgttaatgaatctcatgtacctagaacaatgcctggtgtacagtaattgctcgataaagactactgaatgactgaatccccattttagaacagaggaaactgagtttagaaagatgaacgaacaatttttcctatgcagcacagctaataagttacagagccaggcttcaggccaccatctgttttattcctcccacaagataaagacttgggaatagatgaattccctaaaagaaggagactagatggagaaaagcagagggactgatgtctgagattcaagttgtagctcagttatgagacaggaacaaggaagagatccagttgtggggatcagaagggacagaaagaattcttgggtattaaatacatggagagagagaaagagatactaaataaaatggacattagctttgttctttgcaaaagatagatcaagaataataaagactaaggggaaaaaacccaacaacctttagatttgtttgaaataattaatgaagaccttaggaaaaaaacagacttaatgaaggagtgaaagtagatataggtgattaagaagtaaaaaacaatcattcctaatatttcctggaattgtattgaaaacacaatatgaggcaaagggcagtagttgaaagtaaagtcaaaagtcttttttaaaaaattgaagcttatttgaaggcagaagtggcaagagagattgaagtagctagaaagactatgtaaatgtggacacactgagaaagaagggagggtatgtggaactcatagggagaattatggcctggtatcaagaatgataaaatactgaaaaatatatcctgcttctaattccacttctgtcaaatggaaagtggagtccattaactcatcatggcagagtcctccactctgtcttctctgagtcacacagagcagaaggcaggaggcacatagaagcccagtaactgcaagagagtgtggggctgtgatagaatctccagtaggttcctgtcagtccccacccctcacatttgtatctttcttataatagactaattttgtaaaacaaaagattctttttttctttttcttttcttttttcttttctttttttttttttgagatggagtcttgctctgtcacccaggctggagtgcagtggcacggtctcagctcactgcacctccgcctcctgggtctcctgggttcaagccattctcctgcctcagcctccccagtagctgggattacaggcacccaccaccatgcccagctaatttttgtattttttttagtagaaacggggtttcatcacgttggccagactggtctcgaacttctgaccttgtgatccacttgccttggcctcccgaagtgctgtgattacaggcgtgagccaccgcgcctggccaagatttctttattctttgggaaaattgatttttggataatatattcacatggttttaaatcatagacatttaaaaatactcagtaaatccccctctcatccttatcactccatcttgaattctcacttcaccatatgtgatcactattgtttttagtacttacatattttttaagaaggcctttacatatataagccaatgaaaacaaaaattttaaggcaatatttttaaaactggggaatcagttgtaaccattccctttccacaaataaaaactcctagtaaactctgagttcccaagggatggtctgttcccaatctttttctgagggttgaggggattttgcttaactctggctgatttacccagaacccattgtgtgaataaattactagagcatcttaggtctgagtgctcaacacctacgggaacttctcaaggcctaaaattcaaagccagaagcgaagtcaagtaatggaaacagacacatttgttccgatacattcaagaaatagaataaaagcaataaggagataaaagggaagaatatatctggaacagatgaaatcaaacagaatggtgaaaaattaacttagcatgatacctggacatatgtggtataagtaatagggattggcaaattatggcctgtgagccaaatgtggcccaatacctgctttttaaaatattattttattggaactcagccatggtgtttgtctgtggctgcttttgtatttcagtgacagagttgaatagttgtgacagagaccatgtggcctaaaaagattaaagatttactctcttgccttttacagaacaaatttgctgacccctgctcttgagtaaggaagaagagagggagataatttctgatcagcatctactgtgtgccaggatctgaagtagattctttcatttaatttatataacaagcatatggaagagctgttattggtctcattttacagatgaggactccaggcttaaatgcaaatgacttgctcagggtcataatgctgcaaagtgtgagagctggtattccagctgggatgccagagctaacttggttttctccatgagatatagtcaaatgccagggaatttagacaataatcacatatgcaaataaaatcgatttatgaagcccacagaccactactagattagtaaatgaacagtgtgacttcttcctcatgacctgaagagagatgaactggttggtaagtagccacttgtataaggtgggtaattattgatgctgggttaacagctgtataattcctatgggagctgacagaaagcagcacagggtatgccatctcagtgaagcatttcaggagatctgtcctttgggatatagcgcatggtccgcctctcacattttgggcttcctgctgccattaaattctcaaaacttgtcctggaagatacgacttagtcaagttggactcagtgatacagaatcgatggatgcatgacatagctgagcctgtttgtccacaagagatgtaaatgtcttcatatgccaaattagagcatcttgattatagttcaatgacttagctgttgtattttgtcctagagacatctataatctaatttaacaaacttcttcggtgccagctaaggatgtccttgcacataagttatcttggactcatggcagcaaatatttagctgagttcttcctctttgtaactagactgtaaaattgcaatcaagtatgctcccagttttgtggtagcagcacaaatgtggctaccattgcacttgctagagatggagctgggaagtggtggttagtacctgtgtataatgaaggtagagaagtttttcccccgagattaacttggcactcatttttacatttcttttccaagaggtagaatgggtccagaggaacacatcctagcattcatactgatgatagcagccattaagaagtatcatgtccttctgagttttctttattgtggtaaaaatatgatataacaaaatgtgctatcttaaccattttttaagtgcacagtttaagaatatttgcatggttgtaaaacagatctccagaacgttttcatcttgcaaacctgaaactctatacccattaaataacaactcccctttccctctccctgctgtcctcgggtaaccaacattctactttctatctccataattttgactgttctaagtatctcctctaagtggaatcatatagtatttttctttttgtgactggcttgtttgacttagcatgtccttaaggttcatccatgttgtagcatgtgacaggatttctttcctttttagggctgaataatattctattatgtgtttattcaacattttgtttatccattcatctgccagtggacaatctgggttgcttccacctttggctattgtgaataatgctgctatgaacatgggtgtacaattatctcttcaagaccctgctttcagttcttttgggtatatacccaaaaattggattgctggatgttttttttttttgaggatcatatatattttttgaggaatctccatgctatttttcaaagtagttacaccattttacaatcccaccaacagagtacagagttccagtttccccacatccttgccaatacttgttactttctaggtttttttaaacaaaaatagtagccattgtaatgggtgtaaggtgatagatcattgtggttttgatttccacttctctgatgaataatgatgttcagcatctttccatatacttgttggctatttgtatatcatctttggagaaatgtcacatccattacccatattttaatagcgttatttgagttttgttgttcagttgtaggagttcgttatatattctttttttgtttttttaattgagacagggtcttgctctgtcacctagcctggagtgcagtggcatgatcacagctcactgtggccttgacctcccaggctcaatcgatccacctgcctcagtctcctgagtagctgggactacaggcatgcgccaccacacctggctaatttttgcattttttgtagaggcagggttttactctgttgcccaggctggtctcaaactcctgggctcaagcaatccacctgcctcaacctcccaaagtgctgggattgcaggcataagcccccgcacctagcccattctgactattaacaccttattatatgtatgatttgcaaattattttctcccattctgtagcctatttactctgttggtggtgtcctttgatgcatcaagtttttaagtttgatgtagtttcatttatctatctttgcttttgttgcctgtggttttggtgccataaccgagaattcactgccaagcccaacatcatgaagtttttcctcagtgttttcttccaggaggtttatcattttgggtcttatgtttaggtctttgagttctctctctctcttttttttttaaatttcaatgtagttcccacccatattttaagggtctcactcttggctttcttttaggataagacacagctacaaggctaagaccaagtcatcttctggaatttgtcttggaaaaaaaaaatacttttgagagccctttttttgttcttgttggtttgtttttgttttttgagacagggtctcactctgtcatccaggctggaatgtggtggcgtgatgatagctcacgtcaagtctccacctcctggagcttagttgatcttcccacctcagcctacccagtagctgggactacaggtacacaccatcatgcctggataattttcatattaattttagtattttttgtagagacaacatttcaccatgtgcccaggctggtgtcgaactccttggctcaagccatcctccatcttggcctcctaaagtgctgggattatggacaggagccgccgcatggcccattatagcctactcttttaaaaaaagtcctgtctagccattatttactggatttgagattcaaataagtcccatttgaaacacagctgtatccttttttattcacccacagagtaacttgcaatcacgattctgctataaattcaattcttacttgcctttgatgtttcttttatacccaccatgcaccagtgttcctagtgttgatggagtggtagtgtgctctacactacttggatgttgataatgatctcttatgagtatccttatcaggaagcgtcttgaggctatggaattccacttttcttcactggcattccattttgcatgtgcctttcccttatgctaactttttcattcacagttgctagtcctcctcttgtctctgtattctctcttccttttatcttctttcccattgcttttctttacttttcttctggatctagttttcactctctgtcacccatttttttttaactttccttccttgagagtatcttctactttcttcctctagtgttgtcctagagactttcagattccaaatatgatgacactatgagttgtctcttcattaccattcaaactggagcccttgatcttttcagtgcatttctgaatctttgaaatatgtatccaaaaagtcaaggaattgtttagatacaagaataaagaaaactaggatttagttaaataccaaggaaaaagccagattcttaaagaattgggtaggttcagttttgtaattaaaatgagaagattcaagaatcctaaaggatcacagattgaacatgagttgacagtgcacataattattaaacaaaaagtatagaagtttaatactgtagaaactctgaatactttttaatttttatgatgcacaatctaaaattttgttttaggtcctggatgtagtacttgaggtagatatggcaacataattcaaggctctgtgtctgttacataagacaatatttggtaagtgccaagtgaaaattcatgcagtgggagaacagaaaaaagaagataatacaaatgtagcttgatgaagcatcacaggagagggaatacttgatctgggccttgaatgatgagtagaatttatatagcagagatgaggaggcataatgttagtgacaggaacttgtgcatatgccagggtggagggcaagaatattcaaggtatgtttgggtgatagttaagagaaatcgttggtgttttggagtataggctaagccactataaacaaagagaccccaaaataaaataagatagaagtctctttctcttttacctagaggcagacagtcgagggaagatagaggtcgtcctgaggtccaggttgcttctccctcttgctcttctatggctcaccaccaataccatgtctgcattccagctcacaagaaggggaaaatggagggcagccacctttcttcttatggatacgacttagaagttacacatgccacttttgctcgcatcccactggcccactttgtcacatagcattacctgacctcaaaggcgttttggaaattagcctctaagctatgaatattgggaggaaggtgtctcgtaaactaactactagttagaaataactttgttagaggaaggtgaatgtgaagttagaaagaatagggccaagatatgagggactttgaattccaagtgtttgcatagcatagacacaaaatcaatactattgaatgcatgaataaatgagtagttaagggaatgagtaagtgaacgtatcattgagtttgaactttattctctagatcagggctacaaactaaaattaagaggccaggaagatagtataaatgaatcataaagccagctgtaaatggggagtgatgggactgaatcacctggaagatatgtgacatgtcttaagggcagccactactcagctccagctgatagttgcatgggaatgtgggccatttgtgccaagattttggaatttttaaaaagaaggaagaaatctgggttttatgtgacatctcccaatttttagatgttggatctgaacaatttttaaataggtcaaataaaaacacatctttgggatagtttggactttaagtcactaattcgcaatctttgcgaagatgggaaactacttaaaatgtttggcccagagagttggtagtttaagaaggttaatctgactgtggtatgctgggcacacctctagcagtaattttcaactgtgactgcaaattacaatcactgggaagctttaaaaaaataaaaaaacctctttatccaccccagaccaattaaatcagaatccctggggttgggtattttttaagttcttcaagcaattgtaatgtacagttgcggttgggaggtagtcctctaagcctaatctttttttttttttttttttttaaggcagagtcttgctctgttgccaggctggagggcagtggtgcaatctcctctaagcctaatcttaagggttattgaaatagcctagacatgtggtaaaagggtctgaactgtgggtctggaagctgactgaagaaagaaatagataggtgggagatattataaagggcaaattgataaaattttgtggctgttttaaataggagagtagaagaggaaaggagtcaaaaagagttgaaatttcaagctgaaatttgggggctgggagatataaggaatttaacaaatgtctccaaggcatacataaacttaagatacacagtagatgaatggggcccaaatccagtttgggaattctaagtcaacataacattttaaaaggtaaggctgcacaattctttttaaggataataaaaatcttttgtgtatattttatttgttgcaatgccaggacaaaaactgtatattaacattgctaatggatttgttgagacatgtcaggatcattgcgcaaggttggtccagaagaaccgtagggatccaaagcaaattccttgctgtttaacattaggaatgtttcagtcctgcctcagtttggtttctgtagagctttcaatgggtcttgagttgttatcagtgatgatttagcaccaccgtgaggctgtatccagtcactgcatatggctgttggcctctgcaatatatacggaagatgatctgcccttttgtttgcagctttaaacatcaaggtgaaaatagttctttgtaattttcttcgtatggaaaggttatgatgcaataatatcttgtattaagatgataacagtgcctaactgcatttgatggcaaatattactatcgtgatgaaactcaaaagatggataaactcaacattgcgtttttattatttatttatttttttagcgttgcatttttaaattcaactaaaatgattcttggaactttagtgaattattctttatctttaatcccgaagtcataattttgtgttgctggtaggatgtttcagaaaaataacaatttaaatacaaaacaaaactttgttatttcttgtccccttgcaaactgtcgggcagaatgctaaggggtttattcacttagtacatcacttcatttaattctcaagaaaaaaattcttccttgatgcagacactgttacattatattttcattttataaattagaagagacagaagttagtaatttactcaaggatatagaacttaaacattgggctcagttcacaatccctcattttaattatgaaaacttgaataagtcacttaaagcttactgtataagtcttctagtcttcaaaatgagatgttaattatgtttgtcatgcctttgctcagattattgtatgaaactacaaagagcaaaggggtcattgtaaatctaaaggctacataaatattagttttattattattgtgacttttcctatgaatctagggaattagcaccatatatattagaaataactagggtaagaaccttaattctgcccctaagtagcatcgtgaccttggaaatgtaacctcgcaagcctcagttttaaaaaataaatattaataaaggaatagaattgaatgacctataaatacttttctgttctgaaattttatgagagactaactgtgaggaataactaagagaagcactcatttctttgtacaatattccttggcgtatatcacttcaacatggctgactttgtgttccttggaactttgggtgaactcaagtttcccttagaagatcctaatggtaagtgaatgtgaggctgtgacattaacgagcctggaggaatgagccattcatgctgcattcctagcactgtaatatgacaagagccagacatccttgaggaatttggggcctggctagagtttataagatgccaagagaccagggccagtggtgacagtaaacaagtgagttacccagtaagaattagatatggattagcctgaatttatggcaaataaggtcagctaagtgaagcagttaaaaacatttgccttggcagacttgtcattgtgatgccttaaaattacccatcagcactgaggcttgtgctctgttcagacaatatggggggaaatcatttcaagagtgtgggttctgtttcaaggtcactcatgatgtcaggccctgtctgaggttatagaattttctatctaagaatgataggcttgaattttgcatggtgattaagcaactttatccaggaaaggtgctgcctgtaatatctgcttcatacgctttccattctcaggttgatgaggctcagtgcattgctttttaggaagcccagtggctttactatttaccttcatgttttgtctaggaataaaggaagttgtattttctttttttaatgctttaagaaaaactggaaaggtgtcatttatagatgatactcatatttttggatttgtctagagactagtactacttgcttgagaaaggcgtatgtgtgtgtgggtggggagggagtcataattggagatctaatactcttttttcttcctacctgagccccaaaataaaactgacaagttgagctaacagaaatacttttgcttttgatttattttctatagcatagagaagactattggtactcttttaaagcaaagtttcaggccaggcccagtggctcacacctgtaatctcagcactttgggaagctgaggcatgtggatcacttgaggtcaggagttcaagaccagcctggccaacatggtgaaaccctgtctctactaaacatataaaaattagctgcgtgtggtgacaggtgcctgtagtccaagctactcaggaggcagaggcaggagaattgcttgaacctgggaggcggagtttgcagtgagccgagattgcaccactgcactccagcccaggtgacagaacgagactccatataaataaataaataaataggtagatagataaataaataaagtttcaggctggattctgtagtgtagtaatcacattcacctcacaaagtttcattaaagctattttccttatcctatccttattacatctaaagttttatattgtttggtgcatgccattgtatttattcctgttaagaagactgttgaccagagtcttcttaataggatgtagggtccatgaagaattatatctgtgcccatttcactttctagacacacttttatacaagggaaacatggctgggaagaacttccaaaacaaccttgctcatggtaccaaaaggatgaatattcagaaaattagtagatggaactccacagtaaaggaaaagatacattcatagtaagagatttctgggggaatgcatattaatgggtgagggcattctttggtgctggatggttgtgaagcatggtgactatgaatgtgggctctggagccatattgtgtaaaccatgtctcagcttatcacctgtgttacaatacctgtgctattgtaagcaggtgacttgacctctccgtgctccagtttcctcctgcaaaggagaattaaaaatcatatctgccacagagagtcatgattaaatgtcttaaaatgtgtaaagagctcagaatagtacctggcatgtagtaaacactcaataaatgttagctcttgtggttgttattgttgttctcattattagtactgtggggggggaagggtcaggtcttagcagctccttgtatagagatgactggtcttttgacatcaaatgccaccaccttgttttttccttccaccttcagccaccttggttatcatggagcttcagcctcccatacaactctcacccacagtggttaagggtgctcttcgcccttcgtgggacctgtgatggccaccccaggttcctgcaccctcttctctgtaagactctgccttgtcttcctgccttgtcagatgattcttgaattgtattagagataattctcctctaagtggcccaataattttagttaatgtacttctttgacatcttaggaagtttatatagggaaatttatgctatgcatgtgtgttcagacaaatacaaacaacattctaatttataattttgtcacacaacaaccttatgaataatatatacttatttatttataattggtatttatacatacagtcgttcctcagtatccgtgggggattcgttccaagaccccctgtggatatcaaaatcaatgatgctcaagtcccttatgtaaattgtatagtatttgcatataacctacacaccttgtgtatgctttaaattatcactaggttacttgtaatatctaatataatgtaaatgctatgtagatagttgttatactgtattgtttagagaataatgacaagaagaaaaagtctatacatgtttagtacagatgtcaccatccattttaaagaaaatattttcaatccaagctttgttgaatttacggatgtagaacccacagatatggagggccgactgtatttataatacatatttataattatatgcttataaataataattcttacagaactctttacctagaggtagattcattacagtatattaagggatgaaaaaggaagggcctgtaataggttttgaactgtccctcaaacccctgattgctaaatatacgaagattgagaaagtgtattggaaaggcagcaatagattgggatgatttgttgggagaggagcatttgagcttgatcttgaaggatagatatagtgaatggagtagaaggcattgggagggtatgtggaagactccaaagatcagttccctaattggaagaggggcaagttgtctgaatgtctcaggctttgaaggaagctctatatgcaagaacctcagatgttaacagtcagaaggcatgaaaaatcattcagctcaatgccctcattttacaagtagaatctgtctctcccaagccacagtacttcctgttagaacatcctgtctcctggttattaccagatcttgcaagcttgtcacaaagtggcagcaaatactttctttcccaagatcaacactaaatgtttccagtgctctgcagctgttggctctttatctttctatccttgagagactttgaggaaatcccttttctctgaattctgtttatgtttaaagagtttcacagttgattttgaggcacagccagtgtcagaatcattgagatagacaacagaatgacggacagagtgaacaaagttgagtgcattgcattcttgggcctcataatgtagatgacacaggtggatcttccctttacgtactgttcctaggctatctcatctgtgcccatggtctttagtacaccctgtatgttgctttctcttactagatcttgctgtagagttccaggcttatacaactagctgtcttattaaatgcttcaactgattaagttgagaaaccaaatttatgatacataatatcatattcatgatcttcctgcaaaactatttttgtaatgcttcaagaaaaactggaaaaaattctccttctgaattttgtatttcctctttcagggaatggtacctccaaccaaaatagaaagttggcagtcatcccagattctaacatctttctcatcatccatcaaatccaattagtcctgtccattctacctttgagtactctctataacctagcaggttctgcccatgtccactgagctgctttagtttagccttatcaacttcttcagagtgctatagcagccttttaactggcttctctgctctcagcctttcaactggcaatcattttccacactgcagccagagtgagtcttctaagaagccaatcagattctctcacactctgcatcaaaactttaatgaccattccattgtcttcaggataaagtacaaactacagagcatgttgtctgtggcctagctcctggccagactctgcaacctcatttctaagtgtttcgtatttgtcttttgagtgttagttagccaggatcagctacttgagagttctcagaataagctgttctctcttgggcttcattttaggaatgccattctctgctcctcttagtcccctctattctttttctgaatcacttacacttatctgtcagggctcaatttcctgtgatttcctccaggaagtcccccttgatgcccaaagagtgagttacatgtcttttcaatggctcctgagcacttgggatgatctacagcaagaggttctcacagtatggtctcggcacctgtaggggctctcaagaccctttcagggagtccacaaggtcaaagctattttcatatcaacactaaatgttatttacctttttcactttcattctgtgtatagcagagttttccagaagctccataacacgtgatattgtaatagattaaatgcagaagtagaaatagaaatccagccattttctattaagccagacattcataagatttgaatacagctaaaataatgccattcttttcactgtttttgaaaatgttcatatatttatgttaatatatattattatttttagttaatacatatttttaaattgttaaaatgaatattgataaagctcaaagaagcaaaaactttctggggatctcaataattctgaataggagactcaagattaaaagttcaagaaccatgagtctgcattatcatacatctcatgctttatgttgctctgaaccctttaagagaagaatctgggttatgtgtatgtgagtcccaagggcctaatacaatttctgatacatagtaaactctcaataaattttttttgaataaacaacttaatacacacatgtatgtttactcatacacatggagttcgaacaaaaaaaggcaatttagtccttacttcagctggcctagtgctatccaatagtgtactcaatttgctaagccaatagtactttgaagttttacattattcttaaaaactctagttctgtactttttttttgacctctagaaatcttttctaaaagatgtctatgaaaactttaaaaatgaacaattaggtctgcgtacttgattacacagcacctaagttcttctggctcagctacctactggtgagtgaatgttatctgtcaagtacttaattttttttttcttagagacagagtcttgctctgtcacccaggctagagcgcagtagtgaatcagagctcctgcagcctggaactcctgggctcaagcaatcctcccacctcagcttccagagtagctggactacaggtgcacaccaccctgaccagcaagtgttttattttttgtagagatggagtctcaccatattgcccaggctggtctcaaactcctggactcaaatgatcctcctgctttggcctcccaaagtgctgggatgacaggcatgagccaccgtgcccagcctacttaccttttctgagcatcagattcctcatctgtaaaatggagggagctttgaactagattaattctaagagccttttgaaaattgggtctgtgcttctaatctctatgggaacctttctttctcctttacccctttccaaacagatgtgtttagataatactgttttctgtcttcttggctcccatgacagtacattggttgagttgttagcatttactgatttgccgccctgaagctctctggtagaaagttggccgtagcattttcttgctcgttcagtatgataaactcttcacatggaattccaattttttttctaaaaataataactttattattgctgaataataattttgttatatattccctggaggaaatttagagtacttagataaacaacaactcaacaatcacatgtaatcttttgaataatcttagtattctgcaaatactcccatcaagccacactcactcttgttccagatatttgatgtgcaagagttcttactaatcaggaaagtatttagagctaatctaaacaaggaataaaacaacattttcaggtctgtacttcagtgtcaaggagtcagcccttttcactaaaactttatagatatgtccagaaatgtttatttaaagtgattgattagccctagcaaggctggaggagactttgaactgtagaaaaaagaaagaaacaatgagcaagtggaaaaaagaggagaagtgggggaagagagcagaggagtggggaacaaaggaggggaggggctggagaagaggaaagagaaaaaagaggcaaaacaacaatagtcaaggaagaaagaaaagaaaggctgaaaagagagagcacagagtacaggaagaatgatctaaaatagggctctgataggaatgattgaactgtgacaagagctggggttctcagagaagcttggaaaataggagtgaacaacagagaatgtgactgtcctttgtttcctctctatggactttgtgggaacaaatctggttagagagagaatatagcacagtagtccagagcttagaccctggaacaaaactatttaataaccacttaatagctataggaccttaaataaattacataacttctctatgccttagcctcttcatctgtacaatggggaaatttgactattcaataacttcacaagttattagtaggatagatggtagatgtacctaaatgttaaatattgttaattataatactagatatgaaaaacctacaattaaaccattaaactatcataatcctaaattctaagttatgagtatctcaggtgctcatttgagacttaaaggcagataaagatgatctgatctgcttatccagtgtcttggaggattgggggtgcttgaagcaaggtctcacctagagcaagtctgccaagctttggggcagtcatactacctgaatgaggggtccccagcttcatacctgacaatgttgggagcttgtaaagtgtttgatcttgtctgtgcttcagtttcctcactataaaatggagagtgcagtaatattgtatcatagggttgttgtaaggattatgtaagtgcctggtgtgtagtaagtgctcagttaatgttaacctattgtttgttccagtttattcccatttttttatttgtacctatttttattagactttgatgatatgcattccaatcttgttttgcccttagaatgactgataatttctttttataaacccatagggagcaactgaattcaaaatctctagatttgttagatgaatccctttcccatcataagagttaggaatctttctgggttcttcttttcccagttgaaaccactataaatagtatttgaagaaattgtggattcagtgtaatattccttctacatgatgctgagttcagaatagaacttcccacctgggtagctttagataataccattccatgccattttgctctttctttcccactgacagtttttacctttattctggaacaattttatcaggaatatttttatattctaaagccttctcattcaacctttagaaaagaagctaaatatttcattgggcgtttcagtatttgagtttttttggtggcatcacagtcaacactgactgaaaccattttattttctcttcaatctttgttctaaaagcatacactatctttcctcttctgtcaattactcgtactgtgttggattttctaggtaggagtgtgggtatataagttaggtagtagagtccaaagcacagcttttaactctctagcactttgtcttgagcccctgggccttggtggcacattaagtatatagttagttggttgggaaaggtaaattgcatttgagtgttgttatgcaaaaatctaaatctagtcattttatgtagaaactatgtgtataacgaattatgcgcaaaaacggaagattatatatgttggtaaatatgtatgtaaaaatctcaatgcataattttgcttctaaataaagttctaattttacttttctaaaaaaggttctaattttacttaccttatttagagcctaaacaaacctttactgtggataagaggatcatgatgtcctttagctcttattttttggtagccccattgctgatgtaaagataggctccaaagaatgtagcccgttttgaaaaattaagtcagattattctgaaacttgtgacaattagtagagaaacgtgatgccctccagatccactggtcgggtagctgggtggtgaaattcttgctaacctgcgggttcagatgctgcccccgtcatgctgtctcattgaccatgtgaggtgaaagccatgactccctcttctaaatgcccagagcatttgctgccaccccctatattgtgactgtgtgggaacttttttttttttttttttttttttttgagacagagtctgtctctgtcaccaaaccggagtgcagtggagcaatctcggctcactgcaacctctgcctcctgggttcaagtgattctcgtgcctcagcctcctaagtagctgggattataggcacatgccaccacgcccagctgatttttgtattttttcttttttttttagtagagacaaggtttcaccatattggccaggatggtctctatctcctgaccttgtgatctgcccacctcggcctctcaaagtactgggattacaggtgtgagccactgcgcctggcccgtgtggggacttttaaaatccatctcattgccagcacctagtacagtgctgtagacttagtgaataataaaacaattttgagataaaagatgaaattggaacttttgtgaattaggaatgattttttttaaataatcacttatcaagctcttgttttacatcaggctttaaactatacttttccgattgtcctcatgtaatcccacggtgaatgttactgtccccatcttacagatgaagaaactaatgttcagagacattaagtcattaggtataaactaaatgactcaaattcagttttgtctggctgtagcaactgttttcttaacattagccacactggcttatgagaagcactttttcccctcttttaatatacccttccatgtccccccaaattaatcctcatttagttcttctcttctgattcctgcaagtgtcatagtcaagctgttaaatcatctgactgttcatgatttcatacggtgccagtgaggctttctggattcaggtactgagtttgccaccttctagctgtagggtattgggcagacttccttacctcttgggcctcactcttctcatctgtaaaatggggataactatagtacctacctcacagggccattatgagacttaaatgatctacttgtacaaaatacttaaaacaggttctggcacatagtgagtaccatctgagggttatttgtttcagctagaattgtccagatgagagcataatagtttaaaaggttcaacagcagaagctgactttttttttttttaatatagtgaaataggccaggtgcagtggctcgtgcctgtgatacctttgctttgggaggccgaggtggaaggaacacttgaggccaggaatttgagaccagcctgtgcaacacagtgagacccccatctctacaaaaataaaaataaaaaaattatctgggtgtgatggtgtgcacctgtagtcccagctactcaggtggctgaggcaggagaattccttgagctcaggagttggaggctgcagtgatctatgatcatgccgctgcactctagccttatctctaaagagaccctgtctctaaaaaataaatgaataaataaatacataaaatgtaatgaaaatagttcactcttttgatactcttcagcaagtttctgtgtggaggcagctaactcgatctagactgagtcagacatcatgcctaatttctctgtccactaataaatatgaattactctgaggatgaatacacacacattcacatacacttccaaacagcaaataccaaaaggaattagcagttcaggagggtggctcaactgccttctgagaactaagggccatgtcctctgtgattaaactgagtcaagcccatctgtaattgagcactggtagaatgggctcattcaagcatgtaacgcccttaaatttttcatttaaattttctgtgccttagaaatgaactttacagtaatctttgctttctaaaaataaatgtgtttcttgttaagcatttagtctcatcacaaattctgttttagaaaaaaacaacagaaaatagtgaatgagaagggtaggagacttaggactcagcgaattctatctcagtgccaagactttaaaactgggaataaatgctacttctccatgacctgggtctgataatttgtctgcaggaacactgtttctagagggtggtgtggtacagtgggaggaatagactttggagtgagatccatgttcaaatcccaagtcacttaccttctctgatcctcagtttcctcatctgtaaaatgaccataatcaacaccatctcgaagatttgtggtgacaacacagcatttacttcctgctgtatacttcccatttcctcttgtagagacagaattttccactttattttaatctataattatgtaatcccatttaaaaatcacccttcgactttcagttccacaaggcaggggccatatcttgttttccattatgtggctgttccctggccccatatatggcacaaggaaggccctcctttttattctagctccatatgacagccttgccagagggcaaaggtaaccgcccagacagtttatatttaaccaaacaaggcttgttgtagaggagaaagagttaggaaaagaaataatgagtattcttaacttgttgggagagtgtagcactttgcaagatttgactgtaagtgttcactgtgaaaatcatcttcaagtgtattttagccagccaaagcctctagcaaattatttttcacaaaccagtaagtatacatttgcatgtactttcacggtgcttcttagtctttaaagagattgatgttttagaaagtttaaaagtaactttttaccctcacgaaggaactttcaaaatgcaaatgatttgaaagtaggaggtatgctgacaaccactggtaggagggccaaccactgttccattttcttctgtttgatgaccaggatttctcctgggggttgaatcctggcttggtgccaaacaagggtctacagactctcaaagcctgtataaaataggagtatgacaaagaaggaaacagttaatccatgagagtgggcaggaggacaggatcttgtggactaggtcactctccatgtgctcctggacagcttgtcagggaggcaaagaaaagtaatggaagaagcagcagaaagggacaataaggacactggtagaaaataacaggaaagacactgaacagatacagcaggaggagtttgaacaatgaaggctaaaatgcagcctttcaaaggtttgtaattcagcctgtggcagagagtagaacatgcataaaatgtacttttcatgtagtgcagtggtggcattgggttatatcatgaagaaaatctgatttttatagtcctctgactttccagagaagtaaatttgaattcagaatattagaaacacacataggtaggccaatactaagagtgagaacaaacttggttacagacagaattccgatacagatataataatttcacaatatccaggagagtgtcccaactctttatttattgtaatcttttttgactattaaaattacttgaattcaggccttagacatgctatatgttctgctgaaatttttgccacaatgatatttatctttgtattttcagcaatgtctagtagtgtgctttttcacacatagaaggcacttaataaatatttgttaaatgaaaaaataaatgaccaatatttgttgcattaggatttgatctgtgtttcaaaataatttttaaattttttttccattttcgtatgtcatccttattttctttcattcacaccacaaagatgccagcagaacttctgaaaatgggcatcaagtatttgttgtgtgtgtccaaatgtgaatacacctgcacatccacatggtctgtgtatagaggggcactttcttggtctttctaagcacatctcttgatagggggaaagtacctagtacactgtccactgtacacagaaacccggtgatagtacacagatagagggggctgagtgaagtggaaaaatagcatgtgataaaggtatcatgaattgaatggaccccaattttgctttctttcatgatttctgtttatattcttgaggctacacatagaagcaggaagggaggtcgaaagctagatctccctaaagggacggggtgcttagcttttattataagttcggaacactgggatatctcaggtttctattgtgagtgatgaaactttttagtattggcaagaaaagagataggaaatgtgcaacaaataaaaagttgtgagggtgggatataactcagaagaaacccagagagaatccttgagaggactcctgtttcccctatatcagacagccttgttttgctatctggctgggatacacagaggtgccatccggaaatgttcacccaggaccaatgggttttgtctaatctgcatctcacagatttcagctaactatgtaatcatggttctgttaggaaacctgacacattgtttagtgctttttggctaagactaacttttatgatgaagcaaccatgcactgacatacacacacaggttatttgtgtttgtttttgaaggggagaagatagtgcatggttttttaactagttacatttcaaataacgtctttcactatttatcttcttggatttaaccacttgttccctaaataatatactttctgacttaattttctccccaaaccaatttatatgtacagatataacaacacaattctaaatacaatagtaaaaactgtttaatgctgcaagaagtataaagtactattttcatctcccatttataaaccatctaaattctgcttttctgactagcatccacagatgacagacaatacttctgtaagtccatctggtcagcaaagggtctcttaagttttcacgaaaattttaattatgagagtatcgagaattaggactggagttctaacagactctgcccttatttctgctcacagatttactgtacacatctgaagggatctatggtaaacatcaagtcagatatgaacctgtgaaatattctgatccctaggtagtctaccagataaaggagtttagggaataacattttgaacacatgggacactctactgagaagactgagcttgagtaagtgtaacttcgatattaaaagagtcaagtatttgggaggaaatgaaaagcaaagcaactctcaaatttatgcaaatgcaggaaaggcgaaagaacagacaaactgataccctgaagataggagaaggggcaaaatgaatgatcttgcatggattcttggcatttggaaagagttgcaatatgagaaaattagaaaaaaaggctgagtttggtagatcaccagaaaattcacttagtaagggaatacattgtatgaaatttctgaaaccttctctgttggacatattttcacctcacctggaagaaaatcttctgagtgatgaccaacagaaacctcaatgatgttgtcaatcagtttagggttggagtctaggactggaggaatgttaaactaccatatagttcccagctcagccaattgcaattgtgtaggtctcagtttgtgattatgatgtctctaagatgatatttctcattagttttatcaaatctaaccaattgggatagatttttgaaagaatataaatgagaaatcttgcatttgtgaaatctggttgtgatatgtatccctgggtgtgactctccttggagacttggtacaatagagagattttcaataggaaaagcttttggaaacatgtatgaatatgggaaaccatatgatgtaccactatgtgggatgatagactgagctctatctaaacaggttggcaacacaccagagcatggcagtatggtatgatctgactctatgggactctgtgcccacatctctgctttgtccccctctaataaacaatttgtgttcctgagtgttatttgtttttttacttaccactctccacaattccattttctctttttctcatgattttttttgaggtaatctaattgcttgaattaaaggtttatgaatcttaaaatattatctaggaaaaaccctaatggcaaaacctagcttgtgataaacattataaaaaatatttacttttacctctttccacttcagtgtcaggacatcctcagttaagcattaaaaatattaatcaagattatttgaaaggcacatctgaagaatgggttaagtttaatagggaaacggcatctcaacccattcctagttatgtgtggaagcctgcccttgctccttatgacctccaggtggtgctgtttacccagacatggaaagcaggagcccagccccatttctttcacttaggtttgcagttgggctttcatattttcaaaatattttctgtttctacagatgtatacttctaaatggccaataaaattttataaccactatttgaaaaattgcaaggttattgtgatttgtgcttcctagccaagaatatatctttatgtctgtacatacccgaagtcaagtatttatgtttgttcattggtcccactttctacgcttccttcctttgtagcacacaggctcagacacagacatttgggctgtggacagaactcgtccaaggacctgtaaatacttatgtaattttgaaatatatttctagttcagctatggcaactaaactccacaggcttctgggtgaagaacaacatctttacaggaatgccaatccctgtaaaggatttggcaatcccccaaagccaacgagtgttcctagcagacctgacctgattttttggcagggggatgcttgtcagacaccagaaatgttttgatgttttgaggtcacccatacagtgacaccccacaatccaatccaaattcctcagaaaagtgattctagagaaaaactgagagggaagcattgacagtttctttcccattttggtaagagttcaggtccaggaatagtggaaattccattacagcaaagatgaaactaggataggagtgcggtgggatcgatttgatcatggataaaatttggaacttttaatattggctttttacagaataaccaactaacatgcctttcttgcccctttttttccccttttctttcctttcacaaggggtttgtaaacaaactggatgaattcattcaatggttaaatgaagccatggaaactacagagaattggactccccctaaagcagagatggatgaccttaaactgtatctggagacacacttggtaggcaagattgtgttgttcttgctgtcaataatcaaaggattttaatgtactgcttgtttgtttatgagaaatatcaattttatttatcaaaggttactatatgtcaatgaaaccaaattttaatgggtcacagaagatgaaaatttacaggcatttcaagtaatactatgaaacctaaatcatctctgtttcaagctaccttttcaaagcttttcctggaaggataagtaattatttaaaaataccttagaaaattttattagacccttgttctctaaagcagcaactgaaggttttccctttcttaaaaacaaataaatgaaagagatgattttgatgaccattctaagctttctagaattcttgtaaaattaatgaacctctcattatcaagagggtctacattatctgttctacactgggttattttaataaaatatttaaaatgatgatctccatcatttttgctgctatgtgggtttttcagcatataattaatacaactgtcataacactcatccctgtgcatagagaaaaccatggaggggaagtggaaaacactcagatgaatttgcttctgaatgttaaaagcaagaattatagactgggggacattcgatgaacctcgtggggtttttactgaatgcttcaaatggccgatatcaattatgaaggggtggaaactaagtagtggagtgtgataaagcatgaagaaaaagcacgtgtcataggaaatgaaaattcaagctgtaaggatctcatctttattcctttcactgatagcataaaattgacaaaggcaatgaacatgaatccttgggtactcaactgtggggttgattttctgcccctcttacacactcagaatttggattgaataaacattatgtgggagtcctacctgtatgcgagttcacagggttccagaactgttgttctctatgatgttaagtgagagagagaagggagagatggagagggagaaaagaggggaaagagataatgtttcaggttttggtgtttgttttttgcagcatgtttatataacagaaaaacagctttaaaatcctgttgctgcatgcaaatagccttgcagatgataaagaatgacaaaactgtgtggtagaggatgagtgtattgcttccctttttagagacctgagtcgatggtgtgtaaaaatgcaagtgaccctaaccacctctcttgtacatgggtttttatatactgtccttagtactcatttccctgttgagtagagtttcaacttttttttaaagagggcatttcataatagcaagataaagatattcagtgctttatgatgtaaattgtattaattagaatgtcaacttttcactggcattgttctgacagaaattctaatctgtgtttaaacaggagtatatgaactttatttcacattaagtgtgctgtcttactttctcttgacttaatattttatggaaaacacacatttagtttttgaggtcccagagggcacaagggcatgaagagcactttaactctggactatttattgaaagccgggctaggagagtatggacccaaggtccctttttcccctttggaggttgaatgatatggcctctttgtaaccaatgagcactctctttttcaaatacagtattacagggtttcttacttggcatccttatgttagcctctacttccttctagcccaatgcagttcactggagcttttggtgacgatggaatattctatattgccctctcctatgtgggggccactaactgcatgtgtctattgtgcatttgaaatgtggctaatgcaactgaagaaatgagtttttaattttacttgacatatttaaatttaaattgccacatgtggctagtgacttctgtattctgtctagccttacaaattgccagctttttataggtgaccgtaacgaacggcaatatctgtacctgcctcgtaatgacattttcatcccaaaatgtggaagttattctccagtttgctgtgggccaccagtataaagatccacagcaaagagtccttcttaagatatttatttcttaaagaatagtcttgtttctgcctaatgatcaacattttcttagatgagttttctctactatcccatgtctgattatattgattggaatagagatatcatagaacatcttctttatttctactttgcaaatagtgagggactttgatctacagacctgttgactggatgttaaattacagtctcaaatttgacttccaaaataatgaataataatgtctaacagttactgaagacctagtgtgtgtgtattgccactgaatgatattcttaaagcgcaatcaagagctactgttacactggatgctgtgtctgttactttagatacagcctgtggctcaaacatctttcaatcaaattcttagttttcctgtttccatatgagtctatattgtcctcctgatcaatattgtcatttttattgtatttctttactgtcatgctgaattaatgataagttattcttctcaaccttcccataaaagaaaatgtatgaataagcctagagatttgtattctttagttaaccgtgcataagtcattattgttttttaatgagggggcaagtggtatttgcaagattatccagtagtagaggtagctacacaagtttctttaaacatctctctagactctatatttgacattaaatcaacagatatgcaagcctctagggtctgagtcttccctggtttattaatgtgttagactagctggcaacctccaatatttattataaagaaaaatataaaaatcatactcaaagttgtatgttcatactttgatacttaattcagttattttccatgatggtaccaagggttttcaccaacacaaatcaattaaagctttataatacctttataagagatatggaggagctttattttaactgtaagaaacactgtgaaattgcaatgatacatcaatgattttccatgataattaatcatctgcttgcaacctggctgctcctttcaaaaatacaattcctacctgcctagaaaatgacattttcaggaaaatatcattctggaaaggtattttgcaagtgttgaacattccctcttctttgaaaaccactttaagatagaattgtataggtatgttcttggacagacttctatctctctcccttctctcacctctgtcttcctcctacacttaaaaaaacagctttattgaggtatatttaacacataataaattgcacatttttttccctttagtcacactcttcattttattttattattattatactttaagttttagggtacatgtgcacaacgtgcaggttagttacctatgtatacatgtgccatgctggcatgctgcacccattaacttgtcatttagcattaggtatatctcctaatgctatccctccccactccccccaccccacaacagtccccagtgtgtgatgttccccttcctgtgtccatgtgttctcattgttcaattcccacctatgagtgacaacatgcggtgttcgttttttgtccttgcgatagtttactgagaatgatgatttccaatttcatccatgtccctgcaaagaacatgaactcatcattttttatggctgcatagtattccatggtgtatatgtgccacattttcttaatccagtctatcattgttggacatttgggttggttccaagtctttgctattgtgaatagtgccgcaataaacatacgtgtgcatgtgtctttatagcagcatgatttaaagtcctttgggtatatacccagtaatgggatggctgggtcaagtggtatttctagttctagatccctgaggaattgccacactgacttccacaatggttgagctagtttacagtcccaccaacagtgtaaaagtgttcctgtttctccacatcctctccagcacctgttgtttcctgacttttctgtcttcatttcgttatgtacccagtagttattcaggagcaggttgttcagtttccatgtagttgagcggttttgagtgagtttcttaatcctgagttctagtttgattgcactatggtctgagagacagtttgttataatttctgttcttttacatttgctgaggagagctttacttccaactatgtggtcagttttggagtaggtatggtgtggtgctgaaaaaaatgtatattctgttgatttggggtggagagttctgtagatgtctattaggtccgcttggtgcagagctgagttcaattcctgggtatccttgttaactttctgtctcgttgatctgtctaatgttgacagtgggttgttaaagtctcccattattattgtgtgggaatctaagtctctttgtaggtcactcaggacttgctttatgaatctgggtgctcctgtattgggtgcatatatatttaggacagttagctcttcttgttgaactggtccctttaccattatgtaatggccttctttgtctcttttgatctttgttggtttaaagtctgttttatcagagactaggattgcaatccctgcctttttttgttttccatttgcttggtagatcttcctccatccttttattttgagcctatgtgtgtctctgcacatgagatgggtttcctgaatacagcacacggatgggtcttgacactttatccaatttgccagtctgtgtcttttaattggagcatttagtccatttacatttaaagttaatattgttatgtgtgaatttgatcctgtcattatgatgttagctggttattttgctcgttagttgatgcagtttcttcctagcctcgatggtctttacaatttggcatgattttgcagtggctggtaccggttgttcctttccatgtttagtgcttccttcaggagctcttttagggcaggcctggtggtgacaaaatctctcagcatttgcttgtctgtaaagtattttatttttccttcacttatgaagcttagtttggatggatatgaaattctgagttgaaaactcttttctttaagaatgttgaatattggcccccactctcttctggcttgtagagtttctgccgagagatccgctgttagtctgatgggcttccctttgtgggtaacccgacctttctctctggctgcccttaacattttttccttcatttcaactttggtgaatctgacaattatgtgtcttggagttgctcttctcgaggagtatgtttgtggcgttctctgtatttcctgaatgttggcctgccttgctagactggggaagttctccaggataatatcctgcagagtgttttccaacttggttccattctccctgtcactttcaggtacaccaatcagacgtagatttggtcttttcacatagtcccatatttcttgggggctttgttcatttctttttattcttttttctctaaacttcccttctcgcttcatttcattcatttcatcttccatcactgataccctttcttccagttgatcgcatcagctcctgaggcttctgcattcttcacgtagttctcgagccttggctttcagctccatcagctcctttaagcacttctctgtattggttattctagttatacattcgtctaaatttttttcaaagtttttaacttctttgcctttggtttgaatttcctcctgtagctcggagtagtttgatcatctgaagccttcttctctcaacttgtgaaagtcattctcctaccagctttattctgttgctggtgaggaactgcgttcctttggaggaggagaggcgctctgctttttagagtttccagtttttctgctctgttttttccccatctttgtggttttatctacttttggtctttgatgatggtgatgtacagatgggtttttggtgtaggtgtcctttctgtttgttagttttccttctaatagacaggaccctcagctgcaggtctgttggagtttgctagaggtccactccagaccctgtttgcctgggtatcagcagcggtggctgcagaacagcggattttcgtgaaccgcgaatgctgctgtgtgatcgttcctccggaagttttgtctcagaggagtacccggccgtgtgaggtgtcagtctgcccctactggggggtgcctcccagttaggctgctcgggggtcaggggtcagggacccatttgaggaggcagtcttcccgttctcagatctccaccactgctctcttcaaaggtgtcagacagggacatttaagtctgcagaggttactgctgtctttttgtttgtctgtgccctgcccccagaggtggagcctacagaggcaggcaggccttcttgagctgtgatgggctccacccagttcgagcttcctggctgctttgtttacctaagcaagcctgggcaatggcgggtgcccctcccccagcctcgctgctgccttgcagtttgatctcagactgctgtgctagaaatcagagagactccgtggacataggatgggattatatccatgtgcgggatataatctcctgatgcgccgttttttaagcccgtcggaaaaagcgcagtattagggtgggagtgacccgattttccaggtgctgtctgtcaccctttctttgactaggaaagggaactccctgacccgttgtgcttcctgagcgaggcagtgcctcgccctgcttcggctcgggcacggtgcactgcacccactctcctgcgcccactgtcaggcactccctagtgagatgaacccggtacctcagatggaaatgcagaaatcacctgtcttctgcatcgctcatgctgggagctgtagaccagagctgttcctattcggccatcttggctgccctccgacaaaatcagttctttacactactttacttctttaatcttatgcttacctaaccaccatacttatgagacttaagaaacgctttggggccaggcttggtggctcacgcgcccagcactcgggaggccaaggtgggtnnnnnnnnnnnnnnnnnnnntttgatctcagactgctgtgctagaaatcagcgagactcccgtgggcgtaggaccctctgagccaggtgcgggatataatctcccggtgcgccgttttttaagcccgtcagaaaaagcgcattattagggtgggagtgacctgattttccaggtgccatctgtcactcctttctttgactaggaaagggaactccctgacccctcacgattcccgagggaggcaatgcctcgccctgctttggctcgcgcacggtgcgctgcacccactgtcctgcgcccactgtctggcactccctagtgagatgaacccggtgcctcagatggaaatgcagaaatcacccatcttctgcatcactcacgctgggagctgtagaccggagctgttcctatttggccatcttggctgctacccaaattgcacattttaaagtacagtggtccctcttattcgaggcggatgtgttccaagccccacagtgggtgcctaaaacctcagatagcaccacacctcatgtataccatgtctttgatctgataacctggatgattactaagtgactaatgagcaggtagcatatacagcatagagatgctgggcagagggatgattcacgccccaggtgggacacagcaggatggttcaagacttcaccacacaactcagaatggcgtgcaatttaaaacttatgaattttttatgtctggagctttgcatttatattttcagaccatggttaaccacaggtaactgaaactgaagatgcaaaaccatgcataaaggggactactgtatacaattttatgagttttgacaatctgacaaatatatacacccatgaaacaatcactgcaattaagatagtgaacatacttatcacccaaaaggttcttcatgacacgttgtaattcttccctcctacccctccctggcctctactccatccctaagcaatccttgatctgctttatgacactattaggttagtttgcatttcctaggattttatataaatttaataaaacaatatgtatttttttcggtctgtcttcttacattcagtgtacttattttgggatatgttatgttgtttcatgtatcaattattaattctcttgtattgctgagaagtagtctattgtatggatataccacaatttgttctatccattcacctgttgatggacatttaagccattttccccaacaccttttttattgccttaagaaacagagttactaaaagctatatttgagtagaagcataataaatagaagcatagtgaataactgtcataaatagttcttgggtaactagtttttttttttttccctttaagagattttatagtatccttagaattaagagtaaagcagcagagcaggtcagcagtttccccctctagagattttatttcatatccatttgctcctgaaatggtaactctgatttcccaagttgttatgcatacctaattcatcaaatgtaatcattcacaaggagacaaaccagcgcttcttttatctgcagccaatcagtatattcagtaagaataagtgaagtcaaaccaataccagacagctgtgcaagatgtaggaaaaacaatcaaccacaagagcctggcttaaacttaggaagtatagttgcatagatagcaccgtgttattctggacacacgttaaccaaccacatagaaatagccttggagaaacaaggttcttaattcaatttgataaatgaggactgtgggggaaaatggtgactatgaactatatatacgtgtgtgtgtgtgtgtgtgtgtgtgtatgtacaacacaactgtaagtgtgagtggttatttaggtgctaggaatacatgatgaatgagcttggtttctttctttaagggattttcagtctaagagaggtaacgatagattatatgtagtcatctatagacccataaatgactaacaattttaatcagtaaacttcttgtaggataagcaaagtattcttaggagtgcagagaaaaattttattggttctttctgggagtagggaaccttcaaagaggtaatttgatatagacctcaaaggccatatgtaattttgttagggaagggaggatgggagatgggaggaaaatttataagcttggtgagagaggtatggtgagccatgtggtgtagctgagactagattggagtctcacaggttggggctgggtggtaaaggagtttgaatgtctttttaatggattaaactttcctctgggggcaatggggactcattgaaggtccgggtttgttttaaaacaggagaacgacatgaaatcaaccatatatttgatgggggtagggtcagccttcatagattaactggatgaggttcgtggcttaggtgagagaataactctgtgcatgaaagaaaatggatttgggtatagtatttgaaggatatgctggtacaggcaagcttttatcagttttatgaattgtgtttaaattaaaaaattaaagaaagggagtaaaaggttaaagtcaacagtaagtcccctttttactcatgttcccattgattctcctccctcgaggcaaccaatgttccttgtttcattatatcatttctgatttatttcaggtatttagaaacaggctggccatggtggctaatgcctgtaatcctagcagttcgggaggtggaggcagggagatcacttgagtccaggagtttgagaccaacctggccaatatggtgaaacctcgtctctacaaaaacacaaaaattagctgggtgtggtggcgcgtgtctgtagtcccagctgctcaggaggctgaggcatgagaatttcttgaacccggaaggcagaggttgcagaggttgagctgagattgcgtcactgcactccagcctgggcgactgagggagactgtctcaaaaaacacaaagaaatatatctatgtacttaactttgttcctgtagtttctattagtaataattcgaagtcaataaatatagaatgacttcatccttttggatggctgcatagtattctacttacaaatatgccataatttacataaccagttctttgtgatggaaatttaggttgtttacagtctttttctattacaaatgatgctttagtgaatatccttggaaattcatcatgttgggtactataagtatatccttagaacaaatacctttcatatgaaatttctaggtcaagcttaagcatatttaaatttgtaacgtattaccaaactgtccttgatagagattttaccagtttatactcaacaatgcatgagagtgcctatttctgcatattcttgctatcagagtatgttattacatttgttgaactttgtccctctgatagttacagatggcatcttactgtagtttagtttgtatttcttgtcttctaagtggcattgaatatctctccatgtttttagagtcatctgtatttcctttttgagaactatttttaaaattcttagcctgtttttctgttggtcattgttttttttgcttcaggatttataggggctttctatatattaaggaaattagtctcttctctgtgaataggaaatttttaaaaagtattctggggttctgttctaaaagcatacggatatctcaacagtttgaggaatcaaaggttaggcagacatggagggccaggctaataagcatgtaacgggtttctactagggggcaaaagcacgtttggattccagttctggaaagaccagtgtgttctagggagtttgcttacttagactaggaaggaacaagcttaagatcagggtagttataatcaaatgagtgggttaaagaatgttggagtaatgagagaaatggtgaatcagggctaggtgggggtagttaagaatagagaagagggaatagattcaagaaagaggaacagattagagagacatgccagccgttctctttttgaggctcactcttttctagtcagaaatctcatgaccaacatgttttgtctgtcctagtttcccctaaggctatagcacaggacagcccactgctctacagctgggcaagatttgagtgtagtaaaggatgcagaaattgctgagagcttctctatctgtatatggagcaggaccaagaccctaggaccattccaggggtgtgtgaaaccaggtaacgtgatattataagtagtatttacatggaaaagaaggggcaaatgtcgtacaagtacagtgagtatcaggggtacatggtaaaggtggagcaagctgtcttttatacaacttctataattatggaactttgcttaaagaaaaacattaaattatacttactggaaaaaaatcaaattgtgttaaacagcataaaattaaaagtaaaaagtcttaccctcccttgggtaaccaatgtaaatagttctatacatttttgaacctttttatggaaaaatgcatacactttaaggattatttagttcatattatacatgctgttcaacaactggctttttctatctaaatatgtcacagatattcttctatcagtatatgaagatctattgcacattttagcagctccttaatattttattgtgtggatatgccacagtttatttaatcatttccatgatgatgggcattcaaactgccttcttatttatgcttttgcaaataatactcaatgaactttattgtaacaccaattgagagtttcctccttgtcccatttgtgtctgcctagagcagcaattcagagactctctgtaatcaatctgtccacttcagggacagctttttctctaagtcctgaaaaatgagtggcgtttgtgtgtgtatgagttttgaggccatgtttatagtagtagacttttaaaacacaccttcctgaactttgttgttccttttaagattgatgcctgcaattttaggtgactgccacatggtggcacagaagcaccaaattcctacagacagtgcttacagtcttggtatccgtgaagggtttgaaaatgtttccttattgtgtcattatactaaatacttataaaaacagattcaatttaattatgaagtgtctaaaaaaattctcaaagatatatgcatgcatttatcatctgtatttctttagatcttcatgttatatcatatttctgattaaacagctttcgtttgtctcataagaaaaaccaatatacttcttacagagtttttagccatacaggaaaatttccccaaatactttcagctgtttttctcttgcttgccttcctgtctctacctctgctccgtttttcattgcttgaagttaagagatgacagggttttctttttcccacttcctggtgcccatctctcccagcatctccataggcagccaaggccccagcaagttaagcttcacaagaccagcagctgtcatttggctgtgctgctcagctaatgggagcagtggatcaaacttcaaaagcatgagctatgagagtttcactggactgcccccacctccctcagccttgatgagcaggctggtggccttacacgggctttgaagtcccatttgcttgtcccccttgattcccaccagtttaagggtagtcgcagagagtttagtgggaagtggcaacattacttctctttggtggacttggaataccactcaaatcctggccttgagtttcttcctttggtggcacagggatggaagggtctttcagaaatttatagcatacaggcattttgaggttggtatgtgggaatggtagcgtaggaggctcagtttggacatatgaaagtcttggactacattcctttactcatgtaactctaattttgtgcatctagaagacaaatagtgttagcttcccttttcagttaaataggattcctgcactgtttaaagcacctgggaatgtactttttgcctgtctcagtttaaggactcttgggccataatacccagtagttattgttttgaaaattgttagtgcccagatattttactaatttattactttatttttctctttaggaaataatgattgtttttaattagaatgccggggaaacactgcatttattaagcacttcctatttagggcagtattatacaaagcattgaagaaaaagtttacagacaagcctcacactatgaggctccatgcacaggctgaaggacactgtgcatggatgagagactcacatgagctggggtgtggtcacctacaatctctctccatgtgtagattcatgagcttaccctacttctctattgcattatgtggaattttggaatcttgaaataattcacctgatataaataatattaagttaaaattctagatctttacattagccagaaaaatgcctattctatatctatagggttgttgtgaaggtgaaataaacatgttttatgtgaggatgagcatgcttttatcatttgggggaatcttccttggagacccaagaacatttggtgtgagaagcttgggtgttcttagacaagttgagattctccctgcccaccctcccctcagctgttctcttgatgctgtcacctacttgagggatggcttttgtctctttggtgtctcccccaactcctagccttgcacatgcatgataggtattaaaaatatctgctaaggccgggcacagtggctcacagtggttgcagtgagccaagattgcacaactgcacaccagcctgagtggctgggcaagactctgtctcagaaacaaaacaaaacaaaacaaaactaaacaaacaaacaaaatctgctaaatgaatgaatgaacatttataaaagcagtgttagaatcactgtgggcaacagattctaacaaatgttataaatcatcaaacgataactgagcatgtctacaagttatttcctctaccatttacaaatcaaaatggacttgtcacagggctttctaggtattgtttggtatatctgtgacaagaaaaacatctctagagggaaaaataggaatattttcttctgttttcaggatgcaatttatcgcctttgacaaaaaacaccaggaatgtcttctcagataaaatgttaactccgatatttgaatgttttttaatttcagaggtaaatgttactgttttaaaatatgaagacggtatgactagacaggatgttaataacttgacattacaaaatttattaaatttatttttaaagtggtttggttccccctctcaaatgcatgaaacatgtgggagttggaatagatctgccccaggctgccaaacaaatttttaatggaactggagtccttcagggattgtcctaaatccacataatattcttaagtcctggtgtttgcactgggacctgtatattagcagctgtacgtgtgaataatatacttatatcaatctatcactcttgtgaatccacatctgtaggggctgctgcacatcaattattccacctcagggggtagagaaatatttgggccagcactgacctccttttcaatcagggcctctggaagtcaaatggtccctttagacagaacctctgtttgggaatccatttggcctaatgtggccatgctgggaagtgaatgtgattacctgtgtcaggtgtggagatggcatccagagaagcaaatgaaaattctgtcacttggagccaccgtcaacattcaggatctctcccttctatctaattcttgcataacatattagccagtctatcagaaaagaatgtcagcttcagtaagatgcatctactttgcaccaaaaaaaaaaaaaaaagcaactgtttgtttgaaataaattgtaacttgtgtaacttgtttgaagagctaaattcactttcaaattcttggaaatgtttttattgtctgaggtttcaggaagaaagtctcctcaggaagaaggaggatttttttgtcttcatatctcagtgtcttctcttttttttttttttttcaaaaggaaaacaaaggttttataatgcttatctttttgatcaaaaacttggaacatctttctcaagagtacagagttcttttattttttaaagcttctgcttttatacctagaggtgtgttacagattgtcataactgataaatcaatgacaaatgtagccacttcattttgttggggaaatagacaattgtggtagcggctgaccatttatttaattatgtggtaagtaccacatgatgagagggcaaagttaattgatgatttgggctatctcagccagggtacagtttacatggcaattacgctgggatcatctaactgtaattggcaagtaattttgtaagtgaaggaacatgacagctcatttacatggtgttcactgagtaaaatttggggacatttatcaactacttccaagtgaagagtgattgtatcagtgtctcccaaaatgccacaagctgtttaaaagttacatgggaggttttttgtacaaatctccatgcattcatttccctgaacatttgctagttatgtgctgtgtgccaggcactgtcctagacactgaggatacaaaaatgagtaaaataaagagttctactctcaaggaactcatctatgcgaagcagacacatcaataattttaacacaacgtagtatgtgaaggtttgagctctgtacaagtactatgggtgccaagggtggggaaaccagttaggtggaagatggttagggagagcttgctagagaaggtcacacctgagattaaccttaaaggatgcccagggcttttcaaggggaagagcttgccaggcagaagtgccagccagagtagaatcggagcaagacagctggtgtgagctggaaactttaagcaatccaggtacatttcaaggcagatatgtagcctgtgaagttgcattagctggcatctcagagggccctgtaggtcatgctcagggcctggatcttattctctaccctggcaagccattggagagtcttaatgtcagagctgttttgtaggaaggtcattttgtataataaagccacttgcattattgcagtatgccaggctccattctgcatgtatcaaggcatttcatcctcacaataaaccccatgaagtaggtattaacatttcccgtcatctatagatgaagaaactgagtacacagaggttggccaaagctacacagtgagtgatggaggagccaggatttgaacacaggctgtcctgctccagagcccttgcttgtcaacagccccattctacagcatgtcataactctcttgacacagctgactgcaattccttgtttacacagtgtcccctacccccaccccaacacacacacacacacacacacacacacacacacacacacacacacacacagctgtgagctctgtgagggcagggaccatgtctatcttgtttatagccatatccttcaagcttaagacactacctgcaccttcatagacatgcaacaaataagaaataagtctagttttgaggagggttgtgattcgagttgacctggcaagggatgatgatgaaagcctgaatctaaggcagtgtcagtcaataaggagagatgaagaaggggaaataaatggtcagggtttgttgattgattggatgtgtgggtcttgttggaatattctcacagtgcttctgatttccaacccatgcactggagggatgacttggcaaaagaatgtgaagcagtgggaagcttacactgctcttcacagagctcttaaattccttacaagaaatgttgcagactcaggatgagacattagaagagacttcccttgaggtggttaaaaatagaagggacacatctgcctgggatggttgagagacagagctgcccttgggtagatgagtggttagatagcctttgggattcttccccttttgaaaatgctctgatttaaaataaatcaaaattctcccaagctgcctatgcttaactgcctggcttagagaagataaaaccaaagtgttcaagggctggaaaatattgagtccaaatgcctggatgataaataaggaaatagaagccacggtgggttaaatgactcatcccagggcacacacttgaggcaaaaggaatacccaatcattggattatcagtctgggcttgctcttccccatgtctcatacagcagcatttatgttttggggggtcctctgtgggaaggcctgtgctgggtagaagcacacagcaaaggaaacctggtatctgcccttgaggaattcagagaacctcaacaataaagaacccttatcacctgaaaatgtcacaaagtaccatctattacgtagactatttggaaaatagagaaaatgaattttaaaattcgtaatgatttttttagcctcactcattgcctggcactgctttaacgctttatatttattatctccaattctccgtgttttaatgctttacattcattatctctaattcttacagctgcctgcaagttagatagtatgatttccattttatatttcagaaaactaaagcacccagaacttgttccataagatcagaccatggtaactccaagttcaaccctgtacaaattatattaacattttgttgtattttttgcagtctttttctaagtactaagactatttacttacatatatgtaattttatcatagatacaatttggaatcttcattttttgtggcatgttctatgtattttccatatgattgtttagtcttcattttgatggctatctaatgtctgatcaagttttcaggaggttcttaaatgcttactcatagaaatcttccgattcttggtatatatggcattttaaagatatattttgaggactggtacctctgcccatcctctttggatggcattgtggagaggagaagagaaactacacagaggatcatggctttcttctcccccaggagcccctctgagaagggagagtggttctgggcacagctcagagtggagcctgggcagagatggcctgaggcagatagcaggtgacttttcaaggcttggcttttctgactgaacacacattcttcctcctgcccttgtaaaaaggcaagttttcattttcttagggtagtaaaaatcttttgtgtgaagaaaaagtgtcgtcaagtgtcttattcatcagcatatataccatctctttaaaatgacagtgggagtaaaagttcatcagttcaatatgtctttcacatttggagactcctgactaataacctctggtatttatcatcagaacagccaaagaactaaattctggcacatgcttctctcacgcactgagaaaaacttaaaaagacagaagattttctccattttttcttctattcacttagaaggaaaagcataccttttttaattaaaaaaaatatgagcacgcagaaacatctggcctgtattaccacagcagcttcctaaatggcttccttgtctccagtctgccctttaaaaatcaacactatatgcaacagctagaaagatttctagatcacagatttgcaccagccactctcccatgtcactggcatattcttccatgactctttcatggttcttggggtcaagtcctgtgtagccatagctgctgtctctcctgcttgcaccctgccccagccacactgagctgcttgtggctccctgcttcatgctataatgtaggattatcttcaggcccgtgtacaaatcagttctttctccacaagctccctgctaggctctgctgaacctggatcccagcatgggctcccacaaaccctatccagctattatacagaatataaacttccatcttgtttgtattttattttatgttagagacacagtcttgctctattgcccaggctggagtgcagtggtatgatcatagctcactgtaaccttgaactcctgggctcaagcagtcttcccgcctcagcttcccgagtagccagaactatatgtgcatgccaccacacccagctaatttagccttgtttttgcttggtcagcataattcctatataaaattttttaaaaaaacttgaatcccattgggcaaggcatatcactgtttagtttgcttaaggcccgaccactctgtgttatacactaaaccctaatcacacatttattctacgctgggtcttataaagctacttgttttcttatctcctttacacaatagaatataagctgtttgaggataaggattgtgtattgttaactttcatatctataggcttgacaaagactactcaataaatatttattatatgaatttatgtcttataaaaaaacaaaaattagaccagaaaagactctctttttggcttttctgcttgttcatgaacatcacaagactaatggaactcagtgcacctggcaaaactaacagtatttccatcaggtgatcgaaagtctgtgttcgtgatttgatactactaagattgaaccactctggacatttaagcttttgaatgtgcttatgatctttcccactttttcttgtaccaggatatctgtttccatcaaggcgtatatttccttggttttatgtccacatgactatccaactgggctattcagaaatatgagtggaaaggattagacatattattttatctgctttgcaaatctgatcatgaccaaagtacaatcagtgggaattctcaaagtttggtcctgccaataagtagtacatccagatatatgcaagctggtgatgctagaggttatagtaatagaaatgcccattggtgaatctttgataatcctgtgcttgtttcagtcatcatgtttttccatttccttagttatccttttctagtcattcatctacgtgctgctttaaagatgctaaaaaagacctggtgtcatccaggaaccagattactcatatttatggaatttcatataatcagtgccataggaccatggtacgtgcctatggcaatattcttgccataaatttgttcttcagagaatgctctgcattttcagggagtgctatggatattgcagagggactgtacaccatagggcattgctgaataatggaaatgtgttcaagtatcaagtttaaggaaagaacagcaacaaaaaaataaaaccctttcatccaagcttccttcccttgggaaaaggtggggacaaaatggcgagagcttattatagaatcctttagcagccagaaatttcattgacaattttgttaatgtgtctgctcgtctgccttctcagaggctcattgtgaattccttagttgatattattaatggttaatgggtgcacctgaaaatcaagcaatattgtaccatttgggtaatagttatgttaaatggttcttttctacagcatcgagcttatcagattatctttttcctaataatgaatacctcatcttttccaatttcctaatcaaatgcttccatgtcatcttgaagcagagccagttccagctgcatctattctatactcttggcttcaattatatcaaattattcaacctacttacggttccttagattcccatttgctctgagatatagacatcatgcacctctttggaagctcatgattgccaactattcaaaacaggtctattgtaagtaaacagtgaatcaaagagagccctaggctaaatttacagttatgagaaaatttctacaataagtttcttcctaaatattggtgctcttgggtgatcttaagtgttctctttaccctgtccctgctccctaaaacacacatgtatctcattctgcatggcattgcttcagagttgaggatgtccgtggcagtggcaaaaagtaagtgcaggcacgttttgactataaaataacaaacatttaatttttcataggtaatatatagtttggattgatcagaagtatgaggcttcccatacattgccatattttattttattcaaccagatacctgtggctaaaagaggacagtacaagaaatagtgaacagccttggggaaacctgatattgtcactttctgttatattggctgctgaaactttattgtatcttatgcctctagtcagatgaaatgattcatcattctggactcatcttttaataatgacttacaattataataacttataattcttatctttatacttcaaggcttgatctgcatatctctatctccttcatttctaggttcttttgatcattgtttcagtattctgaactttaaaaagatccattttctctgctaagaaaaggagagttcagactcaccactgaccacccaggatgactcaggctacacttcattctctagtaacatgttcagttgccctttggggccagaggccgtgctttatattccctaaatctctattgcccagcacagtgtatagaatgggcacagtacatagtttctaagtggatgaatgaatgaatacatgatttcacaatttatgattgatttacttctttaacgcaaaattatattttacctggaactgtatcgtttcaaacttctatcaaatattcttaataccaagtacagtgcagtgcagaccttctcaataaatgtttagtgagagcaaacatatatattttggagacttatcatggagatgccagaatttggccacacagtatttcaaaatccatgcttgctccaattagtcaagaaatgaattttcaccccccaaattaaccattggttcaatagattggttactgtgattactctccagtaatcacagagatggaaaaatctttggaaagccatctatgtttcttgaaatatttaaatggaaaccttccccttcagagtgttattgttcaatggatatccacaattcctgcaaacatctattgaacaacttgtatgtgacatgaattggagataaatgtaaaactggcaatttttcaaattacttataatttggtagccaaggatagaaataaagcagcatatagtaagataaattttacaatagaagcagatataaggagcggagaggggggagtaattaattccacataaagcattagggaaggcaccctgaaagaaatggctctgagttagatttcaactatgacagcagtttttgtcttttggataactatcatgagtgaaaaatgccggattgtgcttgatgtatttgtttacaaggcagtgtcatattatagggaataaacttttaaaaagcaaagatctgaaagacatttaactcctcagtgcaacacctgaatctccaactgtgttctttgttgtgtgatatctgagaaacagagctgaatcaaaccctactatattaatggatttatatatgtgcacataaggctaatatattttatgctgccaattttttatggtttcataaatagtgctatcactaacatttctaaaaaatgaagaaaagagctcatatgtgctagcagaaattcagtatattttatagaacactgctactcttgatatagcctacgggatgtgacttttcataaaaacctaatgaatttctagatttgtcagctgtttccaaacagatgcactcagctaatctaatggaaacattttgagcccagatcccaaatatcaatagcttttagtattgcaaattagtttgtctattgggtaaattgggctgtgtggttcttgataaaaagtagcaagtaattttatatggatgttttatgtgtaactgccttgccagggtttaatgttcatatttttccttgcagagttttaagttgaatgtagacagtcattgtgctctcaaggaagctgtggaggaggaaggacaccaacttcttgagcttattgcatctcacaaagcaggtaaatcctcctgaaatattgcaagtctttacgtctccagactattaagaatgaagaagcattgctgtaaattactgcatatattcacttccttatgtattattaatatttacattatcagattgaccttcaagatttataaatgtttcatatactgcatacaatgctgtgatacttataagatgaaatactgcctccaaatggtctgttcattttattttgggctgccgtttgcctgagtttcaattgaaattacattcttgaaaacttcacattgacatgctttttgatgtaggtgctctggaaataacattaagacaatgaatgagaactgtatatatagttataatgcatacgcattagggtacttatagatatcattacagatataaggcaagcagtctaaattatttccctgccgcttcacacacaagaacattttgcatgttctttgctggtctttgcattagcagagtttttggccttcaaccaattcttaccccagtattaatatatttataaggaacagattataaataaaaaatagttttgtcatttggttatacttatcctgataatagaagactgtaagacaggatacttacagtttggctctaggtttgagcttagcacagctaaataggaaaaagacagtattaattggatttactaatgttaaagactgccgtcttaattctggcctatttactgtatttctcattgaattgactttacctatttccatagacaatttttatcattataaagtctctacacagatacacacagagccttttatttggaatgtgaaactgtaatgttattaatttttatacattgtgatttttgttcctcatgtatttttttaagtcaatatactgagtctaaatcagtttccaagccagtcatctatgtggttatcacatttttgtgtccttatacctcatgttaagaattgcctgtctctattctgagtgacaaatgctgatatggcaggtgatggtaatggtcatttaaaaatatttatattgtttaaaatagccatctaatttactaaataaaaataatgagtaaagattcattcaggcccacaacttctgctttcccctccttttggagaaggactgaaggacatgctgcggatgattgcaagtcaatggaaggagctgcagaggcaaatcaaacggcagcacagctggattctcagggctctggataccatcaaagccgagatactggctactgatgtgtctgtggaggatgaggaagggactggaagccccaaggtaagtggcttgaagtttgccttatttcctcttatttctgtcttcttttgaactaggcaccactgaagttttctttccaaccctaaggctttttgtttctactgggtaaactttatatctctctctatatatatataaacaaaatgaaatgccttagtttaaaacaataaagccttcaacttccaagttttccaggaagaggtctttttttgaaaagtggcagggtaggtgggggacagtactttaagggtgagagaaagggggacataaaacatttagtaaacaaaacataaagcatctttaacatgaataatcagaatggttttaaattgttttgttgcaactataaatcactataatcagtgcaatcactcagctctgacatccattagccgcttggttacagcaaattaacaaagaagagagaaagtgattcattatctcattcctgttaatgactatcagatgcattgcctaattaggggatggtcattgtagtgggaagaaggtcatatgctttgctacaaatctttttgctccaagtgtgagttctccataatggtacaagcactgaatacaacaagtactttaaaaatgagtactgatgtgttttggttattcattttagatgtccaaaataacccataaaacatatgcaattgaactttaaatgaggcaccttttgatacagactggcactgttctaaaggtatctttggactcataatgtggaaaataatgttattaatttgatattttcgtgtaatcactcctttcttttgcatctgctcctttgtggaagtaaacacagaaaacctgcctcataataaatccagaataaaacttattgtaacatgggggaaacatatttaagagttcatggtttttattcctggcttggacaaagtaagtaaatcatcatcaagtcacatttattcagcatccatgtagattggcattgtgctaaatgtatacacagcaagttaaacaaatactttgccctcttagactcacatttttaaatgcaggcagaggagaaacccatccagccctgcaatgttgagacccatgcagccagtgaaaagctcagacaatttacagcttttgaatctcaaacaacgcctttaacttatttgttggaaacagaggatagaatgatgagctcagtttcacttaaagaaacctccatgaagaaggttgcatttcaggaagtacttgaaggaaggaggagaggtggcttggcacatgagcacatattttaggaagtgatgtgatgaaaggatcaaagctggaactaataatgtggagtggagactgtattcagcacatttctcagggcaaactcggagctattttaaggagtaggctgtagggagaagttcactgggctaatgctttggctgtgtgtggaagtagggagaggaaagatgataagaaacgacacagttaaaaacttgttgtaggaggctgaggcaggaggatcacttgaggtcaggagtttgagaccagcctgggcaacatagcaagaccttatctctgcaaaaagtgaaagatgagccaggcatggtggcatgcacctacagtcctagttactcaggaggctgagacaggaagattgcttcagcccaggagtttgaggctgcagggagctaggatcacaccactgcactccaacctgggcaacagagagagatcctgtctctaaaaaacaagtcaaaaatcttaattttagctgggtatggtgacatgcgcctataatctgagctactcaggaggctgagttgggaaaatcactttaaaaaagcttcattgtattttgtttatttaacaagaatacactgagggcctactttttaaaagctatcctgtgttggctacattttacatgccagatgctattctatagcacttctgtattatgtcatttaattatcatgacaaatttttaagtggttctattttaatccccgatggagaaaaggagggcaaagagaggttaggtaacttccttaaggtcgcacagctgctaagtagcagagctgggagccctttgatcgcagagcccgtgttcatcaccacctagcatactgcctttcactggcactgctcagggccaagtgtgggaccaggcgttagagatgaacagctggcttccgtgcctgtctcatgaagcttgtggtgaagtgtgagcaacagattttaataactgcctttacagattgtgatgtgccgtgaaaggaaagaaaagggagtcacaagaggttgggccaggagaagtgatctagattagggtatcagggagggattgtcattctgtgaacaggccagtgttgttagaaagggagaagtgtgcaagggaagctgggtgccctgttgttggacaaggggaggcttttggagtaagaagagaagtgacattattgcgttgcactctaaaaacctcttactggctgtggtatgggacatgagtgggtggggtgggatgagtggggctagggtgggagtatgccgaagtggactgcagagatggcacaatgacctaaattaatgaaagagctatgttgaaaaggagtacattcaccagggccagtttgaagtggacactttgaaatcaccttattgtttagggaggcattgagatagaatgaagttgataacacagtgagaaggagaaagtattatcagaggagaaacattgtcagcatttctcaaaaagaggacctgcctacccaggctcttcctcagaccatatcagaacctcatgggtggggccccagaatctgcattccaataagctcttggagaacctctataataggcaccaagaagacccttttcctgcagggactacatgatcctcacccaacgtgaataagagaatgtctgttgcattgttacttataatagcaaacaattggcatcaactgaaatgtttaaaataagaatggtttgattaaattatgctaaatttcattctaatgaaatgttatggttacataaccataaaaataatgttttagaagagaattggaaatactggaggatacctatgatatacaatgatatatttttgagtatctttgaattttccaaacctctcaacgagcaagaattattataaataaaaaaataagaatacatttaaaaatataagaattaaaaagtgataagaggtaaaataggtgacgttgggctaagggacttgagatatgaatttaaatatcaagaagaaaaataaatatatctggttcttaatgattaaggtgccttacttcttaagagaaaaccaaacaaaaaccctccacttacattattccaaaagtgaaaataccttgagtcacatcagcttaccaagaataacattcgtgctttcctttttaatagtatttctattctagagcattttcatgtcacattatgtgcacagcatagtgcatctaaaagcagctacaaggagaggcttttgtaggtatccgcagatgcagaagttgaaggaggctctgagagtttgagatcttgacatgattgagccagcaaaaccccaggcctctacctcccaactagttctctctccacaatcttggctgaattttctctggaaaaatgaactcatccatactcaaggatgaatgtgaaatcaatttaagacaaagaaaatatatttattaatttaagcttaagaaactatgaaaaaatcagaatgctcatgctttctatttgtttaatgtttatgaactgcttcttttactcccttgggcaaacacatataataataatataaaggctcagattctgaagccagactgcttgagttcagtgattggcacttactagctgtgtgttcctgggaaaattatttaacttccctgtgcctccgttttctcatttataaaatagaggtaatgataatatctgcctcaaagggttgtgatacagatttaaaagacttgacatacctaaagtgctttagaacagcacctagcacatagtaaatcctaagtaggagtaaatatacaagacttcattttcttgttttatttacagttctgggtacatgtgcgggatgtgcaagtttgttacataggtaaacatgtgccatagtgatttgctgcacctattaacccatcacctaggtattaagcccagcatgcattagctttttttcctgatgctctccccgcacctgtcccctcactgacaggccccagtgtgtgttgtttccctccctggatctatgtgttcacattgttcagctcccacttataagtgagaacatgtggtgtttggttttctgttcctgtgttagtttgctgaggataatggacaagccttcattttctagagacaaataaataattttaataaattataaataatagacaaatattataatggatctgataaatactctgatagagataggaacaaagtgctataaatacactgagaaggaaataactaaccctaccttgggctatcaaagaacaatttacagggaggcattcttgttttaaatgaaaggtagacaggatttttgccaaggtgaaaataatgggcagagagaatagcatatacaaagatagagaggtgtaaaaactgtggtgtggctggaacctgggaccttgttgcagatgatgagtaggccagcctgccacagactgcaccaagacgtaacaatgtgacaaaaaatgatccttaatgatcagtgatttgacaataattcctcctatgtctctattaatataatccaagccagagtgaggtctctatacacaataaacctgaacatattgtttaagccaaaatttttattgtcatattgcaataaatcgagcaagcttaaataggttaccctgaagttctccatgactaaaagctggatttggcttcttagccattatgtcagtcctctttccatgacgtgaccttgcacaggtcatgtacaaattgtgccatgaaatgcatctccaagcacagcagttatgatcatctatttcatcttagacctaaagaggaattaaaattaaaacatgataatacataactccagaattcatcttaggtttacttcagaagctactgggagcttgagaagcataatagaaaatctaaggaatatatctagggggtatttttcttttttaccttgtttgagagactgcagaaaaggacttggttttagaaatcttgtaaagaaggaggataggaggaaattcaaagactctgggaaacttctcccctaggactcggcagcataccttatttgttgtatttcattttttaaaaaagtgttttcccaggactgtgagatcttttatacatggaaatagagaatagaattcaccagttctagaaatagagcttcagcactcacatctaagaattgaaaatatgcttataattatatatttttactttaagatagattggtgaaagtttatcacttcagattaggctttcagtatgttcaattttttaatggtctacagctggagggatttcaaaacatagtgaataacacctaacaaaagctacatttttttgacctttcaaggcaaaaaacaaaaaatctgaaagcaagaaagcatctttaaattttatacattgtctcctttaaaatgttcttatcttctctttctttacttttcacttacgaagcatgcattattacaggtgtcttataatggagaccaggatttccccctatgacttatccaaccttacatcactgaaagcatgcaacaacagttccttcaccctttttaaagaaacagataagtttccagaacaaagaatatttgaagattttattgtaaattcagaaaactttacagctactacgaggatgacctagcctgagtcccaactaacatcttcatttctttagtgaaaggagacagagagttagctgctttgaactctaggattgtgctcattttatctgtcttctttgaggctcttagattgaagtcatcttcctttggaaatggatatcagactatgaaggtcatcaatgttatctgttcaacaataacagaacagcaagcttaaggatattcctgatatatgtttgctcagccctatgaatgaaagtgttagatattggctgagaatttacatctatgtggcctttgacttgggtatattgcttacaatatacccaactgacctttatttagatgtcaagagagggcaagtctagtgttagcatgtgtttttgtttgtttgtttaccagatgcccaagtcttaacccagtatctatgctaatgaattatgggtaactttctttaactgaaggggtataaaggagtcgatctggggagcttcttggcaagatgttttgggtaagagcgcaactggctaatattttcttagaatagaacttgatcctgattcttccacagcattggtgagacaaagtattggatctgcattcttttcttttctggctcagaagcttatgtagttagcatgttccttaatataagatcttccgaaacagtgctaatgcaatcaatgggaattgcatttatgtgtcgtcagtcccacatatactgatgcccatatttgtaaggaactgcttgagacactttgctgtcttcctcatgcaaacaagagcacaggtatatgttatcgaaagaaaccagaaatgatctagtaagattaaattgtgcctaaagtaatggaaagaaaaacagcaggccaaggcctggccattatttattgagtgctgacagagaactctgcactctgcccagtgccaggccagacatgagagaagacatgcttttctgcttagtggtcttatcatttcagtgtaagcacatagtgtaacatcttgtctaatgtattttgggctatctgagatctagaataatagattacctaagattcagatcatcttaattaggatgttagcagattgaaatggaatggggttcttgatgcaagcaaatgagtagtaaatacattatcaattctacctcttctgtgcagaaatatttctaaaagccagtatccgatctggttcctttcctgctgaactatataaacatagtcctgatttgcagtacctagggagaactctttctgctactgtggatttttcaatagcccctttttttcgttatcagaagggcaacttttcttcaaaaatattttttgaaagacagaaacaaaagtgagttacttctttgaagatcagtgtggttactaagtttgttatcgaatccaatagaaaatagtttctctaatctccttgaagcacttaaatttgcatattataagatgtatgggtggatctaagatgaggaattttttaatggtctgccactctcttgagatgactgaaaaaaatggttgggaaaataaaaatatacactaggtcaaaggacagctaatgttcttggtctatatagtgtataagagcatagcagaccgagcacagtggctcatgcctgtaatcccagcattttgggaggctgaggtgggtggaccatgaggtcaggagacaagcctggccaatatggtgaaaccccctctctactaaaaatataaaaaattagccaagtgtcatggtgtgtgcctgtagtcccagctacttaggaggctgaggcaggaggatcgcttgaacctgggagatggagtttgcagtgagctgagattgtgccactgcactccagcctgagtgacagagcaagagtctgtctcaaaaaaaaaaaaaaaaaaagcatagcttattttgtttttcacactatacttccattgctggtggccttgagaatagaaacatttggctcagcaagaatctgggagtaaaattctttggtgtctctaatcaacacagggaaaagtcattgacaggaataggtagcttacttttttcctatttagtccaagaatgcctaatctctgaatctgcaataactaaagttgaaaagatgcttggtattgtttacaaacttacagtctgtggaaagcagccatttttattggcagatctcacattttgtacctcagtctgatcaattttaaatataatatagagtaaacacattagaagcattttgtgctaggtagtggaggtcaaacattttaaaaatctattaatgtaagtatttaagcacaaaaaaagaaggcaaaatacagaattgcttctaaaaaacactttaaaactaataagtaaattctttgaaagtgtgaaacaattacctcagtgtgtgacttacactttttcctggaatgtgttgtttctggcaggggagcaggctgagctgggagagccctgcctgctaaagggattactccgctctggcttttgggtttattgagtcatctaggccttcttattaaatggcagctttcaaatgtacacacacctgcactcagcaccctaaatactccaaatgcttgtttaacttttctcacacccagagtacctctcccatctagtgtagtcaaatggcattgagttgtccacattttgcttgttctttctctttggaattcagttggaatatacccatttatgtggttgtgatgctgccagagacagagtgttttttaaggtactgtactgctctttgctctgtactcagagaacattcccagtcttagctcccactgtgcctaaatgaaggtttatgtttctcaggaaacattaactagattggaggtcccgccgggcagagctcagggaccatctcactgcaggttccaggccattttgcattggactggggcagtggcttctcatttttatactcatttggcctgcagaggccaacacttgtttagctttgcctcctgcagagctcagcaaggttgtggacctccctgagtgagaagagggagagggaaaaaaggaagcctaaatcaagacactaagacaaaagaaaagagagactagaaagaagagagtgaaggaacagaggagaaagattaaagaacgaagcatgtgtccagtgaaatgtggtagaagctaaaaaacattgcctcagctgtctttaggggcattggttccacaggctgcccaagtctgtttcatggaccttagtgtattcatgaggtctctctctctctctctctctctgacacacacacacacacacacacacacacacacacacacacacgttcattcctttctcagtctctggaaatcaaaagcagaaaaactttctttacttttgacatcttagatattattgtgtaaccattgtgtgtgggtgtgtttatataacatattctattaatgcggttagcactcacaacgggcttactatagtttaggttcatgtaaagccttttacctgggtgtgcttgttcattcttcccaacaatgccaggagtcctaactcctattattactttccctttactgacaaaaaaacttaggttccaaacggagtagataatcattgagagagtcttcttagacaccctccataacaagggaaaggacaaacttcttagcccatcatttgattctagctgcttagttaagatttgtgtcaatgttttatttcttaattcttctagtttacccacccttttccaaatgtatttttccttttctttgttctttgctcttgctcatggcttttctcattccctccatctatactgcttttattcatccttagaatagataaatatttaaaatgtaactacaacatgatgatgtagctctggacaggatactgtacctcttcttgctcactgcctagcagtggagacagatgtgcacaaatgtagttctaaattaaggcagactgtgcgatgaatacaagagatacagaaactgggagagggaacgttatttcaatctgatgggccctgggaaggcctaagagaagatggattttgtggaggtctctaatatttggcaaaattggtagtagaaagatgttggaaggagagcattcctaacataggaaatagcatggtcaaaagtatggaaaagggaaaatatgagggacatcgaaagtgaacagtgaatagtttggcttcttgagcatacagtatccatgtgtttataagcaagagatgaggacttagtgaaagatagatactgaaaaagtttgacctatatactggacagctttggatatcaggctgaagagttgtgttttactggtgtgccctgtgtgtttttaatgattgaatttggtcatagaaaacagatggcaaaggcaggatgaaagaggaagaactgaaagtcaagacaatgaattaggaaactactacaataatgacaggcaggccgaggcaaagcagtggctgtgctctaatataaggaaaaaagtaagagtgatagtctggaagaagaaataataggatttggtatctaggggatggagcctgagggaagggttaacgatgacttaaaggaattgagcatgagcagttaggagaatggtattaccattaactgaggttggacacattatgataaggaatagctttgaaagggaagataattaactctgtttagtacagtgaccttgatgcacaattaataagaatatctaggtgtgtaacctgggcatagatatttttgtaacctccccaggtgattctaaagtacaggaaagtttgagaacaaagatttagtaaggaggagaaacttgaaaatcaactctgtgttcttgtgtaacagttgaaaatgcaagcctgaagctcagagtagaggtcaatgttaaggatgtaggtttggtagtccaaatagaaataatagctgtaaccttggaagttgattttaacaagagactattgtgtgagaataaagtagatgtgcaatagaactttaaggaaagcctagggtaattgagagccaggataccatattaaagttggggattaagtgagaatctacaacctgaggagtgaaactttcaggccctgttgcccagaatgctggcagctggggaatggtattatagcaggtcaaaggaacttttcatggagcgagagtgaacttagcatgtttatagactgaagaataggactagtgaaaaagggacacttgaagaagatagtttcagggacaagaaagatggatagttattgctacaatgattcagacaaggaaaggaagtgaatcagtggatctgtgattttcaggaaaggaggatacatcttctgagttaggacagaaagagggaaggaagccaaagaatttagaatgaagacaaaccccatgagattagtcagtggagcaattatttgaatagagggagggttgaagctgaggagggactagagaacagagtaggagtcaaatcctatcctctcaaaagagatttcctaaaattttccagtcctgtgtgatcactgtgccctctaaacttctcatttactgtttgtaccttacatttggtgattaatctcacacagccttgtaaaacaccagtttcattgtggttttgaatttctgtttatatctttcataattaacttttcaagtgattaccatccatcatgaccgcaaactccttggggcagcaactacctcctaagctttgttttactcactttacacgttatttcagctttaaaatgtattttagtaaattttgtttgattataataatatcatgtgtagttataatatcctttttaaagctaaagacagaaccctactttatcatctcatctttcatgatactttatcttagctgtgtaaatcatggcacaatcccatcttaacatctgttcttcctttctacacttctctcccattttctttgccacttgttattttttttgtaaataaaacaatctttaaatcaacttttagaagaaccatttcacctattttttcccaaataactaggcatttgtaccttaaatatgtgattttattatagtgtgaatttattattatattcatacttccttgaggcaggtctagttggttatgttaatagattgttagattttttaaaacctttgtttaaacagccttgctgaaaggatatactctgagttgcttctttgaaaaacattaaaagcatctaatatgacttggtagttgaccagcacactggttgatgaaatttgtagtctttgctccaaagctctctaacaagattaggtgagattgaacttgagaaggtaaaggtctctaaattgacataaattcaaagggcagaactagatcataccactatttgaatcgctatcaaagtctaatttctgacatattatatttggtccattgcaatttgtgtacatacacatccttctagtaaatgatgaatgaggtttagctaacataatgtagtttatacacttctagacatttgtaggaaatatatgattggggagctctcttctttgtaaaatgacctgggtcgcttttctggaacacagtctctctgttttatactagacacaaacacaaacactcaggcatttatttccctgctgtctttcacttgatacctcgtgtatatactcaagctatcattagatagatgacgagcaaatacggaatttcactggatgctttcatgtggctaaaaccattcatttttaagggaattagaccatttctaatgggaatttttggtccagttttgagactagaaaatgattagttaagcttcatcaacatatttgaactttcagtgtttaaaccttctgaagtttattcataacttgaggggctatgcattttgaattatgaggaattttggaaaactcctctgtctcatttcttttcttcttttctgctgctcatccccaaagctttcatttcttttctagctgaaagtaaggtaataatagtatgatataaacttgtgattctgatgctaagcgggctcaatagcatcagtgataatgactgttgtagggtaatgccaacttgcttactgtgttggaattttcctccttaagactttggaggttctcttacctggcctgtcgtacacccagcaagcaccttcacactgaccacttttttgatcacacattgttcctcttcttaacgagctcttctgagaggtgtatacacatgtttaaaatggcaactttctgggcaccactacccagcttttttaatgaagttcttgggacacaatgtttttttctctcaagtcaattagactaaatatgactgaacagaaaacaaaatgtatttttcaaaattatcatcaaatagtgctgctactaattttggttgcattttagagtgaaatcatctcatttcctagtgagaactttttaactattactattaatcagtaattgaaaatttcccctcatttttggtgaaggctaagaattattaactgtataatacaggacaaagagaacagtaatgtgaacaaagatatcgctgaataaaaataaatttgatattctaagtgttcttccttgttattatttttgtattttttccaattgtgtggtggttttcagttgaagtcctgcttcagacctttggcaaatagcatcttttatcattatctacagatactttttgtctcagttgtacacaaaaagcttaatgactatgctccattggctaatacacaaaagggaaatcaggtagaagagtttgaagatgaaatctctggaaagcctgcattttaagcagactttctctcataacagtcttgtgcaatgccttgaaatagaagctcttgttttgtgtaattttccaaggcaatcaatagttctttcttctcataagtggtaaaatttgatattaggaagtacagatatacttctcatcataaaagggagtgtgttggggatgttgcactaatgatacaatcagcaacagcagtatcaaataatgtttattaagctttatttggcaggcattgtggactgcctaaccaatagccattttcctcctttgtcctaacagcatcgcctgttttgtccacatactactttctttcatggtgtgtggtccaggcgaagtggaccctattccccagcccagccagtgaatcacagttagtccatgaggcaaccataagggctccctttgcacagctaattgatgcacttctggccagtgagatatgaagagagtctatggggctttgggaaaggttttctttctcaaaaagagataaacaaggctgggtgcggtggctcacacctgttatcccagcactttgggaggccaaggcgggcagatcatgaggtcaagagatcgagaccatcctggccaacatggtgaaaccccgtctctactaaaaatacaaaaattagctgggcgtggtggtgcacacctgtagtcctagctacttgggaggctgaggcaggagaatcacttaaatccaggcagcagaggttgcagtgagccgagatggtgccgctgcacttcagcctggcaacagagcaagactctgtctcaaaaaaaaaaaaaaaaaaaaaaaagataaacaagaagaaaaggttccctttcaagctctggatgctttcacaagggtaacaagctgaggtgctatagccattttgtcactataaatggagctaggtcaaggataatgcttaatatgccaaggatggcagaggggaaaaatgggttctttatatcattgaacagctgaatgaaccaactcttgaggtgtttgaccttcagcacttcttataagttccttcttttttttttttaaccttcctctagttggagctgaaattttctgttattagggacaaaaacaaattctctcttaatgaaatattgtaatctgttgagtattatgtaatttgaatatttctctacctattgaatctcacaatacttccttttacatgtttcccccaatgctaaaccattacttttttttttttttttttttttgagacagagtcttgctctgtcacccaggctggagtgcagtggcacgatatctgctcactgcaagctccgcctctcaggttcacgccattctcctgcctcagcctcccaaatagctgggactacaggcgcccgccaccacacccagctaattttttgtatttttagagagacggggtttcaccatattagccaggatggtctcgatctcctgacctcatgatccgcccacctcggcctcccaaagtgctgggattacaggcgtgagccaccgcgcccagcctaaaccattactttttaacctcttctcaacttaatgctacatggtgactttgttcacactaacgctattaaaattattctcatcaatgttccctcatgacttcttggttaccaaataagtccctgagcctcagattcctttctataaatcattgattggtggcttttaattaagaattattagccaattattaaaaagacaaaaaataacagatgttagcaagattgcagataaaaaggaatacttatacagtgttggtgggagtgtaaattagcttgatcattgtggaaagcggtgtagggatttctcaaagagataaaaatggaactaccattcaacccagcaatcgcattactgggtatatatccaaaggaatattaatcgttctatcataaagacacatgcatgtgtatgttcactgcagcactattcacaatggcaaagacatggaatcagtctaaacgcccatcaattgtagactggataaagaaaatgtggcacataaacaccatggaatactatgcagccatataaaagaaagagatcatgtcctttgcaggaacatagacggatctggaggccattatccttagcaaactaacacaggaacagaaaactaaatatgttctcacttataagtgggagctaaatgatgagagcacatggacacatagaggggagcaaaagacattggagccttttggagggtggagggtgggaggagggaaagcattaggaaaaataactaatgggtacaaggtttagcatctggatgacaaaataatctgtacaacaaaccccaataacaggtttacctgtataacaaacctgcacatgtacccctgaacttaaataaaactaaaaaaaaattagcctcttttttcaaactaaatcttacttataagcccaacatatatgtatatatttataaacagagtggcatttttcagttgactcagtggaatttttgagttttataaactcagtggaatttttcagttgattcagttggaatttttcagttaactgaaaacctgggggctttgccctttgctcactgtcccctgcgacttttgtagccctccctatctctgacctctgcaaagctcacaggtaccatgggacatagtactaaaactagcctctgaatttaaccttactgtcggtgcctctcctgcctcttctccatttgcactttatgtgcctctcctatccagaatccttcagtggctttccattgcctatctataaagttcctttctagccttgttcctttgatgctcccttttcttcctttgccatagccacatgagggtacctctagtctccaaaacgtcccagtttatcttttgttgctatgctcttcttgttcagctccctatctttgctcatctccacctgtttaatcctccccattatcagggtttatctcggtggtctgtctgccacccagtagccatctataccaaaatgactctcaattttatcaattcccacagcatttgtacctcatttatagcacttatcacattctgtctttgaattttgtattaaagatattcctcaagctgcattcttcttaaggtggggaaccatttcctgttcattgttctgcacactgcaatgctcagcgtaatatatccctcaaagactattcttgaacaaaatgcttgttgagtgacaaacaatttataacacaaatcaaaacccttaaattacgtgtgtcctttaggttgttttgttttgttttgagacagggtcttgctctgtcacacaggctgtagtgcagtggcacagtttcaactcactgcaacctttgcctcccaggtttgagtgattcttgtgccttggcctcccaagtagctgggactacaggtgtgtgccaccacgcccagctaatttttgtgtatttttagtagagacagggtttcgccatgttggcaggctggcctcaaactcctggcctcaagtgatctgcctgcctcagcctcccaaaatgccaggattacaggcatgagccaccacacccagcccttcaggtcattttttttttagttctttaagcgtttgttccttttttgtgagttgattcatactctttgagattacctaggactaaattgatttaattaaatttcattatatgatagaagctagaacaattaaataaaacacagggaaagctactttttaatgcaaaatattttatatctttgcatttcacagcctaaaaaagaaagaaaaacaaagcaatctactatgtctgtacttggaaattttatttttacttttttctaccattaaaaaaatttttcagtagctttagggataccagcggtttttgtttacacggatgaattgtatagtggtgaaacctgagattttagtgtacccttcaccagagtagtatacattgtacccaatatgtagttcttttatccttctccttcgtcctaccctccctgcttctgagtcgccaatgtctattgtgctactctgtatgcctttgcatacccatagcttagcccccacttacaagtgaggacagaggtatttggttttccattcctgagttacttcacttggaataataaccctcacgtccatccaagttggtacaaaagacattattttgttcttttttatgactgagtagtattccgtggtgtatgtatgtcacattttctttatctactcattggttgatgggtacttaggttggttccatatctttgcaactgtgaattgtgctgtgataaacatattcatgcagctgtctttttgatataatgactttgtttcatttgagtagatacccagtagtgggattgctggatcgaatgatagatctacttttagttctctgagaaatctccatgctgttttccacagggattgtactaaattacattcccaccagcagtgtataagtgttcccttttcatcacatccacgccaacatttattgttttttgaccttttaataatggccattctggctggggtaaggtgattttaatttgcatttccctgatgatcagtgattttaagcattttttcgtgtttcttggccatttgtacatcttcttttgagaaataccaattcatattatttacctactttttaatgggattatttgttttttttttcttggttatttgtgtttctcgtaaatcctgacattagtcctttgtcagatgcatagtttgcaagcattttctcccattctgtgggttgtctgtttactctgatgattatttcttttgctctacaggagctctttagtttaattaggttccatttatttatttttattttggttgcgtttgctttcggggtcttagtcatacattctttgcctaagccaacatccaggagagtttttcttagtttttcttctagaatttttatggcttcaggtcttaaatttaagtctttcatccatcttcagttgagttttgtatatagtgagagttaaggatccagtttcattcttctactttggctatccagttttcccagcaccaatagtgtgttctttctccaatttatgtttttgaatgctttgttgaagatcagttggttgtaagtatttgcctttatttctggattctctattctgttccattggtctatgtatatacttttataccagtaccatgctattttgtttactatagccttgtagtataatttgaagtcacataatgtgatgtctccagatttgttctttttgcttaggattgttttggctatctgggctcttctttggttccctttgaattttaggattttttcttctaattctgtgaaaaatgatgttgatatttaataggaattgcattgaatctgtagattgctttgagcaatatggtcattttcacaatattgattcttccaatgtatgagcatggaatgtattttcatttgtttgtgtcatctatgatttctttcagcagtgttttgtagttctccttgtagagatttttcacctccttggttaagtatattcctggatattttgttttattttatttcatttgcagctattataaaagggattgagttcttgatttgattctcagcttggccattgttggtgtatagtggtgctactcatttggatgcattgattttgtaacctgagactttactgaattcatttatcaaatctaagagtcgtttggaggattctttatgatcaaaacgttggcaaactgagatagtttaactcatattttccaatttggatgccctttatttctttctcttaccttatttctctgggtaggacttctagtactatgttgaatagaagtggtgaaagtgggcatttttgtcttgctccagttcccagggggaatgttttcaacttttccccattcggtatgacattggctatggctttgttatatatggcttttgttattctgcgacatgttccttctatgcctagtttgttgagggtttttatcataaagggatgctggatttcattgaatgttttttctgcatctactgagatgatcatgtggtttttgtttttaattctgtttatatgatgaatcacatttatcgacttgtgtatgttgaatcatcctgtgtcctcaggatgaaacccacttgatcatgatgagttatctttttgatgtgctgttgggttcagtttgctagaattttgttgaggatttttgcatctatgtacatcagagatattggtctgtagttttctttttttgttaagtccttttctggctttggtattagggtaatactggcttcatagaatgagttagagaggattccttctttctcaatcttttagaatagtttcataggattgtgaccagttctttgaatatctggtagaatttggctgtgaatccatttgacccagggctttttttcactggcagttttttttttaattattgattcattctcactgcttgttattggtctgttcaggatttctatttattcttgattcaagctaggagggtcataagttccctggaatttatccatttcctctagattttttagttgtgtgcatagagttattcatagtagtctggaatgatcatttgtatttctgcagtattggtcataatgtctccattttcgtttctaattgagcttattcttcttttgacttttgagcttatggcttcttttcttggttaatctagctaatggtctgtcaattttatttttcttttcaaagaactaacttttcatttcattggtgttttgtgttttttcttgttttaattttatttagctctcatctggtcttttttatttcttttcttctgctaggtttgagtttggtttgttcttatttctctactttcttgaggtgtggcaataaactgtcaatttgtgatcttttagactttttgatgtaggcatttagtgctatgagctttcctcttaccattgcttttgctgtatcccagaggtttttataatttgtgttactgttatcattcatttcaaataatttaaatttccatcttggttttattgttaacccaaaaatcattcaagagaagattatttaacttccatgtgtttgtataattttaaggggttttttggattgatttctagtttttttctgctgtagtctgataagttacagaagatagtattttgattttttaaaaattgaggcttgttttgtggcctatcatatggtctatcttggagaatgttccatgtgctgacgagaataatgtatattatacagttcttaggtagaatgttctgtaaatatctgttaggtctatttgttctggtgcagtttaagtctagtgtctttctgttgactttctcccttaatgatttgtctagtgctatcagtagagttgaagtcacccactattattatgttgctgcatacttggacattttaagcagggttatttatgagtttgttagctcactgatatcctaggcataccagttatgaattaatgataagtgtgacagatgtactaatactctaatttttaaacacttaattttcatttaagtattataattgttattgagctcccagaggggacagtcaaatatgtaggtagtctcaataaggcatatatccttttaaatttattttcctgtttcctataacttttgtaagattatcattccttaatagaatgtacctgaaaatttcattaattttaataaaaattccaaaagttggtgaaagaaggaatgtaccactgtactactatctagttagttcctactatttcgttttagctacttactgcttcataattttaatgtatgtcaccaatatttttaaataattctgatgacaaggaaagggaatgttgatttgatgagctttcaaataaactataataatatatcacatgatatagtagtgataatataatgattgaaatgctttgaaagaaaactttaatgtttttttcaagaccaatattatctgttattttcactggggaggatttgactagactagatataataatagagacaaatagacataattacagacctagataattgagagcttcaaataagcccatataaccataagccataagaaaaatataaggtgctgaccctagggaccaggaagttaaagaatcccttctctgcatctgtttcatcatctgcaaatgaatgataatcctctctccctccctcaaagggttattgaattgattagatgaaatatatgaaattatcggagttggttgctaagaagacaaataatgttctatacaacatttctaaactcatatagttgctgtcagggtgggagtctgacttcttgttctcatgcaaaggcaggtggggagctgtggccacgagctgggctacagtgaggagctttgagtgggacatagaacaggaggatcatagcacccaaggtgaaggtgggcatgagaactaatggttcagtctaaagtaaagactgagtttacaacaggaagcagagagaatgaatctgaaaagaaaaacaggaagtagaacctggagagaaccactttgaggcaccaataatcagagccagatgcctcacgataggaccatgggtgctaccagtggtggtggtagtggtagggtgtgtgaaaaatcagtccccgcacaggccatgccttccacacactatcctatgattcctgggctttctcttcagtgctaaaatactggtcctatagatgccacaggttcagtttgtgacttcctacttttaagctccagcattaaaccctaaggtgatgagatcttgaggcttaaaagatacaggatctgaaatcttgaaatatgttttcaatatttgttgttgttgttagtgggaaatcattattatgatacttcgtcaagagcctttgatgctaagacctaattaacatgtatttagagatctagaataaattgcttccctgattgtgtgcttatgatttactcttgttagttctagtatccataggttaatatttgaaacatgacaattggctggtgacttaacaatgacttacctgcttatcccttttcacttcccacatccccctacttcttacccattaattctgtaggactcactttaaatcaggaaaggaaaatgagtcacctaaaatgaatatagtcagagaaagtctctggaccttatggcattgcccataaaagcctcactaaattctcttctgcaaaatatttgacacttgctgcttaaaaaccagtgatgcctctgtggggtcaagcctggagacagagaaccgtggcataatttgcagttagagaagactcagaagagagtgagagaaggaaatttttctaggtagctttacctgtttcagcatatatggccaggtctttaaacttccagttcataaagccgtattccttgtcctaataattttcatatctttgtctcctaacaagcactgagcagtaagtgggctccactgtctgtctgcatctgactgccccgactgtgttagtcatcatctgctcatggaagcatggaaaccctgggggaataagtgtttggcagagtcagcaaatgggttggtttgtgcaaagttttgggagaagagagtagagtggcaaagtgaattaacagtgataacatgagtaaaagtggtgctgaaaatgcagcgggatggcctcctatctaactattatgatttggaataaaaaaagagatcttggtaagtaaaaacttatttttagtattagaagatattcacatagtgcataatgaaaagcaagtctttggatttttgagtcaaggacctacacaattgctgagagtattagaagatacttgttgtattaggtggtcgtaaatgacaacaaagcacaggactaataggacagaggaaaatgtgctgttcaagaaaaatagtcttcttttcttaaaacatatgacatttctgcatcctgcatttgccatgatataatgacccattaacagaaaagaaatgaaaaataaggagtcagcatggttgatggttgttacctaagcccataataacattttaaattgcttaaagttgcagtctcctaaagagaaaatatagttgttgagtggcccttttggctacctggcaagatgtataattcaaaagattcaagatttaattcttctggaatcttatttcagatttcctatgtaaaagagtcagagcattttatatattacagaggagtatgagacaattaaggccagaaaaatataggcagagaaatataagaaaacatacttctttccctgtttcacaatactttggtagagtgctaagtaagacaaacaaccctataattaggaagaaaattatgagaagttatttttattctcaaaaatcacattaatggctttgtctgcagctcagttattaccaattgctattaacttgttggcacaaacaagcttaaaatttattttatattctgtagtcctaataatttttttgaaaaagtgtgacattcaaatcgtgtaattaaaacaagtagaataataaacatatatttatgaagggtttgtgtgtgtatttgttttaagttgaacagataattcctagtgattttgtgagtcatacagtgaataattaaaataaatttaaattcaaatattaacatttcaatttccagtttggtgaacataagcaaattattataagtttgttttcaattcctgcaaagcatattaaaattaacttttcctcaatttaagtaatgtgtataagtaaacttccttcccactgtgaaaaggtttcatttattgctatttgtaaactgcctaggatagattcagagtggattgggctggaaactccttgaacagtttcttttgaaataacactacatacgttaagctcaattacacatccaaacagccacagctcacttttggtaatttattcattgatttaacatagtacccagaagagccatgcctgctgtcatttttgtaatatattatgttttaaatatactcatgctcacccctgcacaccattaaggtgtgcataaacctgtgtttttctctcttgacagctataaatgtttgttattattacacaaaacatatgttcatgttgtttttgtctaaattattctatctggggctataaagttttaatgttattagttgcccttagaattttaatgtttcactgctgtaaccttcttaggatttctgtgcaattaaatagaaactatttcactgcagcctggaagaacaatatattttatacaaataaaaaaaaaacccttcttactccattttctttcagtgtagtaaaaatatttgcctgacagtttttctttttggtctgtggaaacctcacctgtggtcatacctgtgcaccagctgtgtgtagaacatttctctttctgctcctggcgtttgttggaaagatatgagttaagcaccctttaaaccaaaggggcaatatttcaccagcctttcagaggtcattccaggtgctatttaggtgactgtatttcagcctggctttagtttaacatatacagaggccaaaagggactaaataagaagcccattatagtggcaaaatatgtgtctaacttgggttcttaccagcatggttcaaaggtggttttatttacaaatacgtggaagcactaacatttggtggagccacagagatgttttcccttatgtcttctctcattttcatacccactggttggttatacttggtccaggcctcatcgtcaagtcagataggactgcagacttacttagaaacctagtttctcacatatagaatcattgcatcgcaaataatttttattttacagaagagcttctaagtgtattctgacttgtttactataatcttaatgttggcattgtctaccccaaccccagtggtctttcatatgtacagtgctagggccgagttatgtcactggcttttaattggctctcagcttcaattttcctttttttaaaatatactaatcactctaccttcattgtcatcttcctaaaatacatgttggatcactcaaactccagctcagaagccttgccaatgaataaactcaaaatccttaaaaagatgttgacaattttccttgatccagcacgaaatcgcttctccaggctcattggcccttagttctattgcatttcctatacctcagtccactggacctgctcacagcttctccaacactactcagccgcaggtccaagtcagcacgtgtgatgtttcctcagggtgggtgctcttctctactttctgttcatccaacctctatttcttcaaaattcagttcaaatactgcttcacccattaagctcttcctaattctccctcagtcaaaattaatcgcatttgatgcatcccctcagcacattgcttcggtgtggtttctcacatatgtcatcctatgatgttcactagattataagctccttgaaggcaggaactatacctttcatcttcattttcttaccagtgcctcacacaacatgtaataggtgctgctttattggcaaatggatgaacaatatttctttctactttgttaatcttgaaattgggaatcactgaattgttagactgtcaacttaatttccctacatttgtggctttatgaacatggttatagatataaacatacctgacacacttatagaagaagagattatatatttcctcagagcaacacattatgctagtggaaaaatctttgttaataagttattttgcttacatctgaatgtaccatcaaatgctcagttcattcatcttgtatctgtccttagaggaatcaaagattattttgcctttattctttgaataatctcttactaaagtaaataatcagcgtgaaaatcagaaaaacgaaataaatgaactttgaattggggtatctcatatatcaggattgcttcacttcaatttgtagcccagtttgacttgtaagaaaattagtggaaattaatcaatatatggtattattttgtttttccaagattgtgggtttgagttgccacaaattagaattatttgctaccaactcagcccactcttcattaagatataaaatttcacagcatcatgaggagtttgttctttttccttaaacagtacccctaaaaaatatatattatggaatgagaatttctcagtcttctcaggagccttccaagacattgtttagcaaaacaatgggttagtgtctcttctcttttttctagcacaaccctcagttcatggcagtttccaggaaaggaaaacaggaaattaagttcttaaaggattcctggaagtctctcttgttaaaatcacctgtttggacttttctttgtgtctcccacacttctaagtttaacaccacatgcaaagcccagttagaaagagatctagaaagccacatttaacttcctttttaagctttcatttttttttcttttttagagtggtctcaaatggtggggattaaggtctttaacaggcagcagtcactgtccacaaatagtagacctctctaattcacaccattttaattacatctaaaatttctgccaattatatggcgaaggattatatggcagggcaaaggacgcggggtggatgtggagcctgagcagctttctcttttagaaacagaagaacctgtaatggaaaaatgcaacagttgttgaagaatggagataacagaagtggtaagtcaaagtacttgattacacaataatcttccacagagtgctcattactgctaaataattgactgtgttgccaggtttctcagtgaggaaagggtcaaggaggtcagttatctggtggtaatgaccgtagcagtcattagagggtattaaagctattaagaatagaagtttaactttttattgaagtttttatttaaatgatattaacttcaattcaacttttaattgaggtgcaaccatccaaattctacagtcgggcaccaagaagtaatgaacataaaattacatgttcttttgataggttgatgggtctttattagaatttcaagggcctccacagagctgttattagacacaagctgctctgaagtcttctattagaattagggctgggtgaaagatttctaggaaataattttaacctggaccactgaaaggtttagggaaaaaaagaaaggaaggaagttctgtcttttgtttttgcctttatttttattttttttaaggtgaaaaggcctgtttatatggctagatttgcatgcatttgccaggcctttaaacataatatatatctcctttcctccctttttctcttccttccttttttcctttctctgcaactcaatggaaatagaaaaaaagtccaaaacaccagatttttttttctctaaattttaaggaatgttatctttcctaaaaattaaacacatctgtgtgttgctgtttctattaaggtagcagtatctgtgaaaagtcagaataaaatgaacactttgttaaaatatttaagttaagccaaataaaaatgaaagttaatgccagaactttaccattcgtgatttataaataagctgttttctaaataaaaataaccacccacctgcagtcagatctcttagagaaatgggagggatgtgccgtttgaggagggaatcttctattactactcctccaggaacaaaagaaagataatttcgaggttcataattttacctctgtgagccaacaaggaaggagctggggtagtgaacaatttcataaacaaaatcgtccatacctaaaaccctttgtttctttgtaatcataaactttatgaagattcgctgttaagttggttggctgccatttacagcaaagatatttgctagaagaattgataatggccttttttcctttggaaaagaacttaagctattttacatttttggtagatagccagcattttgtcatttaaacgtgtcacattactatgaaaacatcatgcatcataacacagcataacaatgtgttttgctgaagtgcgagtttctcaaaaaaaaaaaaaaaaaaggaaagaaaaagaaagaaggcagtcatgtttttttttttttttccacaatgtgaaagccatttgagtatattttcccccaagagcctgtagaactgggcgcttgaactagccacacatctgtggatgctcagctgtaagtgggtctctcttataaatgtgaggggccaaccctaagctttgttgctagtaagagaatgtacaagtaagattatgagaagttcaagtgaagctaattgcatataagcatttttttttttttttggtcaggaagccagaagaactagaacctggatttttaaatataactcaatacttcagtgtgacttgaaattatgtcttttataagaatgagaatactctggccgggcacagtggctcatgcctgtaatctgaacactttgagaggctgaggcaggaggatctcttgaggccaggaccggcctgggcaacaagcaagaccctgtctctacagaaaattaaatttttttaaaaaagaatgataatactctgccataattgattgacttactaaagcgttagtttggaatgacctcattatgagaggaaaagaaaactgcctcccaatagctgggtttaaatgaccatttctgtgtgggatctggaaatgtattctggtgtgtgaatttttcttctccagtgtacaggccaaagtaccagctctcaactgcctcttcttgttcccattaaataagttgtcacaatttaacacgtagacgttttaattgaagatctcatttcatcttaaacttgggctttgagaagatcttatttcataggcccacttcatttacttcaaaccatctttaaattggaattagaaataaagtcccagttagaatataagcagcttatttgattgttcaacattagagaatgcaagattttttttcaactataataacagtatgttggaaattaccacatgttgctattgtaaggaaaaaaaggcaatataatgcattacttgtagaatttgatgaaaaactttttaatgcaatggaattgggtatcagcattgattttattttccaagacattttgcaataatttttacagtagttcaggggaaaaaaggagatacttttggaccagagagaaaaaattcctatcaaggctgtcacctgctaggacttagaagcaagcaatgatcccaacagaagtgaaattataacctgatatgcgagcctctaatgttctttgaaaattgaggtaaagggtaggtaagcccttctacatggcatgtgtaaagtctatgtaacaatgtaaccctttcctgatacaaaggggttagttcttttaatgttttaaataatttatttttctttatgatattaatagtaatagatgctcattgaagaaaacctggaaagtacagaaaataatacaaaataaataaaatcacaactatcttaccaccaaatgacaaggttggctaacattctgatgtagtcagcagatattcttctggcttcttttgtagccattacagcattctgatgtagcattctgaagatccttctggtctttctttctactgctaatagttttgttgaatttttaaaaattcacagattacatggagagatttaaattagatcaagatattttatacttcatatttttattaagaaatatactttccatgtctcattttccacaaataacattttgttttgtttgagagatttgttctcatatttattttactaaaatttcatatggcatatgaaatacctcatctgttgtttaccatgttatttttaaaaaattattctttgagcgccccgtatataagattaagattagcaccctgtgtgtaagattaagattagcaccacttctgtgcttatgcaaacaaactcatgatgttataatgacaggttttatatttatcgattttccactttccagaatgccttcttggaaactttatgatttcctgattggatttcatgattgaatagtttataattttttaaggctgagattggttatattttaaataggttttacaaatatggcaagaaagttagtaaacactggatattacagttgtgtagttgtacaaaaccaggagaaatacatttattgatctcttgagagcagtaattaccgcatacagagattggattctatttatattcttccagtgcttcagatttctttgctgtgattgaacccagcactatagcattttaccagtaagatgtagctcatgatgctagttgagttactctgcagaaagtagccttagaataagctgttgaagttgccacgtaaatgagatgtttaaaatgattttaaaatttacaacaacattttgattgtcaatttaggtaaaggtcttaagaaagcaaatataatacactctggatgtggttaggctgtgagttgttaatgttctttcataagcatggtgacatgtagtagatcattataataccaaagaaggctttttggaccttgatgacattgtattagcattctacagagttttaggaaaaggcattttagaagatggacgtgagacaactttctcttcccaatgttaggattttcagcagtatattcattcttttccctcaaggcttataaacattttttggtgttttgtttgtctgtttgtttgttttttgtttttaatgagggaggttaggaagtgatgttgtaactgggatgtctgttttgctatgaaccatttactatacttttcctttcttgtccaggtaaacaataacaaatatttagtgagcatcttatgtgaaaaacatatgtcgaattatttttaattgcctttatataaaagtttaggagctcttgctgtatagggggatcttaactgctggaatgatcagtcaattcatttagcctttgtctaatcatttattctacgaatgtttattaagtatttaatgcctaccatacatcctaatatgttgtcttccctagactttcaagttttgtgtcatgggagaacttgggcttctcctataaaatattttgtaggattgcaagaaagaagagagaccattttctaattaaatgtcaggcaaaattaatctttaaagagaatgttctagtatcagcaaactttatgctcagaggaaatgataaatttgcagagatgtgcatctatatccaagaatccaaacaggagagcttgatggggaactgaaaaggggatcaaaaatctgggctttggaccatagaaacactgaccttttggaaaggacttgaaagctataaatgacgagcaggggcaagagactgggacaggaaaaaccaatcagagagcataaagctaagattcagactctagctttatatgttttaaaaaattccaaagaaaggcttggaaatgactttctaagaacatcatttttatttgatttaatcatttgcatatttgggggtaacttgtttgtaccaaaatgtggttagattagttgattcttaactatcactcatttgtatcacatatattttgtatgagactggaataatttatcggatcagcagccacaaagaatcagcaagtaaaatcattctaaatgtaatgctatctaggatagaaaaatcaagaaagtatggacacatgttaactgggtcttttctctgtttacttttttctaatttaatttcattttaattgtaatgaaacagtataaaggattcatatccacctcatcaattcatataaactgtctttgattcacatttcagtctttgacagatttttaagcacaaaatgataaaatcatacagcataaggcttttacatcagaaaatatggaaatagaacagtagttgttctctttaggacagagccctctatccaggcaaaacaagagatttcatccccttctacgaagtttactcattttggtctgttgctttaatttatagtgacagcatctgcaaaaagcacagggttactctggtagattgcattgttgttcccatgattcactccccttttctgtaagaggattatacacccctgtctattaccatgtgacttgcaggcctcctgtggaggaggatgcacccctgccccatcaacttttagcttggctggtatgagctttggacaatggtaagtgagcagatgctttaggagccattgcatgtctccgctagctctctggctcttttccttctgacacaagaatagcatatccaaataggagctgcatccaggaatgaagaatgaagacagatagagaaaacccgcaacccactcacagccatcctaagcaggcatgtaatgtaagtgagaagtaaacatttgctttcctatgcctctaacattggagggttgttactgcagcaaagcctaccaaatacaataaccaaaggcttgaccatgtgtttccccaacctcagcaaaccaggctgcacttcttcatgtctcccatctctaagtcttcctccaatatcgttcgtgtcacaaataaggaagcttacaaatcttccatggctccttattttaaatgtgaaacttgtctatttccaaggcaagcctatagtctaatttctgtgtcaaacttattttctgtttttactccacacagcctccatcactagttgagccagtttcctcattgtctcacaatctctacacatctgcttagagcagtagaatacagtggttaaaactagcttctggattcagcctgggactgaacccaggtcccagtgccaactagctgggtaaccttgaacaagttactcaacctatctaagcttcaatttccttaaaattggataattcaagaaggataataagagtacccaactcacagggctataatattaactgatgttaggcatataaaatgcttagtgtggtacctgtctcatagtaaatgctcaagaagtgataactggttgttgcttttatctggaatgcttttttgccttctgacttatctcaatcctaaccaaacttcaactttgagttcaaagtttatttctctatgaagtcttcccttacaatttttttgatagtgtcttttactttctcattgttgtttcctgtgaattaggctatccctggttctaatcttcttgaaggcaaacagtgagttaaacctactctgtatcctataggctgaggacatcatggctatccagtctaattaatcgataatatttaccctgttgaggttattcattttgagagccagttatttttttggaggggtggtgatagggagtaggggtgcagtcagtgcagaaatggccatagttttaatagaatattacttttaagcagctctgaaaattgttgacatctgtcacgtcatccaagtcttttcctaaatagacctaaaatttgaaagaatcctgtagttataacaagaggtttggtgttaagataaaaacatattaagtgaggcttgtactgggattagttttcttttctttttttttaatttttaatttttttatttcaataagtttttggggaacgggtggtgattagttacatgagtaagttctttagcggcgctttctgagattttggtgtacccatcatggggttagttttcagtgtaaactcaagagtgaccctcagtattgctgagtttaatcaggggaattttgaaagagaagatcattcctagctaaataaagtgtatgttctgccaaggtcaagttgtattatttgagacccactgctgagtactttattaattattttcagattggaaaataaaattacagcttttccaggaaactctgggaatcaatttattttagtaggggaataggagcaaggaaaagcagcttgccaattctatgcaactgtgaagaacagggaattacgaaaagcttgctgtatgagtcatagttagagtaaaaatccttgcttcagggattaacatctacataagttatggacaaaataagtaactggggctccatatggatattttattgtccattctaatttgtatcaatcactaaaaagaaaggatcacatgatacaagcatatcactgatccatctgtaattatgaaatcgaaagtaattttagaaagtactaccctcaacagagaactcatttatttatttagctgtggctaggaagctgtcctagagctgggagctactgttgtagctagattagattaatgaattaccacaaaatctgactgaaataacactggtaaaaatagacagtggatatgttcaaggtaattgataattatagtgggagaaaagaatgttgaacatttttatgagaaaattatgtgttcaatggacatattttaataaacacataaagaatgttgaaaatgagtgattaattgtaacttattttttaaaagtatgaatctatgtgtgaaggttgtaggaatatataggttaaaccaaataatggtagaagagaagattacttcaaagaataggatattataaagccatgtttattagcttttgtcagagcagtgcagcaccattcaatttattcgttgctttatgttagatagttctcaagagactgaaatccactattaagcttactgatttacatgcaaatagtggtctcttctcccagttgtatatagactagtatttgtaaggactttgtattttgcccagaaatgttttgcacttatttttaaaattagttaaaataaacgtgctccctattatacattttaaaccaaaaatctatacctttaaaaataacagattttgaaatgcagcaaatggtacatgtgcagaaacatctatacatatacaacataattgctggcaatcaaattgcttgcccatcagaacaagcaaatgatgtctgttttactccagattcatgggtgctgtcttcattaggaatgttaacttatcaaaacataatttgttgtaccggaaaattactttttaaatttccttaggtgtatgatagattttgaaaaacattattttgatgtgtgagtttaaatcaaggcagctaaattagatgagattgagaagtaaatattcgagttcttctatatagataggtgctgagagtggcattcgtggttcaaagttgggaaagttcctgctagccctacaggtactcatagctgagtgtgagagagtgacatatagctctgtgctgtgagtgcagtgtggtaagtcataatggtagagaaggatgtctacactgggaatcacatagctttctgaaagggtgtgctggaatcaaattttaaagaatgaataaaaattagtcaggtgaaaatgccttcagaaagtgttcagcatgacactagcaggaaaacaataagtaattccactgggctgtaggagtaggagtaagtggcataagatgaggccaggaggcaagagaggagcagactgtgaacggacttgtgtgacaccactgatagttaagaggcacttgtgaaggtacttaagcagggggtggcatgatcagctgtgcaatttagaggggtctctaacagcagtgcagaggatggttgggggacacaaaatggagtcagggaaggcagtgagaaggtggagcctcaaagcagtaacgctgacaatatagagaagacaggatggatccaagagatgttagggaggtaaaaagtccttggcctagcctatcatctctatttataatttccgtatctgtaaaatgggaatactattcctactgtgtactccataggttgtgttgaaaggattaaatgtaaagcaccacttaacatagggcctagtacgtagaatacatttcataaatattagcttatgatatgtcataatacatcagcagaatggggtaactgatgggaagaaagcaagaatgtagtcagcgcaggctgttgaagaagtaatgagtgaatagcattatattctgagataggtaattttagaggaaggattgattctgaaggccagaagccagattgtagcaggttcaggaataaaatttagagtgaagaattatagaaaagatagatgactctaacaagatatttaactgtgaagggaaggaggaaaataatatcatagccaaagggagatgtttgataagtttttttgttattttatttttgtttttgttttggggtatttgtaacatataagactatgtgcaatcaagtcaagagtccagaagtagtgacaaggggttgattggtataatgaaccatgagatctaagttgaaaaaacaggaatgcagaagagagctgatataaaggcagggattagagttacttaggacctgtctggaaagaataagtgcattaacaatgagattagggtggagagtgggagttgggagaatcagtttgtagttacagtgtgggacatgggagtttacattctagatatggcaaaaatatgataatgggagttggttgcagaatggtgtaggtcatcggaactgaggaagccaagaaactgggatgtgggaagaatcaatatcacttacactggaattgtcggaagcagaatgggagtgggtggaggagggagaaacaaagatcccagggcaagtgccataatcttcaaccaatgaatccagtagtgagtcacacagagacactcagtatgagtttcaaaggacatatttttaaattagggtaaagaaacagtggcttggaaaaggctataagaacacaaagactgactgtcttgtgcatattatgatgagtggagagaggaagaccgagcagcctctacatctaaggaaagggctagtggggatgtcaagggggaatatgagctgggagcactacttgggtgagagtaagtgaaaagacataagaaggtctctctctttgagtactgatgaagaccggcaaggatgagaggcatagtagagttaactggtcccaaacttccattctgataagggcagaggcactggagaatgtcagcagcctgtggcctaacggacaatatattcaactctattttgtatgccagtgttttgtttctttttctcttctgcttccagtgtttttcctatttcaccgtgtattagcatttcagccagatatttgagggagagaaatagtgagaagaaatgagcatacaatcaggagatgattgcatattgtcatgaaaccttaaaaaattgtttttgttaaataactgctgcaaaagttgatattatctaatggcctgatccaaacaaaatggtattataagtaggaagaccgcttttctttctttttttctttctctttccctctctttttctcctcctttccatataagacacatatattgagttttaactaccaaagcactgttcttggttgttggtagggtagagggtaaagggtggtatagaatgaacagaacctggttcctactcctaagattgttatagataagaaaacagacttgttaatattcataatatatataactataatatacaacataatataactataatgccagaaaaacatagactaaaatgagggaatgaatgatatcttatggaagtataggggaaaaacaaagaatatgaaatgctttatgaattagtgtgttttagtgggaattttggttctgagatagcaataacacttcctaaatttcaaaatctaggtgacttcatatatatataggatttactttggttttctttcaacagcatggataattgacatacaaacaatatatgatatttaaatgctattgctattgagtggttcacactaatgttatgacccattaacacttaggaataagccctgaagatgattaaaggagttatagatgattcagaagtatctgcgttgtttttgcatgaatgtacgtgaacttatggtttgtggctaatcattgatatgtgcttaaagaatagagatatttgttctcagagaatagaaggtttcaagtatatgtcagatttttagaggaaggatgctatagccatcttcatctatctcaagacaagagctaatgattaattgtctatttagcactattggggtgacagtaagtgaaatgtgtctatatagcacaacaatcccaataaaaagaatcattcatatgtgtatttattcattcagttgtcaagggttcattgagtatcttctatgtgctggaaatcacaccaagcttttgtggaaacaatagtgagcaaaaccagacaggatttgtcccctcatgaggcttgaggaagatagagtgtaatcacattttcacaaataaacaaaaaattgcacctgtgaaaaataccacaagggagaagtccaaagtgttagaagaactagtagttaatttgatccactcagggaggttaggcaagtgttcaccaaggaagcaaaatggaagatctaaacaatgattagacattaaacagggaaaggggctgcggactgaaaatgtcttcaggctgaaagagtattagtgattatgaaactggagaaagaccatggcactggaagagagtgcaagtaggactgggtgtggggtgagatttgggatggaaggagcagccagattgcttggggccttgtagttcttcactctgaaggcaaaatacacagcaagtaaactccatttttgttaatatattttaccttaatatagatacatctcaaggcaaatgccttcccagaaataaaatggaaaagacattattatggtagagtattttaacagaatacaaaaaataatattcttcattttttttattttcaataaaggcaagatagcacacctcttcttcactcataaaataaataagaggaaaaataagatctgtagctcctatcttgtttatcctaatcaggattagctttatcctaatcaacaatcttatattcaaccttaatgatatttcattagcttctcagaaccacctttcctgtctaggtctaattatatctaatgtaatgtatctcaactcactatattaaatcatttttaaaaagcattttaaaaacattttaaaatcactccagagctttgatttaggccctagagaggaatgagttctgttatttctttttggggtccatgatctgccaattttcttctcaacgtgtcttttattctcatattttaaggaaatgaaagtaaacaattttcttttgtaacaattgataaatgtctatgtaaataaaatgcaaatgtaaacacctgttgtaatcaattcttaaaataagccagttattcaacatgcctcacattgtaaatagagaccaacttgctcttgcctgtgctcacattagcccttacagataaccctcgattgactgagaatcttaggtacctccagtagtatattctgatatccttttatactccaaagagatcaaggttctaaatcttatgaatgctaagcttcaaagaatgtgattcagaaatgacacagaaatactactgagaatctgtgtaatagtagcataggactctgttacagaaatatgcaaacaaaaatgtacaaacaaagaaatatacaaacaaaagtctgaagatgtaaaatacataagtgaggaatcattagctgctgccatttccctttgatgaccttttggtgatgtgttttcataaactactgcaattggatgtaccacctagagaatcctcagatttctttcaaggcacatcatggataccatatttaatgagactgcaggagaaatagattactgctcttctactctctggaaggtcgttgtgaatttttttttcactgaaaatgttttgggactgataaaaacatgcccattctccatctatgatggtaatgagtaatcaggtgtgcatttgattaaatctggtatgcttagtgttcagagggtagaactgaaagcaaaagaagaatgcaaattatataaatggaagaagtggaatatacaataatatacaatacaagaaaggaaatcagaaaactaggaccttttagccaaagaaaaagaaaattttgactgggtgtggtggctcacacctgtaatcccagcactttgagaggccgagatgggaggattgccagagctcaggagttcaagaccagcctgggcaaaatagtgaaaccctgctaaaaaaaaaaaaaaaaaagaaaagaaaagaaaagaaattttcttgctgttttttaagtaaagctgaaggacttatgttaactaagtctattggacttaagatttgggcttgtttctaagagcaatgaacagaaacaatggcttccagaggacaatccttgaagactggtgatggagactggttgaatttcatgtggtccctaaattttaccctgagagaaataacaagagctacaattggaacttaaggaaaggccagtttatttgaggaaactaaaaatggtgtaatttttaggtatttccttgataaaattgtgaagaatgggtacaaaaattccatctaaggaaaatgggggaggggaacacgtttttaggggattgcattttaatgtggaaagagaaaaaaatgaatattcttatgctagaagttgtttttgaaaatgttctcagtgactagagatttggaaatggcaactcggcaaatacatgaaggtatcttaaaggaaaaagactgttaacattatttttccaaaagtataacatcatttacttggaggaatagaaatgattaatatagtcttcttgttcagggaagctattccacaagataaaaggctagtaatctaataactagcatatcagtattattttatttgctttttcctgtttgcaaaataacttcagtgctatcttgttattgttgttatacttggctagttatacatctatgataagagaacataattaatgtgaaaaattataccaaaatggttgtgtttattttgtgtcactttagcaatgccccttcaggagtgctcttcctattttccacttgcattcaataataggcttgcagccagtggcattgtatttacacagtttttgtcaaaacaattttatcgctaatagattttgatctacgttggctgaaaacttctgtttctgtttaaaactttaatgtaatttcatgcgtctctatttcaggcaatataaaaacttttgaacttacatatacttggcagctgtatagttttttctttcactaagttgatttattttttacatagagggaaaatgtccttaaaattaggcatctcatttttaaatgggctcagaggagagcaacaaatttgagcatagtctgtttcgttcattcaccgcagaaaggagcatttaaaaaatactccacatgctgtgaccttcaggtgattagaattggttacaaatataaatgaattccccataaacattaaatgatccctcaagaaaccttatttgagaatatgtagagatatattttcatttcgatgcacaaggatttacatgtgtgattccctattaacattactcaggtaaatcccattaaaaaatggatatgcctttgtgtgtataaatttatacatgaagcacagttaaagtatatcagtattaatactgtaccatgggaataccatatgacaaggaaattggcaatacaattagagtttcacatagtattagaatgttttcattacaataaaaaaagttttcatgacagcataaaagaataaatcgagacttactaggacaactagagcaaatctgtacatttcaatataactcttatgaaacaaatgtaataagtaagattaatgctctgaatctcttaaaagggactctattaatcattgtgttgtcctaatggatgactgaaatcttctagccctgaaagtagaaagcaggaatcaatggtaaaacccatctaccaggatggatattatcttgagaaaggtattctgtttgccaccttctcttctttttgttttgcctctccttcttcattttcttcatacattcttttcttttctttttttttttagacggagtctcactctgtcacccaggctggagtgcagtggcatgatctcggctcactgcaacctctgcctcccgggttcaagtaattctcccgcctcagcctcctgagtagctgggattataggcacccaccaccatgcccagctaatttttgtatctttagtagagacggggtttcaccatgttggtcaggctggtcttgaactcctgaccttgtgatctgcccgcctcggcctcccaaagtgttgggattacaggcatgagccaccacacctggcccatacattctttatcacctgcttttctccttttcccttttccttttctccctcctgatttatgagcatgttttctttgttgttgtttttaaatatttgagctatttaacaagagttacaggttttccttatgccaactgtatgtcatcaggaagacataaagacagagacgtgtcctttatgaaaatggacatgtgaactgtactgaccttgatacttagtcttgattctctgctcagactaagccatctgagatagaaattaaaaatgcatagttcttcatcttctgttaggattcaatctgtaggcttaaataaactcataatgctgactgcagttatttgccttttccccctatttcttgtagatatattcacctgacacactgaaatattaatgagtcttgtgatgctcatgtgtgtacatttagagagcacataattttgacttatgaaagttactcagttgcagacccttgaggatgagacgtttgctggagtagaccatttctaacagatcatttgatgttaaatggtctgattttgtttggtgatcttctatttgccacagaatgatacaaaggcactgtaagtgcaatgtccacacagagcttagtccaaatggagttggagttattcttcaggaatttgaaggggtgttaggaataagaaattgctactccaaatgctgtcagataatatccagagaagtgacattttctgtgaaggtcattgctctctctctctaccaagtgtatctaggctagcatcagagaggaaagctgtcagtaatttctaacctagctaggttgtatctggcaatgctggagcaaagaattaacatggtgctggtttcttgagacatccatttgatctctgtaaatagtgcccaggggagtttgtttctaggatgttcctgagagttctgctgacctaggaagtaaaaaaggttttaagtactcaaaatcttttttcctagtttgctataaagttgcacaaagtctgtataacaaggccgtggatggctttatttctctattgcattttggggaccaacattttttttaatcccttagcctctgtttctctctgcctctgtttccttttctctattctctctcctcaccaaccatcacaaactgaaatgtctgcatttctctaaatatataatttatttttgtccttctcaattaatgtccctgattgcattcacaaagagctcaatagttctccatatgattacccaataaaattcccttcagtctttgtcaggatagacctctgcttttctaaaaagccagcatgatatttctggtctttgacagactaacgggtatatataccataatcaatggatcattcaaacactgaagttacaagccagtcctctctcatttatggatttatttctgtgaccagcctaaatcttctatcatctttgctataaaacatgcattagtacacagctaaaggtggtgctattatctaactaaagaaaaagaatgtttattttttatagggacctgatcttaaaaggttagattctatttaaattttgactctgtatataggaaaattaggttattaaataaaaacccaataattttttgtatatatagtattaggcaaagctatttcgtcctagaaggaatacacttaaaagagcaacgtagcaccgaggacattttcaacctcgaatattttatgtgaatcccattaagctatcagtaatgtttgttgcatttattttcccatcattgctgattgtcaatatatttgtgggtaaacagacaatctatttcataactgggctcctcttgtcatttatgtttctattttttaaatttatttattaattttttacagacggagtctcacttgttgccctagctggacttgaactcctgggctcacgtgatcctccttcctcagcctgctgagtagctgggactacaggcttgtgccaccacacccacctacattgtatatttcttgatggcactgcctagaatgagtgacaggggaacttactcctgtattgatgagctcacatgcctcaaaccagggctgtgttgaattcaagtaagtctggcaagaggagcaggtgggtgataaaggaggcagacactgtttatacacaattcttgggaacctggcaggaggatcagagcctggcagggaaaaggagtctttgagaaaaatatcacacaaggctgaatagcactttttaatggaaaattcttgttttgactctaattttatgcttagatgcttttaatttgatccacatttaatttgccattcctcggagaaagcattgattatatgaaaaactatctgctctattgctaatgaaacaagattggtttcaagggctaccatgatggcattatattttaatggtgcccacctggaaacatggaagcatgcaccactggaatcatcttatcatctgcaggccaactcttctggttgtgattgcttgatagatttgttaaagtcatagttttgaagaaaagtgagtcaatattgagtattgaaaaagtgggtaaaaagctaagtttggacattggagctataagacattataaaggaccatttaaaaaactaaaggtcagttgtgtatctgagaacacctataataatatataatacataataagatataatagatctataatagtacataacagatatatagattctcacaaacccaatcattttgacactgtgatgaaaaaataatggtattcaacactaatatgacaagtttcagagagacataaatagagattctgagtttaggctaagcaactgtgtagtaacaattattttcgttagaaatctgaagctgcacgcaagatctaccataagcgttatatcagaaaattcaaatcttttatgttttaaaaattaggctgccattattcctgaaattctaatggctgaactagcaacagtaaagatgtccagatttcaatgaaatatatttcataaattagcttatcattgcactgatttagcatgcctagcaggtgagagacaaaaacatgtgttatcttccctagggaaccttcaatgaatgtcattcgggcttcatatgtctttcttttctccccttcttgaactgatataaaattctaatgtgtgccctctagttccatcttcattgaaatctagcaaaactgctgaaggtaaggtagtggcaatggtgcatgaaaaaagggaaaaggagtacagtgattcatggcatacttgaggaaagttgcaattgttaacagctctacttttgtatatagacaagttaaaatatgtcatatatcactggtaaaaataaagttactaatcttgctagtttcttaaagttcataggaaaggcactacaactattttgatatcttgaaagtatttccatatgcatttgagggcataccatgtcactgtatcccaaaacaatagtcaagaaagtaaatttatggtagaaccattagtaatcttgacaagtgcatgctgtttaaataccaggaatagtaggtattatgaaaaaccgtgcttcatatattattataaaaatgaaatgtgacaatttccaagtatatattagctcaggccaacatcccttatctctgagtctttgttcttctgtgcaaatttgaacctctgatgcaattgtaatttcagaaatggtattcattggtcttcagatctgcagatgccagtgctttcagagctggaagattgttctccttaggcattgtttccatttggtagatgagaaaactgaggtacatgaccatttctgtttcctttaactggtaagaaaaataagagctgagaatccctctcactttcactttttgcagtcttctttttgccaatggatacatcctacccttttcccttatcttctaataggaagactgagcggaatttaagtggcatcttcagcttttaagtgcagctgtctagcaaaagctttggccaaagttttcttctgataatgaataagacaggataaaggggcatcaatgatttctaagtctttaaaaaaaatccacaatgttgaaatcagactgctaaaatctaggcaacagatattggcaccacatgagtgctaagttactattctttggagcaattgaaacacaggacttcatgcctgtgggacattaggccaacataattctagtctgcccaactctatgaaatatgccttgttattcagagcacaaacataatcagtagccctcctgaaattaatcaaacaattcaaagtatcatatgatcagcatgactgtacgggcttttctccatcacaagagtattccctaaaaaggtataccattaagcaatataaaaaatgcaaattgtgcaaaaggaagtgtaccaaaatagggctttatcaagagtctttagatcagtataattcccttaattgtcttttcatttaaagtaatgcaaaaggaggctgttagttcgcctcagtatcataagcatgagaattgtatgtgttcccatttctgtgacttcagcaatttccagctatgcattaagtcccacacttagctggaggagaatttagaaggaattgtttcaaaaacagacgttttagaaaaatgtttatttgagctggatttgcttaaaaattacaataaaaatatctcattcttgagtaatattctgtttctattggttgtctctcaggttgtggctttcttgtgaattatgatttgcctatatagaaattagtattttagcactatgttgttaataatagcggtgatcattttcagaattgcctttttggtgagcacataggagggtattcctcttggtaagcaccttaagcaagaaggattgggtcttcctttcttgtttattacacttctcactctgtcattatcagctctgatgtttagtgaaaatggtttccaattgcctagatgtgctttgacagaactgacagtagaaactgtatcttagcttacttgaatcagtgctgtagaaaagcacccaggcatgctgaagacagcttttatgaggtacattttgtcagtgtaaacattatgaaatccaacacatttggaaaagcatactctgtgtttgttaggatgaatgaatcactaatagattaaagagcacagccaaataaacttagactagtcataagcatatgtggcctaatattcaaatgtaggaaatccaattaagctctagctctccttagtttttcattcatgaggcggtacctctactgaaaaagcaaataactaaaaagtttcttttaccaaaaaaaagacattgcatttttaaaatataagtttgaagttagtcttccacagatagccaatttaattatgctaaaaatgacatttttaattaaacaccaaggtaagcataaatggatttcaaaataattaatcaaacatcaaaaaattgaaacctttttctgcttgagcagcagaaatgaaagaaccagtcttcgggtctcatagagattcaatctaatttaattctctgtcttctctaaataaacattcctaaaacctttttttcatctgggggaataaggatgagaggggtaatcaatatttctagcattttaattaaaaccgttagtggaataaatccatttaattatcagttaatgaaatacaaggtcatttacctgacaggaactttgagggtggattactagctggaataaagcagaagaacccaatgtcacagccatttaacttctgtcaaatttaaggttaaaatccttttagactgtttaacctattctctaccattttcctattatgtatgccgattggcaggagaaatgcatgttaaaacttattttacatttaattatgctacaaagttttcattaaatttctagaaatttctttatatttctaaggcataaagtgaaaagttacaataaactccaatgtaattttgttgttactttgtgtttattatttataaagttaaactgacatctttttccttactgcaaatcttatgaattgtttctttttttgtaaatatgaattaataaaatataagttttagtctgtaaatttaggatgcaaacatggaacaaatgtgcaataataaatcactttacataatttatggttaattttatatatagccccttttttgaagtaacctccatttcatcagaataatataaaaaagtaagagctggttgatcactaagctagatttgcaattggtttggtaaatggttttaagtcagtttaacaaatgacgagaaggcacaagattgtgttgtagaggaaagttccttttctttgatggtgacactggatttctctaggcagcacacactgctcatattttatatagatcacttttagaaacagaggctgaaaagggctcttgttcttcctttccccaataaagatgttgaattaattatctagggtttggatttttattttaattttgtatatttgagtttgtctcacagctataaatttcagagataaaaaagataacttgttttgggttctagttcttcctttctaaaatgaaactccctaaacactaaagtagtggttcatgcaaatgaggatatccagttttaacctgtgctgcttccccctaattcaccttagctgtgtaccatgcaagaagcccaacataacgcatagcggtttgtctttcagacataccagtgcggcattctgacttctagatgctaaatacagccgggcgcagtgtctcacacctgtaatcccagcattttgggaggctggggcgggcggattgcttgaggccaggagttcaataccagcctgaccaacacggtgaaactccatttctactaaaagtacaaaaattagtcgggtgtggtggcatgcctgtaatcccagctacttgggaggctgaggcaggagaactgcttgaacttgggaggtggagattgcagtgagccaagatcatgccactgtactccagcgtgggcaacagagtgagactctgtttaaaaataaaaaaataaaaataaatgctaaataccattaatttaccaaaattcatgtcacctaaaaaagaaaagtaaaccaatgaccagttcaaatgtgttttaactggaccagggttccccaagaggtggaataataatgaaagcggcattgttcaccctgttttgcgtttacctagactatgcatagatttttaatactttgagaaagtaacaaaacctgtttaaaagacttgtttaggctgggtagttctgataactctatttactctattttatatttttataaatgtagatttttataaatgtccttgtgactcaccaaagaggattgtaaagtttgcttcttttaagccgtaaggtaagacatatgaaggaaaaaagtatccatgatacccaattattccatctttgattgaaatacagagagacaactagagattgtgttgcaagaaccagagggctttgggacttgtgtaggttatttggtgctcctcatactgactggtcataggaatctgtgcaggcctctttgccttttaacatatattttaatggctcccaccttgggtacccactgacacaattataaactatgcaacgtctgccttgctcactcctccacattcccactactttctagtttttaagcaaggtgttcatgattattgtagtgtcacggcagccaagaatcatgggtttaataggttcatcactcttctaaattgtttgaccggctctttgtcactatggtggtaatggagtatctaattgttgcggatagtctaggctatgctatgtagggttgtattcattgtttgttttactataataatatacctgagactgagtaatttataaagaacagaagtttattttctcacagtctggaagctgggaagtgaagtccaaggtcaaggcactggcaggtttgttgtctgatgagggtccagtcttcacttccaagatggtgcctggtggctacattctccagagagggtgaactctgtgtcctcacatggcagaaggaatggataagcaagagcacactccctttgaccttgaatctttatataagaatgctaagccctcatgacttaattacctccctaaggccacacttcttaatactgttgcattggggagtaagtttcagcataaattttgaaggggacaccatcattcaaaccatagtgtggattacttgtacctctatgtattgtagaacatccacttactgttgagattattaacaataaatcattgcaatttccttttggtccccttacatcttaggcccattttttattgagtactctttttcctgccaccctttggctgtggattctagaccatctgttcttccttatatagtatgcatattcccttaggaatcttatcatttgggatgattttagctaccactataggcagtggtgtccggatctacatcttcggtttagtgtccacccactttgcatgctatggttccatgctcaattgactctagaagactgctagttttatatactgttgtcacctaaaagtttccataataattaagtttaccactttcttttctcccatcttttccgtcattttatccttccaacatgccaggctccttagcaatagaagctgaaaataattttcactgttcttctccccttttgttcccaaatgggagccaccagccaccaagaactgctgcatcttcctcgactaggcctcttggcctgattatgtttttctatttccccacctggcctaggagcccaggcctttatctatttatgtctagattactccacctgcctcttacccaattttccttcactttcttagaaatccagaatatcagggagctggattatttttaagcattcttttgccttctgatctttataaaatcacaaaatttcttacaaggaaattccatccattataatcatatcagattaaatcaaatatattttgcattttctttaaagatactgccagccatcacaccagattaatttttcatttccagccaggaagactttactctccattcaagctacagctctactgctatcccctaggcttgctcacctttctcctgagttgctattttcttcccattcctctttctgaatgcacatctctaaaatgtccatcattagagtggtgcagtggctcatgcgtataatcccaacactttgggaggccaaggtgggaggaatacttgaacccaggagtttgaaaccagcctaggcaacacagggagaccccatctctacaaaaaatttaaaaattagctggccatggtggcacattcctgtagtcccagctactcaggaggctgaggtgggagggtcacttgaggccaagaggtcaaggctgcagtgaactgtgattgtgccactacactccagcctgggtgacagagcgagaccctgtctcaaataaaataaaataaaaataaataaatccaccacttatttacagccagggacaactttgcatgtcataacatttaaagtgtggaagagtcactcaattagttggcatatatgtttggcctcgagttaggtattctgtcatcaaaaatttagctaccatgtttggccattttttctcctttcccttttatttattaataagtgttgtgatatagtttggatttatgtgtttgtcagatttgaactccacccaaatatcatgttgaattgtaatccccaatgctggaggcagggcctggtgggaggtgtttagattatgagggctcactcatggcttggtgctatctttctgatagtgagttctcatgagatctggtcatttaaaagtgtttgacacctcccctcccctcactctctcacttgctcctgcattctccatgtgacacacctgctccgtcttcatcttccaccatgattgtaagtttcctgaggcctccttagaagctgagcaccatggttcctgtaaagcctgcagaaccatgagccaattaatcctcttttctttattaattacccagtcttaagtatttatagcaatgcaagaattgcctagtacagtttgtcatcaattttcttatctataaaaagggaataataataattatcttgaagaatacaatgaaatcgagaagtattaagtaataagtttgtattcgttcatttgctttctctggtctttgtgttagtaaaactagggcaaataaaatattgcctcatttttatttatagtcatgatttgagttcaacagaaaaacatagtaattgatttccatcatttcacattcatgtaagttgaatgagtggcactttctgagtttctgcgtattaaaaacctatacagactcatagtagcaaatcagatggcccatgtcttgggccatttgggttcttctgccatgcgcacaagtctaatttgaaatcattgtaccttaaactcttaactaattgctcaaacttaaagtcattatttcagatctttattaaaaatcagactttgccctataaaatgcccataatttttagcagctatatatctgctgtgtaattttctctttcaaaaaatgtcatactcaatttaatattggtgtgttgtttgcaactggctgggggagctatgtgaagccattacaaactctagtttcacaagaattggactctgaagcctgcaccactgaaactctgggtctgtttttctgacacagtcccacagcatatttctcataccctgagggctaccctagcggatgttctgttgtggaatgaaatggcattgactaaaatgaaaattttcttctctgtgagaaaatgtattgaaaagaaaccaatcacaaatgcaacaaaccaattaaatcaaaacaaaacacacaattctgtgaattaattaggtagggtgaaatataccagactgatagtctttttaaaagataccttgtacacaattagaaatattatgggctgagccagctggctcaggcctgcaatcccagcactttcagaggccgaggcaggggattgcttgaactcaggagttcaagaccagcctggcaacgtggcaagaccttgtctctactgaaaaaaaaaaaaaaaattagctgggcatggtggcacatgcttgtggtcccagctactcaggaggctgaggcggcaggatagcttgagcctggaatatcgaggctatagtgatctgtgtttgcaccactgcactccagtctgggtgacagggcgagaccctgtctcaggaataaaaaaaaaagtattatgaaggagctatttttacacaatatataaaggatacaaaaaaatcatgctttaaggacttctataaagtcacaaaataatgtttgcagaatttgcaaccacaatcttgtttattacacaatttttgggtggtaaaatattttcatgaggaaatcacaactgagaagttgttttcagaaaaattcgtcaaataggaataagatattaatgagtaaaattgattaatgaagtaaaaatattgactatcaggagacgagtgaatatgcagcagattaggaaacaattgactgtaccaaagaatgactgtatcaccacagaaatgaattttatttcagttaaggtatgaaggccctacttacctagtcattaacattcttttattttccttataccttgatgtctccagtaaactgtgtgaaactggatgtgatttctccactagagcgtagatgcaagatgttaactgtaactgatactaagtgttaaaccatatggtatatttgaacaatttattattgaatctcttagtaaatctttttaaatgttgaggtcaagttttcaagtaactctgatgtgtcaggcagggtcctaaatatattgggaagtccttaactttaagaagctcataatttagttgggaagctaagactagcagatagatctctgccaatgcaaggtggtcagtgatacatagtggatgaatagagacatagaattggggaaatgaaagagttgttcgtgttggcccttagaggactttttggtttcatcgaagtaagagagcagattagagaaagcgtttcatgcagaagaaatatttgcaaaaactcagggtcaggaagcctttctatttgggagctggtgataaatagacaaattgcctggggaagatggttatgtagaaagtaatgagagataaaattttaaaaggagattagggtcagactggggaaagcgttttttaccaatctaacttttttgtctaggtaggttgcatggaccatattgtcccagatttatggtgatcatgttatagaatataatcagaaatctaaagaaagtcaatgtatgttagatctgtctctcttaagataaatctatctgtttttctcaagataaatatctctcgtctagatatttcagtgaaagtcagagttggttgacatgaaacataataaaaatctagccatctagtgataaagtaagtattaaaagtagaataccaacagaactaatttggatttttttaaataaatgtgtttggaaaaatctcatgcttaaaatgcactcatgaagcaatatttatagcgtgtatgactataaagatatattaaacataaacataaatctttctgttttatgtgacttttattatctgcccatcaaatttagttaattatcaaaggtgactctatttaatgaaagctgtgtcccaacaaaacctattttcttctcccacagtgatctacaaagaagttatgagattaggtacagagtattttgctcactttcatgaccactgcctgtagtatgagaaatagaagacagtggtttctctccttcttagcagttctccagatttactctgaataagcatcacctgggagtgccagccaaaactgactcacctgggaaactaagatttattcagtcctcactgggcctgggaatctgcattttagtgaacccaccagctgattctgaagctggtaatctgaagactactttctgagacctagaatgaaggggaatacatacgtttagtgtagagcaatctttcgctcataggcaattgttttaaatattattgacagttaagtaaatgcctgtgtttatacccagttaagtaaatggctcagtagttgatgctattgttccactcctacatctctgaaggacttctctaaggaaggccctatgaacttaaaacctacaaggaagttcgtgagggtttgtcacatgtttataaagcagggttctatgcttcttaaagccctggctgtaaatatgcttctctctgtttatcctgcttatacctttcctgagtgaaagcccaactgaatttaattagcagagcataaatagtactgacatatggcaatccaatatatggaattttgtcataatacagtttatagaataggggcagaatttgataaagactccacaaattcacgtaaacagaactgagaggtgtccttgcacctatttacagggtactgccctcagcgcagatccagaagaatggccagatcctgcatgatctcctgggagccctggctctgatttgacatagggaaaaaggccaagaaaatcactgtaacttggggtatggctttgcaaacccaagaaacattcatttccccatttgttagttgaaaaggagtacagagaagatgctgactcatgctgaccctgtagtggctgtgatgaaataacccgtggcaggaacaagaagagagaagcgcaaccctcggtagagtcaatggaagcaattccaatgttagtaacagcttaaagcagcaaatgagcctacaaatctgtgagtgctgctccctagctctttttctctcattacaccaacatttaccacaatggacctaatttttgagattttcagtttagatttaaacgaaagctcatgagatccaggacactttttgtcatggtctttcagatttctctgtgtctaaatattgccttatatccagcacgggcttactagagactttgttgtttttaattttgatctatctgcagtattatgattgtttttcttaatgcttaatcaggaaggatatgattactttttctgtgagtgtacatgtttttaaaagctcaccatttttttttttaccataattttatcatgtcttgggataaaagaatacaatgatctgctacatggataccatttctacagtacttctattccatataatgatgatgctgttttcattaaagtaataaaaaaaatctatacagcatatgagcaggatttgaaagttggcacatctaattatcatagtaaggaaagaacatgaatgccaattttatatttaacaaaagtcatccttaattgttggtggtcgcacacatggtagattgacaataaagaactagtctagcacatttggatcttaaacataaaacaaggcaacgtagattgttttaaaaatgaagtttgtgctagtctgagacctcaggtattaaatgtcttcagaaactggtgctttctttgatccctgagaaagataagaagaggttaggaggtagatggtcacatagataatgctactctatatagtgattgatttattacatataaggaagacgacagtctatggggatttttcaagccaaaagtctcctgccttgcaaatgatcattgagagattacaatgtaactcctgtttaaaatgtgaaagctgttggctctataatttctaaagagcatccttttttattttaatgatgttttcactcatattgtacatatctccctgtttaatattctaaatttgatgtgtacttcagaagtgatcactgttttgtgatttacaaccttggagaaaaataacatagtagtcataactttgcagttttttgtgatgcatgaagatcagattttttaatgttggttaatgctttgctaattaaagtatgcatgttaattaaagcagaggctaatgttaattacctatattaatggaatctcatgtagcacctgcctgaagcaatgggttcaattttcaaaatatctcaattaaggctgaaacttttgatttgcatctagtagggtttcaattaactgcattgaaaacttaaataacactcttaggggtgcaaaatatcagtgattatatgaagcacagtggagtttggtaggttcatttttaaagtcttctttaaaaaaaaaaaaaagcctaactatatttctttcttgtttactggccaaaattctgtttactcaccaagacccagtgaaaacaccacttcttccattaagtattttccaattctcaaccaactaccagagcttcagtttgttgttcttatttattttatattattctgttttgtattatagttagttgttagaatttgtgtcctttgctaactagaagcaccttgtctttatcacttacgaagacaagcacatttgacaagacactagcatgttttgtaagttgaagacactctttaaatgtctgtaaaaccagtaagtacatttattgactaaagtggatatgagtgaacttttagcacacgatgattccgctgttgctacattcatggctgctccaagtaaaacatgaagctgctgtttgagatcttattgcttttcaaataaaagattggcgttttcattaatttctgttaaatctaagctggaatggggaagaagttacctgttcaagtaaaaatagtgttatgaaaccaaagaacatgtgtttgtgctgtcagggatgatgttaacatcctcttttggtcctagatttgtattctgactgtactgcaagcagatctgccttgtgaccataagcacaaatactttaaacaagctgtccatctaagagagccatcaagggttggtgttatttcggaagataagacatggagtcatcacgtggtgacagctcaaatcttaaaataattaattaaaaatatagattactggagacaagtacattgtaattagtatggatatcagttttcctgaacttatttttatgtttgccaaagtcccaataacaaccattcccactgggcctttggaagggattatgagctaatggtactaaccttttcgacatctagcataatgatggtttcagaaaaatagtttccataattgaagggagcaataatctcctcaataagtatatacaaatagattacacactgatttacagtccctggaaatctgcattgataactgctgtgccttggcagactttgactctgataacttaccatcagtctcagagggctaagatttgtcttcattcagctgtagagaataacaaacaaacataagatttccatgtataaggtgtaaccgacaaggtgacacaaaagacacataactgcttactgtactgatgtgctattggcatgctggttaaaaaaaatatatatataaagaaaggtaaaagggaatcgtattgattggacaagaagatgttagctgttgtcttaatggcagaacctatgatagctggaaataagacgtgaatgtgtccattaatgaagagtgatgcaggtttagatttggtagtgagagctcacatatttcatgtcacaccggtttaacattggctagttagtagatggaataaatgcaacaaccagttggaggaatgtgacagatgtgcatatcagactttccaggatgaggcaatgggccaggtctttataacttgaagagcaaagtcaccaaagcagcctttccccattgtgccaccattaaggtagcagatggcagagcattagcaaaaagacattgagaacagctggacaacatctggtaggaagtgacaacctaatgggtatgctgggttgttcctaattgtgggcaatcactcaaaaagcctggaaagaaacttcaatgtgttggttggtgggaggaagaagttcgtcagagcaataaattctagttcaggaatttgagggaattctgaaaagaagtgactttagagcctggccaaatggattatggaacattcatttgtttccccccaggttctaaataagaacaaactttttaaaggagtttgtgaggcctatctggacctggaatctactttaggtagatattcgattcatgaatactatttaaaacgtgagattctgagagtatatggaaaggttagatgttcacagagaatatggaaatgctaattaaactggggtgagggaagtggagtatttaacaactcaattcaccattcctgtttcttaatttactatcttatgccttttctgggacctagataaaatttaaaaagctttttggctatttctagctctatatattttcttccccgccaccccccccccccaattccagccatttgtccttgtgtgtctatatctcattgctccctctcctgctttctcacaaggatcacctaacttttcatgacctctctatctttcaagactcagcactgggagagtaacatttcattttgggaaatgtagagaaatagtgacaaataggtagaaaggaggtcagaaggaacagggatagtgtctccagaaaggaatagtaggaagtcaaaatgcagagaagccaagggctcaacatgtgctgcaactccagccctaaatttctaaattactgcaggacctcctataaatcctacatatcagtaaatcgtgataattgtataataataaatcctgctgctgattgggaactagcaatcagaattggaaaggaaaaattctcacaatgaggcttcattgcttaccacaccctggatatttaaagggaaggagtgacaaagcggttgcatggtaagctataacagggcacggtaatcagagtgtgcagacaaggaatgcacgattgtgcacactgccaaaggtgcagaatcagtgtcattcctggaggcagtgggagcagagagttttgattaagtccaagactcataagacaagtacattgggccttgcagaaagtgacccaagtacataccttactcagtagacttgatgccataccccggctcttttagttgtccatgtctgtgctggcagcctcagtcagggactagctagagactggaaatcatggtttcaggactactggttagaggcaatacctaggatggtgagtagaaaagcactggagttggagccagaaacccctggttcttcttctcattatctatgtgactttggacaaagtaatttatttgacctctggcttctgcatctgctaaatggggataatgacacctgatctacctgtgcatagcacaaggttgttgggattatcaaatgagataatatacatgaaatcacaagttatgaaagtatgaatgttattatcaaagtatcaatatcctattaccaagtgattcctgatcaagcagaatgtgactctcaatgatgatttaagcatttatctaggtacctagtgaacagtgaactgaagtaggtgaacccaggattaccacagccaatgaatctgttaatttgcatactcttgcaaataaaaggacaaaatcaatacttctttcatagtataatagattatttggaatgaaactataaaatataaataattatgtaaaatataaaattttatagttctctttaagtatcctgtaaaatggcagagaggttcattttgggcatgggattctgactaacagtagaatgtttgtcattttaaaaaaatacacttctctcttaggactgattctcaagctgtgaagtagcagattgccaatataaaacatgacttcatttctcactgttgtcttttattctgacacatttcattctatctcagaacctcactcaaactgaggtcctagcagttgttaaataccaatctgaagaaaccagatgaatcatcagaatgtttcatgttctagatttgtctgattgtctcctcgtggtgtgtctcttaactttttcctctattcactattccctacaaactagaaatgtggtccagaggcttgtttggattcagattaaacatttttggcatgtgtacttcaaatggcatcccattatgccaggctatccactgtttgtgatgctaatgtggtgatggccagacacagtacctctttctatagatgagattttctttataattagcaggtaatctgtaggataatgcttgggcattctgtgaatgttctgttttccgtcagatatttgcttaagagttttagaatacattgatgattcttgctagaatcaattctttctttaggggtggtaaaatgatggtatcctaattctattatttctcccacatttttacttggcattttttcctgtagactttctcttaccaacatcagatgagctatagttcctcttttaaaaagtaagtgaaatgcttttctcgttatttaccaattttggtggtaagaagttagtgtaattgtcaccctcaatggcggcatgtttttttctcttttcagtataattataggctaattgatttttatttgttcaatatacaacaatcaattacaataattcttcttttttagtgcttatatttcccacatttgccaaaagggagcctcttcatatgacacttgtgtccttttgacagatccctattagtcaaggaatgcttctttgttttctagtacaagaagatatcccaggctcaccttatactttccctgccttcccttttaaaaggattttaaaaatagtatcttcagctcttcctagatggaaataagccatatcagaccccctgcttgcctcactcattctttcagtacatacttattgagtgtctgctgtgggtcaggaatctgtgggtgatgtcaaaagaaatctggttcatatcatactcttggggagcctaaaatctaataggacagaggagtcctgtgtactataaggtgaagagagatatgttttatattagagggacagatcaccatgggaagtaacacttaaactgaaacttaaagcatatataggtgctagccacatgaagaagataggaggagaattccaggcagaagaaacaacgtgtccaaggtgggaaggagctaggttcattcaaggaattaaaatggaaagaacctgagaatctgtgtgtgggcaaaggcaagagcagctagggaggaggctggcgtgatggacagcaaaggccaaagaaggcaagtcctggaagactcagatacccaaggagaggtatgtctgcaacacactggttgaggctgaggtcagatctttcctttaaatagattttgagcatagcatctaatacctaccattgtgttgtcttcctacataagggggggaaatagtataataaatggagcaatttttgttgaaatgtgtctgctttggacaatatcaatgttatggaacctttttataattagtcttttggcttggaagagttttcactctagcccaaaaataaagaaggagcagaaaaaaaataataactgagataagcaaaagtgagataaagcaggaggatatcattttgcttaacctgtctcttacttagaatatcaatatgcctagtggataggaaccatgacattgaagaggaaaaaaaatgtatatttgtattttttaagtctcctctgaatataatagcaaagaggtagtgagaattttcaggaacagctaagcaataagtcaagctttacaaggtctaagcagcagtgatgatcaatctatacagtgataaagaggatacaaattcatgggaatcattgttgtagagttgtgtgtatgtgtgtgcatgcttgtgtgtgtgcttgtgtgtggctttgtcacagatctaccagaaaatactgtagcttcctttaacatgtgatgaacttgtagagaaaactgaagaatattggttatgttttttgagttttaatttaggttctagagttttacttttgaaaatattactgcagtgtcagcctacaaaagaattttaagtcacaattttgtttaagaacattcctttttgggttctatgggtatatttgtgataattgttattcacattcatcatacacgcatgctcttttcaccttcctcttccattctgcctttattccgttcacgctgtgttcctttattgggtcttctctccagctgacatgcatacaccagcttctgaagctctgtgatcttctctgactgtgcaaattagggccccataggaagtctcagcttcacatggtctactcctgtctgagatccagacccctaggaactggaccaggatgagtctcaggcatagataagagaggtaaacactcaagacttggaggtactttttcatgctctactcacccctgctgtgcaaatagatttccacccatagcttttcttaaaagtgtcttgtagattaatgcatttcaatctttaagtgaagaatattgaaattcatgtacttggagatgttctgtgttaagatatgtgtagagaaaacttgaactgtgattttcctctactctcacaccacaataatcatcaatacagaagacttctgtgaccatatttgggggtggggagagttctccccatacaccaagcagtggacaccaactgagaggcctctaattcagttccaacattatctacccagagacagtgtcatatcccacagattgatggctcagtccccaagacttcccccaacccccaacacaccagtcgaaagttcggccctccagaaattctaatcaaagtgccaaacttttggcttcaagttggggttcccatgaccccttctttgggttggattaatatgctggagcagctcacagagctccgggaaacacttatttacatttactgatttattataaaggatattgtaaaggatacagatgaagagatgcatagggcgagaaatagggtaaggggcacagggctcccatgcccttcctgggcgtgtcaccctccagtaacctccatgtgttcagctatctggaaattcactgaactctgtcctcttggggttttatggaatcttcatgatgtcagcattcattcccccacagtatagggtgggaccctctcatgggagagtcttaagactcacaatcagaaaggcaggcgaacattagagtcctgctttagggcaggtgaaagcagagcagaaagtcagaggctgcccctgaggcctaacacacccagcattataaccaaggaatggctatgggagttagaagccaggagctctggatgaaaaccagtatatatcataacactgcaagatgttaatgcctgtgtatatttggtatgaattagtatatcagatatctttccaattcagcagctaacaagaatggggataggtggagatggacacatgtagtggggagcctttgtgtggaggctgttacatatgactttgagaattactagaatattcttatctaacatttaaggcccttaacttactcatagtacgcatcttctgcttccattagaattttaagtaaacacaattatttgcctttacattattattatgacttcagtaaattggttaataaccaatatattaaaaagcaaagggttttgctaagaaaaatatttttgatattttctacaaatatagttttaaataaaatatctattataagttttaaaatggctaatctgatttttctgtcttttcttcatctttatatgtttgtcatttatcagtggctcacatctcagtataatatctcgataaaatgtattttctcctttttaaatatttttatattctcatctgtttttatggcatgttactgcatgtctccagaggcacacagcatttttattttcaagtaaatttatattagttacagtctccagctgttttagatataggatcatttcctgttggtactgtttccaggacaattctttttttcccctctcacaaaaatgaaaaatgtaatttaacaaagacatcctataattgccttcatatctagcaatctaaatactttattttatttaaaacatctgtctacataatatctagtgattatccaggggtatatcattcttgagaaaggcagctgctgtcatttttatttaatttataaggaaccatcaaaaatgcatccttaatatagagtcttatgccactatgtcatatataagattttttaatgaggatatcttacatttttggtgcttgcaattaatttaggctttttttcaaattggaaaagaccatcattttaaaaatcactatggaattattttgtaagaatagtaatcttttgctacagatatcaaattataatgaaaatggtggtatgctcctctactcatgtaactagccttacacaggaatcatattttaattgctaagcttttttaatgtcatttgtctatagtgcattttcttttcatttataataaaaagtgaagtctttttattgtgatgtctttctgctatataagcagtcagttgatattttcttgttatttttcagaaaatgcatggagaaatatagcagcttctataaaagctctttgttttgagggtaatactgaaatttgcttgtagaggaacccatttataaattctgtttatcgtgcatgaccctcggagcctaaaatggagtgtttaacttttaatagattgtatcaatttaggctcagctgaatgccaaaaacaacagacacccaggtttacaatagtgtgtctaaatgagaaagtttaccttttccaagggagtaatcaaaatattcctttttggaacactaagagtatgaaagggaaatgattatggttccctactgacacactgttatgattgacaggaaaaaccaacatgcatgccacctgagacatcttgttcaggaactttctggagggtagtaaattggtgttggcacaaacacaaaaaaataaaatgacttgattcagcacttttcaattctaaatccccaaatactaaagaaagaagtaaatattcatcaaatgatcaaaatttatattgatttttattctacattagcagctcaaagtcgagattcttgacagggtgggtgtcggtttgaatgattctctttgaaatgaggatataggcactgagctgagtgctactgtgcattcctgaaccataggtcctgattattagaaccctaggaggctaaatttttaaaagaacagtataaaggcacacttgtttggttctgttttgataaataaattgttattattagtatgtaaagtaattcttgttgttcctgcttcattcttttctctctatcaccatttaaggacaactattttatagaatttcagaggaactagtgtgcatgtcttgcagtcatagagttaatagcagtgtttgccagcataattgtacttaggaaggaagtgccagttctacagggcaagagaaactaagattgtatcttcctattatacatctttgatgtttactttctaccagaaagtaaataaggatttgctgtagaggaatttagaagatgggagtaaggatgctgccatagaatataaacagaggatgcctatgtcattgtgcagagatttgctaaggaaacagtaatggagtgacatcaaaaattctaatcatcgtcttcagtccacacagtatatttgcactcccttcccaccctagctcatgacataaaatgcggaatttttaatgatttttaactacaggcattacaaaaaggagagggtggtagtagataaaagctcttcacaaatgcaatagtttgatatgtttgtttgatatatttgttcttcatgtttgttaggtggaggtgttttgttgctgttacttttaataaacatctcatctgtcattaaaatggaggaaaggatgtttttctttatgcacaaaaagaagaaataatggaaatggtgttaatgttaatttctcaactttgtgtttaaatgtttaccatttaacaaatatcattaaggaaacagctttaaaattgaatttcctaaacattatagtgaatgtttctaataatttgcaaacaacaggtcaatagaaataaaaatgaatttttaaagtaatgtattattttttacttaaatcatttatcttttgcagttgtcctgactttattagacatgagatttgtaaataaaccttgagaacctaaggctaggtttttttggaactgccaatatgatcagttttatgattagttttgtgattatgattagtcttctgataatagttttatgatcagttttatgattagttttatatcctaacctacaaagattagtatatgcagtggtctttgctgagtaataatattgaaataactttgatattattaaatttttgatatatacttaatttttgacaagggaagatatttacattttttaatacttttagaactctcttatacaataattaaaataacattccaacaaacttagtaagtctttctttggcaatatctttgaagtataatattggtcttacccttgaatgaatatttgagctactattatgtagtatagtttttctgtgattctaggttatacattccctgagggttgatactgtgtctgatccagatttgtttgtatcatgcacaatgtcttacccctaagagacactcaagatgtatttgttgaatgaataaatgaagggcctgaatcaactttactccaaataaatacattgctcctttagtcctatgactccctgctctgattctgtagaaggaagctttggcatccatgcaggactagaagaacaacatgagattctcattcattgtaataccaaatgttatttgtatttagctagaatgtagctaatcatggtatgtgaataaatgcctgtagagagtttgtttctggacaaaggaagtgcacttagaataaggtgagttattttaggaaattatgaaccaccaacaatgacaacaaaagcaaaaacacacaaaataaacatgatcttagaaaaaagcagtggaaaggtaataattctaaatcctggaatgagtatgggcactctgccaaacaaaagagtagatatttccaagtgtattcatccattctcacgctgctaatagacatacccaagactgaataatttatgaaggaaagaggtttaattgactcacagttctgcatggctggggaggcctcaggaaacttacaatcatggcagaaaggaaagtaaacacatccttcttcacatggcggcagcaagaagaagtgccgagcaaaaggggaaaacataggtgggcatggtggctcacccctgtaatcccagcggtttgggaggctgagatgggcagatcacttgaggtcaggagtttgagaccagcctggccaacatggtgaaatcctgtctctattaaaaatacaaaacttagctgggtatggtggcggatgcctgtaatcccagctactggggaggctgaggcaggagaatcgcttgatcccaggaggctgaggttgcaatgagccaagatcttgccactgtacagcggcctgagtgacagagtgagactctgtctcaaaaaaaaaagaaaaaaagccccttataaaactgtcagatctcatgaaaactatcacaaagccccttataaaactgtcagatctcatgaaaactatcacaagaatagcaggagggtaaatgcccccaggattaaattacatcccactgggtccctcccatgacacatggggattatgggaactacaattcaagatgagatttaggtggggacacagccaaaccatatcaccaagtgtagattctaatcaaccctggaagtccttgggagggtccatgagggtcttgagacctgaaggtctttccagaagaaggaagcattctggactagttgctaaaggggatactattaggaggaaagaagggaaacatagtaagtatttttgtaaggaagcaaaggaaaagacaggtgcttagatatactgcattgaaggtaaaaaagattgtgtagtaaaagaaggaaaatgtccccagtaacaaaattattaccaaaaaagtagggtttcctcccattatattgaaggatccctgtgatcttgagctagtgtggactcttccaaatacaaactctgccattgttggtgtctcctccaaaagcccaaatggctcatgaattaaagaagcttttttttcttcttttttttttccctgggaagaatagtaaacaagttctatatttcaattattttattttctgtcaaagaaaaaagtctccttcttaagggagaataaagccaacaatttttaaaatgaagctgaggcttcagccttcaaactaactgttttatttctttgtacatttgaaatcattttagatgttcaaactcagtaaaatttattcaatttgtattgagtgtcttatcacatatgctgtgctgggtgctagggataaagcagtaaacacataaacaaaacctcctgccctcatggagctttcaattcactgagggaagatggacaatataaaaaaaagtgacatgttcagctacatgtgataagtatgtaggaaagaggatagggatttctaggggtgggggtgagttgtagttttaagtagcaggtcagggaagacttggatgcaagaggttatctcagcaaagacttgagagaagtgagggactgagctgtcgtgcaaacacaagcaaatgccccgagagcacacccaccagccctgctgaagcaggctagactaggttgaggaccaaggactgaccactgcatgaggaatgtggaccaaaatctgattggggtgtgttcaagagagaaagaggaggtttgttgtaaacagcaagtataaacaattcaagtaaaaatggttttgctataatggagaacagagaaatggaaaaatgactagaagatagattggcggcaatggattatttttctttttctctctattttttttttttaccgatggaaaaacaacggcattttttgggctaatgtgcaataggaataatacagtagagaagaaaaaacttgatgcaggaaagaaaggcaattttggggggtgatcatctttgtgtaggtcagggaagtctggtaccaaaatgcaagggattagccttagaaatatggacagcttctgtagaaacagaaggaatagcagaggacgtgcacccagatgcagataggcagtagtagaggtggtgagaactacgaagtctagtatgagtgaacagggagatctacaatggtatgagttaagaaaaagtaaaatggattttaatattttcaggatgcttaacccaacaaagaattctgggacgtgaagtgataaatcagtcaaattagcaaaaagcaaactaaaaattgctttttatgacaaagataaagcattaggtctatatgtgattataaaagtgcttatgtgtttaatccttcgagttgattagattgactgaaatttcctcccccaaatgtgttatacactatattattattagttacacacacaagatcagagggaagtatatgactgagtaatgatccaggcattgaatttgggtcaccacataccgagccaaatttccataaaatattttagcaaactgcattttgtgtccttattaaattattaagtattaatttgtagtctgaatttgaaaaggagtatctctagtgatttaggtgctaaatgcatacaaaataaaggggggaaacatgctgttattgataaatagcaaagcaattgtattaaatctcagatgagaaggcagcatttctaacatgattaggctgccataacaaaataccacagactgggtggctaaacagcagaaattatttctcacagttctggaggctggaagtccaagattgaggtgtctgcaggtttgatttcaggtgaagcctctctccttggctcacagatggccaccttcttgctgtgttctcatatggctgttcctctgtgcatgcacacttctggtatctcttcctcttcttacaaggacaccaattctattggattgggacccccacccttgtgacctcgtttaacctttattgccttcttaaagattctatctccaaatatagtcacattgggggttagggcttcaacataggaatttgggggtgaggggacataattcagtccataatattatgttaaaagtttaccagaggtactagttactagaatctcttaggcattcccactatttggtatggtgggcatccagcctgataggaactgctgattcaacttcttgatgcaactttctccaagtacaccagccagtaggagctataccagcatatttggactaatccattaggcgactatcttgtcatgacagaaaaagagagatagaggaagattaaggccatcacagaaatgacaatagcttccgctggcacttcattgtggccaagatagcatacaaattttctaacctggcatcctccatcgtctatccactttagcctctatatccaaatgccccaaagctccagccaccattctctgaacatgccacatcctttcacaactctgcgcccctgaacaaatgagttactctgtctatgaagatatctatctgtttcttcacctgacaaggtcagacccattatctcagttttggctccaatgccacttctgtcaagcctctgctccatacccccaacccccaccttcaaacaataaattatttttatttctcatccttccctacaataatttcacttggacacttgtagttatctgttggcatggctctctcttctaccacactgcggtgcctcaggagaagtaactaagttttcttcttccttgttcccacagttcttggtacagttcttgagatatgagaaagtctcagtaaacatatgagtaataaatggatgaatgcagctgggtgtggtggctcatgcctgtaatcccagcactttgggaggctgaggcaggtggatcatctgagcccaggagttcaagaccagcctggccaacatggtgaaaccccatctctactaaaaatacaaaaattagctgggtgtggcagcaggcacctgtaatcccagctacttgggaggctgaggtaggagattcgcttgaacctgggaggtggaggttgcagtgagccacgattgtgtcactgcactccagcttgggcagtagagtgagactccatctcaaaataataataataaatggatgaatgcaagaatgtacaactcatccactgagcaattatttactgagcccctgtcatgttccagatattgccagggtactgggaatgcaaaatggcaaaggagacagaaacaatcctttatggagtttggggtctagaaaaagggacagaaaaaaatgtaaaccagcaaatgcaagaattttaaattttgatatgtgttatgaaggaaattaatctggatatgaaatagaggaaaaatagagtggatctacttttgataagttaggcaaggcctctctgagaagtagcatatcagctgagagctggaaagatgagaagacattagcaagacaatgttccagtgaaagggaacaatacgtgcaaaggtcctgaggcaagaaagggctgtttaaagaactagaatgtttaaagtgttgaaataaggcaaggatgacaggggcatggtgatcaagagggagactggtaggaaacgtggcctaaggtcagcaggaaccaaatatcctaggccatgggtagaattttgttttttaggtctgaatgcagtctaaaaccagctcatgttttataaagactactttggccactataagagaagagattagaggtctaagaatgagcgaagggagatacgtgttagaagatatttgctgtactgcaggtgaaagattatgaaagcttggagtaggctggaagcagtgcagattggagaaggagactgcagagacattttagaagaggagtcaacaacttagggaataacctgctaaaggaaatgaagaagaggaagagtcaagaatgactctcaggtttctgacatgagcaatagacagtaccatttgtttaaaacgaaaggttttattttatttaaaggcctaagtacagaaaggtttgggggatgtggtaaggatgagaatgaagggttctgttttaaatagtaaggtctaaagaaacccaagtagcgatgtcaggtgattggaggtgattggttggatatataagtatgcagcttagagaagaggattggaaggcgttactacttagttggcatttaaagccatggaagagagtatagatagagaaaagtggcccagaattgagcccacaaacaacaacacaccagtgatgtcaactgtcattcaaaaagatcattgaacaataaataaaatgaattttgggagggagaatgactgataatccattatactgggtgagccagtggtaatgaaggcctagactacagtaagtgaaaactgatcttttttctcttctcattgtcagctctctcccatggcattcacacttcatctcctaatggcaaccgttgcctgtaggtttgtatttcagtactaatatttccacttgcttgctgaatatctcattctgagcatcccaccagtaccttaaattaatagactcatataaatccagccgatttctcccatccacttgaattgctcttcctatattcctactcctattgatggcatcatgggtcttttagtgacctagaagggaagaggggattccatcaccgagtcttcttccccaaccccctatttaatgagtaagttgccaaagtattttgatggtgcatcttaaatattatttaatcatgctaagtttccatgtgtaaaatatagtcactttttaaagtatccattgttatagatgctaataattttttttaaccagagattgttactgtttttaaagaactaaattttcttcaactctttctcttaaaaatttatctttggactaaaatatagtctgataaaaagttaagatagtctgcagaaagatttagactggcaaagccattcaaccttagtaggaggaactactttggttctatttttatcatctcatttgggaatgaatcactgaaaacagaaatagaaatagagatggataagaaagacctgggccatctaattcatctccttgttagtgcagggaagtttcctttgacaaatgcttgtgagatattatgcagtaaaagtcatagattataacatttcaatcattttgtaaggtgactatttttcgagttactctcagctttgttctctgaacttcttttcacatatccctgtcatatgtgaagtatatctctttgtacacagaaatggctgagaattacagagatgaatgcagattatttttctgtaatggtgttgagtctagatgaagttgacttctctcgttaggattgtttttgtgaccagtggcacacatttgtgaggtcattacccagaatgaatcatgatcaagcttgtgacttaggatggctaaaaactaacaggaacccttagatatcaaacacgtcccttggtacctaatggcacaaatgcattattctaattgggtcagtggaatacttagtgtgggtataatactcgttaaactttgtggctttgcagtggaagtaaaggggtggcatttgagaggagtattgttctttgactattgctcaatatctctgtaatctcaattttctcataaaaatttgtatgttcttttaaaagattttttctgttgtgtttctgattgttgactctttacatttagttttatccttttaaaaataaaatattattacatcagtagttattattctttcaggttccatgatgtttgcaaacctcttagttggcagtcttctatatgtgctgttaacattctgcatacctcctcttccacatcatcaataaagatactaacatcactagatctagcattttctttgtgccttcccaccagccataccccctactcccagctgaatgtactccatatgacattatcctttgtttatagtgtttgacatagttcttaatccaattgagtgtcttcttattcaagtcaattagtttgggcaagaacagttcacatgaaccaacaaatagattgcagttttgatctgattcctgaaacttcaattatataactatagttattttagcagtgtttctttaagttctttctcagcaaaccagagcattcataattaagtacttatgaaaagcaacaacataggaattctggaatggtttgagacctcatttttctttttttcttttctttttttaaattgagaaagcgtctcactttgttgcccaggctgaagtgcagtcatgcaatcttggctcactgcaacttccttctcccaggtacaagtgattctcctgcctcagcctcccaagtagctgggactacaggcatgcgcccaggtaatttttgtatttttagtagagacggggtttcgccatgttggccaggctggtctcaaactcctgacctaaagtgatccacccacctcagcctcccaaagtgctgggattgcaggcatgcatcaccgcacccggcctgcaagacctcatttttcataggctacccatttcctttatagagtcctaatttggaatttaagcagctgccactttataatattcactttttctccgtagtcgaggctataaaactagagatcaggcaaaaggccttggtcagctgtggatactaagagtagaaggtcacatctggcccaacttttcttcttacgtgttatggaattctggcgactactcaacagctgacccagaaatgttcttcctagaatatataataaaattgtaaagtagagatttcaaggtttatcagaaatgttaatgggcatgcttggatttagtgaagcacacaaaagaagagtcctttggtctacaatgtacatgaactcagcattgctcctttccctttactatggccaagcatgtccctgagaagatatcattctcggtctcatctgatgttctagggaacctgaaagccacaggaatcacaacagctgcaataaataaagcatctattcaatacagtttcatgccaaatattattcagcattcttttggccttggtttgatagaaaacagcatggtgaacttactacctctcctttactacagtgagccctaagtatgaaagatgtaacaattcaaacctgcatgtaaataaaatcactgtttgcattactttaaaattattaagacagtaacacagacaaccaaaaaatgtagtaaagtctattgtgattgttgaagaggtattagaattaacactaggcttttttattctccatagggaaaatagtagaaaaatatttagaatatgtgtccatgcaaatgtgtgggttggagggggatttttaaaaaataagtgctacatatgtgacaacataaggaagaacattattaaggaatttcacagaatttttatgtaaagtcttatcatacagtattatgatctcagggatattttgtgatatttacagagtcttctgagggttcatttattcaggtcatattttaaggaggaacttataagattcagatctaaaatataattctgtaatatgcccaactgatcccattaaatccaactcgaaaaggagcagtataatgatgtgaagaattcccattctttgagttgttacacctcacttgaaatgcattccttctggattaaaacagcaatttctctttgtttctctttccaggctgaggttcaactatgctacctggaagcacaaagagatgctgttgagcagatgtccctcaagctgtacagcgagcagtataccagcagcagcaagcgaaaggaagagtttgctgatatgtcaaaagttcattcagtgggaagcaatgggtagggaactattctttttgttgttttattctcactaatctattttttcaatgattttccactggtaggtgttaggaaggtatttcctctttagcaaaccgacaaggagaagctcagtagactaggcattaatgttcttttccatttgtgccagaattgaagactgtggatttcatcagcctctgccatctaacccagaactttctgactcattattaatttttaaaatacagcgttgtgattttataagtgtttttgtgactacgatgtgcctttagtattgatctgtcttctttataaattttttccttgtatttgctcttttttaggtttcacaattttattttaaagcctatttaaggacttttaaacaccagaaccattttggaaacttagaagaacataattttcctgaatagtgtagaaatttaataattgtttagagaccatgggctagccacttagcttcacatgaagtcaattggaatagactagctcttgcattatctatggtatgtgaaaggacccaacaccttcagtgacccatcaacaatttcattcagcctgagacatacagctgtatttatattatactaactattcatactattgaacagtcaagtcacatatttagataattccaaatgacttttaaaattatgtgaacgttgtctaaatatatgtgtatttatatcattggagcagataattttacaaagctaaatatatgtgtgtatatatgtatatttttaaaaagtgtatatattttttcttttttccagcccaattgtaatatttaataggtgattttagagagtaaaagggtagtgatgaaattgaattatttcagagtattaataatttgataatagttatgctcataaaaatggaaacagtaacctattttacttttagacttgtaccagacagcacaaaggagaaactattccccaaagttacattacatgttaataacattatataaacctatgggatgtaactctagccaaaatatttcttaaagtgacaagaggaaagaggccttttcatgcactggtttgcatttatttttttaaagtgcttatagttctgactggaactacaatcctcatataaagttttgggataaattaagtacactgatgaaaaattctttcttattgtaaaaacccattgtctaagaatataggaaataactcctgtattcttagtcattcagagtcataattgagagtcataattctgtttaggaaatgaaaagggagttttcaagttttcacatttacctatttctataacttgttgctccatcagtatattttaatacatgagacatattatatatgtagtcaattcatcttacttgattcagtagtcatttattcaccagaggaaaaacatagcagcaaataagaaagaaaaggttaaatcttgaagcatgaacaataaactgctttgaggccttaatgtgctttaatttctctaaatgcctaaatagcctctggtgtacatgcaagcacaaactttaggtcacattttcatgttttgtaaaagccctggggtttgagcagtaccacgtgcttctgaccccagattccagggacccaatctgagcactcactctgggctccacaaatcataaatctgccctgggaattgcttagttaacaacaagcattgttctgtgaagtgggagtaggtgaacttgcctgatatcctttgtttatgctccttggggtgctgaaggctgtgcattgtgcagaaatttaagagtgcactgaaagaaagccagctatttaatactaaggacaaaaaccatatactcctttctattttctgtttacatacagaaaagcattgtttgagaaatgcatgtgagtgaggttatctggggtgtcctgcccttaaaactgtctgttcccacagtcaaatccttaattctaaagccttaagaaagtagctttgtaaaattatctgctccaatgatacataaacttcattaatcattctttttgttacatagaatgaacattgtttccaataagtaattgtgggaatggtgtgggctttcaaggatcttcattccacatgcatatatccaatacactaaagagaaaattaagttggtgatacaattcgtatcattttatttccttctcatgcctacaagcatgctaaaaagattatatgtactaatgtagctgaaaaatgaatcagactactccagggaagactgagctgctacactgaatggtgatcttaagtttctgagaattttatgtaaccaaaataacttttagaaatgaatatataacctctttagcctgacaaaaaggtatgttatcaaggtgatacatcacagcttatatagtatacaactatgaattgtgtggttagcagttatgaatatatgtgataggaagattttccctgaacgtatgtgaggctgtatgagttctagtaacagagtttgttcacctgtggggaacagttggcactggctccagcatcccaaagtggaaccatagctcctggagggacctgcagtgtgtgagtctccggtgattatcaacagtagcaaaagtcagtgcttttcaatttaggtgaaagcacttatcagttgcctttttttcatccaataaatattcattgagggcctactatgtgcatggcatgatgctctgagcatagtttatcaagaacaattactttctgtatattttgtaaagtataaccatctctttttcagataccttttcctattgagaggttatctgactttatttttctaatgaatttcaaagattcagtttaatttgctaagtagtatcattcttgatgtcagaactcagtgtagattaaaaaccatgtcttttcttcagtctgtgtaaaggagagaactgagaggcaaagatagaaagtttaaagtggagctaagacctcgactcagcactctgggtcaagaatgcagaaggtaatctataaagtcactctttgccctctctgtaaggatttatctggactcttaataagcttttcccccaaatctggtgttgtgcatattccatactgtatgaaatttgaactaaggtatcttcctactatggagaaatggaagtcttaagtagagttcattaaaaccacacagaagtttgggcaaaacattgcagagcaggtttaaatcaaaacaaaattaactcattcattaatttgacaaattttttttttttttttttttgagatagggtctcattcccattgcccagactggagtgcagtgacatgatcttggctcactgcagccacagcttcttggctcaggtgattctcccacctcagcctcctgagtcactgggactactggggtggggcaccatgcccagctgattttttgtacttttagtggagacaaggtttcaccatgttgcccaggctgaatttgacaaacattttaaagtaccttctatatgtcaggctctatgaagtgcagagattaaaatggtggaaatgaaatggttcctacatttcagaagctcacagtttgttaggaggaaccagatctctgtaaacagcgtggagtaaaggattttaagtgtcaagttagaaatatgtgtagggaagaggggagggctcattgaaggcagagctcaattctgactgtgtcaagtagaattagagcaggtcaggaaagacagcagagagagagggctctggagatggtttttgaaagagggctaggtcggcagaagtgcttctcaatttaacctgaaaaacacatattgagcacctacaaagacataccacagtctctgccttcattgaatttacagtctagcaagagagtgtggcatgaagccgatactgatctgtgcagtgagagagaaggggaaatagagaatgctagggaacttagagcaaacaggatgagctctcgcaggcagggctgcatctttcatgttcactgcactctctccagcatctggcgcagtgcctggcaagtgctaggtacccagtaaatgaatggatgcatgaatgaataaataaaactgatctggggctaaaagggaggaaaggtctggaatcatcagactgcttgctgtttcataggactgaagaggaggattgaagttagaggaggtgtggaaaataaggctttggaagaaggtgaagtccagagccagaagttaatcattgaattcatggttcttaaccgagatagtgcatcaggatgacctgtggagcttttaagtagaaaaaagccagcctgcccgaccctactgaaaattttgattcagtaggcagaagaagatgatagtgattaggttctaatgctcaccaccagttgagaaccattgcttcagtggttttcaaagtatggtctctggaccaccagcagcagtatctcctaggaatttgttagaaatgtcatttctaggtctcacttcagacctattgaactagaaagtctaggggtggagaccagcaatctttgtttaacaagcatcccaggtgattctttttttttcttttttcttccttttttttttgtttttgagacaaagccttgctctgtcgcccaggctggagtgcagtggcgtgatcttggctcaccgcaacctccgcctcttgggttcaagcgattcttgtccctcagtctctcaagtgtctgggattacaggtgcacaccaccatgcctggctaatttttgtatttttagtagagacggggtttcgtcatgttgcccaggttagtctcgaactcctaacctcaagtgattcacccacctcagctctccaaagtgctgagattacaggagtgagccaccgcacccagcccctcccaggtgaatctaatgctgaagtttgagaagcaccgctttgggcattagagacttttaggttgacagttaatggagcatgtggagactagatggagactgaagccagaaagtatcagtaaacctcagtggtccacaggatgaagagagtgagggagaaggaaccattctgatgccccagttattggctcaaagagaaagaaaacaggaatacttggattcaaatgactttggtgtcatccaacatgtaatatttatttagcacctattaagtgcaggctgtgttaggcactggggacgtagaggcagtgggacacaaaaggtgataggtatatggaaatcaggaaaaccttccagaagaagtgtcatggaggatggcccagggtcagaaatgacaagggtgtttctcacagaggaggcagtgtgtgcaaacagccagaatcactaagggatgcccagcatgactagattggtagtttgcaacaattatctgctaactgtgtggagaacagattggttaggcctaggctagacagtgctcagataagaggctcttccagtcattcaaataagaaatagtccctgagctaagacaacagcaatagaaactgaaagaaggaagctgcattgacaaaccttggttactgggtagatggggttgttgagggaggggctatttgagaatggacctccgtatttcagacttgggcactctaggagacagatgtggcattcaccgaggaggggaatgcagaggaagaataacagggaggaaaagcagagtatttgagacatagttctttccatggtctctgaagcatccaagtagaaaaacccaggaagcagaactggagctcagaaatgttttggcttcctcagccaacattaaggacagtgtggtaactatggggtagcagaggctgagagagccaagaatttaccttgtggtaaactatgccctccctgccaggtgaacataacattgtctttaaggaatgcttattttaaaactataggtaagcagaacattttcatttcagttagagtttttcctgctgtaatatgcaagaattacaaaataaagactacaccattgagaattccaggtagtatcttgattgacagaattgaggagtacggttgactattattttctctcttaaagctgtaggtaaaaagctcctgatcctagatataagattgcattgagtctgctcagattgcttccaactacacaaataatgtttatttttaggggtaagtcatgcattcactgtagtctaatttcctaagaggagagagagaaactagattaaaaattaagaatagaattcaagttagctctctgctactttttagctatggaaccttgattgggacatttaacctcaccaagatatgatatctcagtctataaaatgagaatcattatcctagtgtacttcatgttttttttttttgagaaaggaaatgcaatagtaggaaaatatctaaaatacctagaatgcaataaataatatgaaaaatcattaacgaaatatttattttccaactactgtgttgcagacagtagtatgagatgctagcaatgaaaaagatacgtaagacttaatctctatggtattcagtgtagtgagagagagagacatttagatacatccttatagaacaatgggcggggctgggcacagtggctcacacctgtaatcccagcactttgggaggccaaagcaagaggatcatttgagcccaggagttcaagaccagccttggtaacatagtaagacccccccctaccaaacctaccaaaaaattttttaagtagctgggcatggtggtttgcatctatggtcccagccacctaggaggttgaggcaggaggattgcttgagcccaggaggttgaggctgcagtgagctttgataatgccactgcactccaacctgggagacagactgaaaccatgtctcaaaaaataaattacttaattaagaaaggggaaaatttaagatacagagtgttatgggaatactgagaagggctacctaatccagcctagctgaaaggggtcaagaaggcttagtggaggagggaacatctgagctgtcttaaaggatgcatagattttagccattagaagaggtctggccgggtgcggtgggattacatgcctgtaatcccagcactttgggaggccgaggcgggcggatcacgaggtcaggagatcgagaccatcctggccaacatggtgaaaccccatctctactaaacatacaaaaaattagccaggcatggtggtgggcgcctgtactcccagctactagggaggctgaggcaggagaatgacatgaaccctggaggcggagcttgcagtgagccaatatccatgccattgcactccagcctgggcgacagagcgagactccatctcaaaaaaaaaaaaaaaaaaaagaggtctgtgcagttcaaatggcttttattcaagtcaggcaataacaaatgctggcgaggatgtaaagcaaagggaaccctcatacacttggtgggaatctaaattcgtacaaccactatggagaacagtttggaggttcctcaaaaagctaaaaatagggctaccatacaatccagcaatcccactgctgggcatatactccaaagacaggaaatcagtatatgaaagaaatatctttactctcatgtttgttgcagcattgttcacaatagccaagctttggaagcaacttaagtgtccatcagcagatgaatgtataaagaaaatatagcacttatacatgatagagtactattcagccataaaaaaaaatgaacttctgtcatttgcaacgacgtgatggagctggaggtcattatgttaagtgaaattcgccaggcacaagaagtgaaacattgcatggtctcactttatttttgggatctaaaaatcagaacagttgaaatcatggagacagagaaggacagttactagagactgggaaggggtagtagagcatcagagttggggaggtgtagatggttaatgggttaaaataaaacacagagaatgaataagacctagcgcttgatagcacaacaggggggctatagtcaataataactttattgtacattttaaaataaagaaaagagtataattggattgtttgtaacacagaggctaaatattgagaggatagatgcccaattttccatgatgtgattattacttattgcactcctgtaccataatatctcatgtactccataaatatatatacgtactatgtacccacaaaaattaaaaataaaaattttaaaataaattaaaaaagtagaagagggatatgtagagggagggagaggatttcagccataagacaggaactaggtagggggagtatctgaatgtgttgaagtttactacaaatagtttgatgctgttgaagcagaagatcatggaggtgatttctgactctgcttcctggaattagaaggattccaagagagtttttagggacttccactcctgtggtgaagttccagaagataccccagtctcatcagctgtatgcctgacttcctctggctgtggatgaaattgggcaatgtctacagatagagatatagttgaggtttatgccttgtatctgagaacacaggaatagttcatccctcatcacgcaaggctttagtataaattttcttcccaaatagaaacagtatatacaggttaatcccaagcacaacaggctgaataaaatgaactttaaattaaaataggattataggctaaaagtttggcaggaaagaggagttcattttcttttaggaaaagaagtgcctctatatgtgtgtgaaagtatatacaaatataacatccccaaagagaagtgatattgacaagtgaaaacaaatgaatcacgatttaaaatatcacttgattaaagaccaaatttgtttatctaaattaattaagcaatacgatatgtcaaatgactttaaccaaatgagaagggatataatcaccctggatttcctgccatggggtgatctttctggttttctgttgagcagcatgccaaaatattcatgctctgtcatactaactatctctctctctctctctctctctctctctctctctctttctctctttctcttttttttttttctctctctcttacaaacacacacactgtgaccattttgaatttctacacggtgggtatttttagaacactgctacataaagtgttttctttttggtgcacaccagccataaaatgatgtgctattcttatgtgtgccaatgttgataacagtctcacatatagattaaatcactagacaacccaaagaaatcttatttccatcctgcatttctacttccttcccttgactcttgccttacctcagtctaatagaagatcagtgttcaattcaggccctttttgtgctctggaactgttaaatagtaaggtaacaatgtaggctacagtcaaaaggattaaaatgtgcctggctgcttcctggataaatgatattctgaccactatgtaagtatttaaataggtctttctggactaaaacaaacaaaaaaatcttaccagtagaaatgtattcacttgggtcatgatattattacacccctttaatgtgaaataacgttaaatcgattgtagacctagacttcgctaatttgatgacatccatgccaagagccaacaaaaggcaaaccagagagggagaagcatgcttttgggagaagtatgacttcaaagttaacagtgtagtcaactgatgaagacatatatatataatatagtatatatataaaatatagtgtgtatatatatacacacacaccacacacacacgtctttcatgataacaatgatcaatttttgtactgttttggggagttgatgggacctattgataaaaggagaaagttgccgacacggacaatgagaaggcacctaaaacaaatctgatttatttcattttagtatactgaggttagctcttttctttaaaatgtattcctttattcatttccctatctccttcaacaaaggatctgagtcaacttacaaaaatattgacagtaaaatagaataaatattagactgaaataatttaggaaaaagtaaagtaagaaaataaacaaatgtgtatgttatgtatgtcctcaagaagggctatgatttggctatgagctatccatacccaaagaataaaatgaaattttatctatcagagaattcatagtgtcctatgattaaaaataaatctatatcagatgacgcacaacttcttatgctgttgagacctgagaggaatttctcctgtagttctttaaggcagagacaggtgtctgtgatactacacccgtgcaagagaagtcaaatccccaaagcagttttttggtgtaggctgcagaagtgatgtcaaagcacaattcagtaagaacagttctgtaagtaactaaaatcttgtagtccaagcatagcactctctgggtagggtcagcctgaataaaggataacttttcatgttaattgtgctaccaggcttttgttaggattgggcaacagacaattatttacaggttgttgatatattgcctattacatcttggaaaactagtgaggcctagaatagggtaatccttttatgaaatggtgaactgcccaactcacaccagtgtgccattaggtttggatccattcccctcttaacacacaaatgataacataggacggtttatcttttaaaaaaatcatctctttgtcttttgaagtacatttttccatttgttcttccaactactgatttaaaaattcttcagaatgttttctgtttccctggctagaacttagtccagcatattatctaaaaatttggatgagcctttgacttcctgatagtgtaacagaatcctctaaatacacccagaaatctacactgatgtttctaatgttatagattatctcgttggttagaatttttaatggattatcttggtgctttatgctttttatttcaataataggtgttggtggacagatggtccacgagaaagtggggccagttattaacaagtttgtaggcttgattttatttttcttagacctgttcacatgtacgtaggtatatataaaaactgaggaaattactgctagaaagaactccatattccttttatttattaatggcaaaggcaggctgcttttctcatgaggaagttgctcatgaattttcattcaaaatagtaaattagtgtccacactttcatatgtttagagtggaaagggattgtacatgcaactgtgcatatcagattccatgtctggaaagctacattttattctttgatgatattatggttggagatataacaggcaccactattatatctcccttctgtgcttatatgacacatggagtagaggatgatgggaaattctgatctattattagtattttacttcagtaaaatacttaaactatatttttgcaagattttgttaccactcctttacgtgtcttttttgaaagccagaggcaaactttcctaggcaaataatgtgaacagcgaacacttagtgaatatttggggaaggaatcaatatgctaaagaagctaggaaaattggatcatttaatagaactcccaatatagacaggtggtatttcaggaaccagtctggtgtttttagatgtcctagtgtgaattaatattaagcatacaaaagatgtattcttaagtgccccaaaatacacacacacacacacacacacacacacacacacacacacacacacgattactcagccttaagtagaaaacctgtgaggacttttagtgttatatatttttttcaaccaataattgctctattttgatgatttcttaatttggttgtctgttttcatcaaaattccttagtgagcccagttgaaacctcatatattcacacacacacacctcccattgatttcacttgggtgaaactttatcgtttaagcaaagtttaagttgaaatgttgagttaatgatgctcactttaaataccaaaggctgaatgcatttatgtattcaaacacttagctagtcaaatataactcccatcagggtttagaggaaggattatttcttaaactatgctggcctcacaagtaatatattaccatcaaatctgcagaaaaatgatactaaataaggttgttagtatttttttatttataaaagccctggaatcttttttaaccttaaataaggcaaagtaaaatggtgggtaagatgttatgaaatacttagagcaattacccatagtgcttcaacccaaacttaaaaataaacactaaagaaaaatttcgcacatctatttctctatagccttgtctgtttagatgcttaaactataaaacaaatacatttatagttctatatttgtctaagaaaaactgacttcaagttagaagactttttctccccataacatgattaagctacctacatcagaatgtccaactcctttattgtgaacccatttaagatcaagtgtatggcaagttaaataagaaatatcaaaaagaatacattttggttaaatgtttgctttataacactttcatagagtatatatgagtttgctttataacactttcatagaaaatgtaacatattcatagagtattacaatggtatcctaacaggccttttaacatctaggagctcacaaatgagagtgaatgcattgacataaacccaagcataattacaaagaaaattttatgaggaaagtccctccaaaagggactcatagttcttatatttgtattcctataagattataagctactcaccacaattttaatcacctctctcccttcaaaagagagagatgagagcagttgtcatgagaaattcaagagaagatcctggttctgaattcagctgatagaatcagcatattctccaagggaatatagaactgttaactagttctcccctacccttgataaattcatttgttcatgatcttctctgttttcctgcagagtagctggagcttttcctggagcacattgtcttttataaaatcactcaaaaaacacacctttgcagctaatataaatgtaagaaagtgaactctttccttacttaagaagtttcctataatactggggacattaaattgtggtcatttcagaatctttcaaaagcacctacaaagaaattcaataatttatttctgatttgccactgtttttttttgagacagagtcttgctgtgtcgcccaggctggagtacaatgccatgacctcagctcactgcaacctttgcctcctgggttcaagcaattcacctgcctcagcctcccaagtagctgggtctacaagcatgtgccaccatgcctggctgatttttgtatttttaatagagacggggtttcaccatgttggccaggctagtctcaaactcctgacctcaggtgatctatctgcctgggcctcccaaagtgctgggattacaggtgtgagccactgtgcctggctttgatttgccactgttatatgtttgatttcactaaatgtggaaaaatctcaggtcttttccaacttgtggattaacacatggccaagaatctgaaatcaggcacaaatacttttaagaaaaaagtttttgtcttctgttttgagactttgtgagaatttgttgtttagcacattggtgctcattgggtaccaatgaaacaaaatgtggtaccaaggcatttactgtatctaacaaatcaagtatcaagtctaaatattctcagctaggatgaaaacaaactagactggataaagggtgagtatctgtattaggttcatttgctacttgcaggtctccagtgtagactgtttgagaaaaagtcttaagtgacttttgttcgaaggcccatgataaggagaataatagaaggaaacagttcaatagatataaatgcatgctaaaaagccagtgaaaaaattcccatgcttcagaacattttattattttatatattttttaatttatttgaaaactattcattaataattttcatgttcataaacctttatctttcactataaaaagaggaggaggtgaaaggaaggggaaggcaattaacattgatttaacatctactacatataatcattttaagtaagtgaatttaccattttaatatagtaaaaacaaaatctcacgtaaagaatgagtaaagcagcctgttcatgttgcactggttgtattggtattggtctttggcgatgagatactgttgtgtctgctgacacatgctgcttttctgaattcattcttgccccactgaaggtttttgttttctttatctagattcatttatcatcattcaccagggactatgctggacactgaggatgcaaagataataaatttatctcttgcccttgaatttcttagtcataatcaaaatttctttttcagtggtgcacatgtatgaaaaagaaacaagcttctttcttttgtcttgccaattgatcatttttatgaggcaccctacactcacactttcctagaaaagcaagaaaaatacttgctttaagatcagagttcaggctcttagacacattatagcctctctaataaattaacattctctttaggaaatactctcttgggatcaatactctgtttttcagattttctatttgtctccattcttttctccaagatgacatctgagcatatagggatttacatgatcttgtaattctggggtgcagtggagtcccctggcttaacacagtgcttaggtacagtctggctgggcttattgaaatgggtcttgtcaaggatattatgaggcttcctcccacagagggctgtagctggtctagcttatgttgttacctcttggcttggtcagggaccggtggtatttcttgctgactaagcctcaactcagccctcactgaccctgccaactctctgtggtctggattgagaggcccacctggctctccttttgttggggagaggccgtcattgtgcctttgttgtcatggcaatgcctctgtcaagttcaccagctgacctctcaagaaccctggagtctcttcttgggagaatgagagaacaacagagcaaagagaattctaaccgaagatctctctctgtctacaacatccccactccaggttattgtggggacaatatatgaggcaatttcctcgcagagttctgacctggaaatgaagttgacatccttatgctttgggcttttttctcaacctgtctcacatgcctcctttctaggtcttaggccaggagagaggagaacacacatctgagcacctgctcctcctgccttattttttattctccaaatcctctgacgtggaaagggtgagctttctcttcctttcccctttgctttaataatcccttgaatcagatactcttctaattttgtgggtggcattccactttttctgtctgtatgattaaaatataggagggtgcaaggagagagaaatagcgactgtaattcaggaagtatttctaaatggttatacctctcaaggaaatgtttattagttattccttattagtcacagagtcaataaagaaaaccagatggtttattttttatttgtctcttttatagtggtcgggttttgttttgttttagtctttcgaaatgggatactagttcagatttcacatatatgctggaggtctttgctactcagaaagtgtggtccatggggccaggcgcggtggctcatgcctgtaatcccagcactttgggaggccgaggtgggcggatcatgaggtcaggagatcgacaccatcctggctaacaaggtgaaaccccttctccaccaaaaatacaaaaaattagccgagcgtggtggtgggcgcctgtagtcccagctactcgggaggctgaggcaggagaatggtgtgaacccgggaggtggagcttgcagtaggcagagattgtgccactgcacttcagcctggataacagagtgagactccgtctcaaaaaaaaaaaaaaaaaagtgtggtccatggaccagcagtgttgccaacacttgttagaaatgaagaatctcaagccccaccctagaacagttactgaatcaatatcttcataacaagatgatcagtttcaccgtatgtgcattgtagtttcagaaacactgctctaggccaccatagccttactaaaggttttaactacatcaactataaccgtcattggcatccagtaaacatttattaataaactccacatgttagccaatgttgatgcttgcccttgggtgcttatagttctaatcaaggatctttatagttatgataaagtaattaaaataaaataggcaatcctagatctattcccccccaccccatcaccaggcacaccttaagttttttgacagatctattaagattaaattataagttattaaaagtggattttcattttcacggaaagcagtcgtttaatgtacagagacaagaacaggtagtaataaaatactcaactgaaaaattcagattcatacctgaggctgctgcctcattagtactgatagggttttgctcagttacaatttcacaagactgtaggatttcttttagtggggtgattttgaggggtaaaggacaaagtcatagtttttcattctgtactttcattttcagatcacagtgttttagaagaatctgggctttacttattcaccaggctttcaatagagaatcacattaatccttttaagctccttattctaatgatttattttgttgaaaaccatagtgatcctcctttgaattttaatgattgctggctattcaaagattcattgttttgacttcctgtccttacctttgtttcctacatgtctgtggggaacacctgtctaatactggatctgccactggttctcactggcttaccagagtcactcaagcctatctctgagtgttaagctgaaatgctgactactcatccataacaataaatgtaggatatatgtttgcagagataggcagatagacagcagagggacagataaatgattgagtgatgtcccagtgaaaacagtattttggatctgatagtatatatcaatatatttggagctgatagtgatccttatacagaaattagttaaattgttattcttaatcataaatctattaggaagtaatatctgtagaatatctagtagaggggaaaggggttcaaattttgagagtgctgttcttacccaaaattcaggaccatgtaaccttctacaagtcactgactctctatttctcagtctattaaatggcagtgctcttttttaaggatgcagtggtgatctttttgttcaagtgctgcaaatcctcagaaagggttagcaaatggaaatagccataacgtgtctcaggtatgagcattggaattgcatattacgttttcacaatctaagaggtggctgtgtcgcaggtttgagtttctattttgcccactgtgtaacaacatagaaattttctcttctctttttgtagataacactagaaacatcatgggttttcaagaatatattattctaatataagattttaacaactacactgtatttatgcatactacattttgtgccttatcttcaggcttctggactttgattcagaatatcaggagctctgggattggctgattgacatggagtcccttgtgatggacagccacgacctgatgatgtcagaggagcagcagcagcatctttacaaggttagagctacccttcctgcctttaccttgctgtggaagatctgattagcctgacaagtctctctctctctctcaggatatcttttcgttcattgtatgtatcatggtgtctattagaattcccttccctgtccccaaactcatttccatcccttgtgtgctgacaggctgcaccgacatcataattgcaagaaagttccctttatcacattctatttgctgtaattctatagaaggacaaagatttatcttcaagatgaatagcaataaatgaaactgcattcataaatagactgaaacaaaatgaaggataaatggactagtaatgtttaacaaaacgtggtacgattggagcactcaggtggattctatctacccctcagatcttcccagggaaaaaagaaatttgcctttggtttggcttgctgctgccaaagtacaggcctcatccaatttaatgtttattagtgatacatagagcagacgttgtcatattaagtcaatacatttccatgtgatttaagaaaactggcttgaaactcatgtattgattgtaggcaatccatctaataactatctatattgttttccatgtttgctaattcacccttaacctactgtattttaccaattctacttaaatagtcttagcagttcttataaagcaatcatgtgattttgcctaaaaaaaaaaaaaatggttgcaggattcacagtgcctgcaaaagctgtcagggggagggaagagggactttccactgaaatatcagactgcagtaaatcttcctcatttaggcaatttttattggagtaattctgacagttgtcatccttgaattgctttgagcatatggcatatttcaaagagcagattgtgaatcataaaaaataaaattaataactaaccacagaatcagcaacagtataatgacaagaaacaactaccttctagtttttaaaaatttcttatagaataagaagtacattcaaggtcaaataaaagttgccttctttcttcttcaatggtatcattttaaattaccgttctttaataaatgattttaacttttacctcctctaaagagagatatttgtacttttcaagggtctggttgactttaattagtgtcccctaggaatcatctcagttaagagaagatataagctccccagggacccagcaaatggggacattttattctctaaagaatgcagtccaaccttaattgagtttgttgactgttagctgtttcctgtatgggtagctgtccacattaacaacacagctatctaatatatcttctggcataacatattgttacagtaacagtctcaacctaatttaacaaaaactagatgacttcacatttcacatcaggatcaggaattacatatgaaaacgtgcatataaatctctattaatttagtgatagaaaaatattttatccctaagacttaagtattaagaattgagccaaatgggaaaaatataaaaggttacctaaccataagccattatctcggactttattgcactcatgatgccaaataatatttcttttcttcttgatgcattttttattttgcacataagccactattttttcagaaacagtgctattctttgtcaaaatcacattcatataatttacatcacaattaataggaaatcattgaacaaaaatgcagtcttcttttttcttgcagtttccttataagtgctttgcctgaaaattcccattctggcatattgaaggccattattccacccactcagaacttctgggttatagtatttttccaaacattttctgtactgtgatttttcatttgtgactcacgtcctgtcaccattcttctgcttttaggtgcttaacatagctctgctcattagaccagcactaactttacatttggcttataagcaaaattaaagattgagttagaaaccagtagaaaatgctgctagtctgtagggtctttctttatgtgcactcccaaattattccagaggcttggaagcctccagaataaccctgaggatattgactgaggagtcatgtagaacttcaggtggctcctaaattagaaaaattgatgagaagaattaatttcatgtcttctcaagaatcctcagggatttccaggttaagtcaacattttcaatatcctattcctctgttctaatctgcttttccaggaatcaactgaactgatgccttgagaaaggggtatttatggtctgttgatcatagagacccctgaaggagtaaagcttttcaattggtgcccaggccttgccaggttttaaatacaatttgagactaccttatttatctctaatctttgtatttgttgaccccaaaagataccagtgctttattaaccttttttattaagggcaccattgacatttagggcgaaacaatttttttttagtttgtgggcctgtcttttacactacagaacatttactcttcatgttccccactcattgtgacaactcaacgagacctcccaacccattttacagcatttcccagtccatctcaacatatctataccatctttgtttcttaaaatacttatataacaacaaggaaaatgccttaaacttgtactgtaaacgttattgaacaaacactttatatagctgatattgaaccaacagttgtgagtttaaaaatcaaggatgaaaatgaagctcatcatccctagtattaacgaaaaggatgaggtgaaacttttaagggagatcttcagctgagtgatggcaaaaatcctaggaaactgtagagcaggaccgaatctttattccttctattagagcatttaaaacctttgttcttctctccctgggtgtctctctgtatttcatcactcaacccctttcctggagtatttatgcccaaaccctgactcatgcacttatgaagtcctaggttgatccccaaggtatgtgtttagaaatgtcaggttagataaaatctaataagatgctagtcagtgagagtgaagcttatttagctttttcaacattaggcattaccttcctgactttacctatatatttttatatcctgatttgcactagaaaatcagctagccttacctcctaaacatgaaactacagattgtatgaaatacagaaaccctagactatccactcagcagatatcctgagtacagcatctattgtgatatttaggctaatccaaagccagcaaaatacacaaggaatttataaagacaaataattggatttaatgggcaaagactacattagtacaacttaacatcattcagaaaccttaattaatactgcaatgggctataaagtggactttctatttgaactatttcttgttatttttatattgttagaaatttaagatcattttttgagttaattttaaactgcagtctcaagagcaacctaattcctattaaaaactaaccattcccttaaatgtactttcttctttgttttgagacagtgagttatactgccaatgacttcccttcccccttatctgtcttgctctacctctgaataggagccttctatatctattttctaatgaacattggcaatatcgtcagcctagaaaacacaaatgtagtcttttctcattttttcttcctcaacctgagaattacctcgaaggagaatttgcacccactctctcactttctttctcgtcattcctcctctcttcctaagtaggacaatttaatttgtcaaaagtaaccactatgattttgaaagttcagctcctatttggactagagttacgacgccagaattcataatcacagggagctgtcactctgctggtctgcatgtgcattaactattaatggagaaatatttaaaacccacttgtgaaggaaaagctccattttttcatttctacagatcaaaggtggcattattcttgggcttggggaagctcatgacacctcctcccccattctctaagtgttatagactgagtgacctagaagcatttcaacgtttagagagttatagctcagactgctgctgttgctgctgcactgtcctccccagcaggtacagctgacattgtagtatggtgagggtgtgccctatcagaggctccttacctatgcacaaaggactgccagttcgctgctacctacagagcacagatgacagatctcctagtgatccgaagttggtctggaattccagactccaagggttaatttcaagggccaaattcagaagttgcagcctggtgattattgttataattaaacaagagttttcagatagtatgaagctcactgaaacaccccacttatatatttgttccttgaacgatagcttacctgctcctcatcaataaaatattagattatagtcatgggctgcataacaagatttttggcctttgaaggactacatatgcaatggttatcccataagattataatactatatttttactataccttttctatatttatgtacacaaatacttaccattgtgttacggttgcctacagtattcagtatagtaacatgctgtacaggtttgtagcctaggagcaataggctctaccgtatagccaagatgtgtaatagtctctaccatctactctatcatctaggtttatctaagtacactctaggatgttcacacagtgacaaaatcatgaaacactgcttgaatggagaccagaaagtgaggtggggagaaagggagagattatagcagggatatacatttctcagaacataccccgttgttaagcaacatgatttgtacatgatttataaagggttaaaaataactcttccagcttaaaaatactactaaataagtatccaattcaactgagatctttgtactttcagagaatttatactaaagattttgtacttaattttgtaggttagttactcatatggcttcattcatataagtccaaacatgtcctctgtgtaaaaggaaaaggaccattcatttatataatacaatggctactaaacagatcaattacatttttaccctgctatgaatttggggttatttataagaatcaacatgaaaataatataaatattttaaaaacataaatacaaatcagactggagaaaatatacatagactagaagttgcatctgtaagaagagttaatatgcctgtatataaactgcaaagccctacacagttactaaaacatgatcccaatgttatattttgagtttcctggtagtgaaagcaaagagggaaatgtgtccagttgcaaaatgtatactttctataagaaaaagagataatacttcctttgaagaaattttgttttgatacttagatgtgaaaacattttcttttaggatttttttaaaatacaagggcttagaatggtatggtaaataaatttctaaccataataattattaaatataaatacgtgtggaatagaattagaaattctgaggaataggaaatatagagtacaagaagaagtatggaacatagttgacttgctattttataactattgatatcaaaatgatgtcatagatatgaactaatctcagaaaacagattaatcacactattcctgtatttcataaattcacacatttcagctttctggaatagctctcttttattttgttctggaccaaattgatctaactaatttccgatgtgatttgatattcttatgactaaacttgagcccctaaaagtgtaatgttaggttggttcatggtccaggtcacagtagctaaacttgaaatagaagacaattcattaactttttaaaaaaaaattcacatggtggtgtacagaatagaaggacgagtcaaaaaattaaattctgttaattaggccttatattggaatttcagtgttgaatgttacatctctaccctgatgttcaaaatgaaacaaattacagttattgaagcagtcaaggtaaaaatgttctagatatatcaggcacaagaatttaatggtaattttttacctcttttcctggtagattaattgtatagcttaatagtatgttagattaaaactccattaagataagaagaatatgcttaaattcattataatatttcaaataacattatctagtcatttaaaaagtgatcagaatggaaagatctagactgtctccactgcttatctagaaatgaatttgttgtttcatttttattaaagtttgaaaagtccttagattaactgtcatattaatttgagctttgatgaatcagtgtttgctatgaatacttgaatatattttttttccttttttttttctttttttgagagagggcaaaacttatcctgaaaatgtttaggggaagaaaaagtagatgaatgtggtttctcaacaatgtttgaaacactgttcatgctggagcctgtaattcctatttgaatcacttctttaaaaagaaaaaaaaaaagatgttaagagaataggatgccaagaaatagttggctgtgtgtgtggaggggcaaggaagggaagccccgccagcagtttttgtctctagcgggtgagctactgtccggaaggtgcgttggctctctgggctggcctctgaggcattgtgctgctccctctctccctggcctggctggctctggcctagagtggatcaaacgagccgtggggaaagttcccctcatttgcatcacttctagacagccctgtcgtactctttgctgacaggaaatcactgtctttgtcaccttttctcagggccctccttttggcagagatgggccatgtgaccacgcttaatcacaacagggctggctcaggactcaatgacatgttttcctcagcacttcaataaatggggtacaggagtcagtaggaaatgagtacattaattttagagtgaaaagataattaacacttgaaggactaatgctacaacctatggaattattattcaaattgaagttaatttatcaaaaacttgtgaaaactatctgccctaatgcaactgtttaaaaaaataaaacttgaatagtaagagttgggcatgttggaggcagagtgggaagaaggcggggagaggggggcttggatggagagtggagagtgaggggagagaaagggagagagggaaatcatagcaggcattagctatgtttgaaaaagcaacttaaatgggctaaaacttcaacatttgggactgaaggctggagcacgtaaaacgcttacttagatgatatgaataggacactggcaaacaaaagcagcagtgtgctcctagaaaactgtgcttaaaggagtttccttggcaacagaaatgcagttccaaaagtagacagaactttcctcagaaaacatactattaataacaaccttccggaacaacttggaacaatttgacgacttggcaataataatgccaagtgttctgcaaattaatctaacacataacagttatgtttctcttgcctgtaattctgctggaccctacctagaactcatgcttttagcagcacaaatgtgaaaaatatttctaaatgctgtcacggaaaaagaaaaccaaaagaaatgctagtggccaacagtggccaatgattgtattcagccttttggaatctactaagaactctgagttcaatgagataagtttattccaataaatgctcctatatttactatctcatttcagtaaagaggcttccacagacaaaacttggtaaagggttaacagtctgagacttgctgtgatgtgaagcacatctgaggccgttggttatgtaaatgtaatgctcactaaatatgtgctgagtgttattttttaaagtatcatcatttcttgttagcctagagaataaactaatcttggatgtacttggccaacgggaatcatttgaattctcctgaaggctatccgtttgccagccaagagaggtagagtattcccctcctctgacctttcttgaatccttggatctaaaggttaaaagtaatcaatatctcattgtgctgcttggtttcagggtaataagtaataaccatcatgttaaaatccaaatgattacagatagcccttaaattagttgacctgtttgggagattttattacttccaatcaggataataattagagtttgctaataaaattttggattaagttgcaaaaaatttcagcctttaattttttgaaaaatgacttttacttaattagatgggaatgcgtagtattccctcttttgttaagctgatagcttttgctttagccccagatatttgtagatttctttctagtttctagaaaagaaagtagaggaacatttaaatttctgataagaaaaggtttttggatcactgccatctttggctcctgaactactcaaaactatgtatatgtttcaggttagtgacttcatagcagtgaccctcacctactttttagcatgtcctgtttttaaattacttatctttagtggttatattcatattggggctaatctggtttgaggctggcaaaaaattatatgatgtatgattaaactttacagacagctatggtatgaatggggttatttattttgtttaaaaaaagagtatcaaaatttaaagatgaaaaccaaatattatcattgacaaagaggtattaatataaaaaagataaatgataggcttaatgttccatgtaattacatcaggaaggcattggttatcataattataaccacaaggaaatgtataaggtacatatgctatttggtctaaataatttgtcttttatcatcgttctagtttttatagtttattagaacttcttgaatgtattcctaaagcaggaatgtggggctaaaaggtacctaggtaacgtttcagttatttcaaaagaagtcctggtacctgttcagaatagatggtaaggcgcaagggaaaagttttcccatagtgctttcacattaaactcattaacttcctttatgtccgtatctcataacattgtctaactttggaaagaagcacatttgtggttgtcctagggatatcaatttggagtattagggaattctccaacccagctagctgcattaccaactgaccatactgcctttaatcccattcttaagattcatttctttggggtaaagaagaatgcactctactgaatgcagatattctgtggggaaggcgcaggagaatgatattgaattaaatatcaattttaatatctagctaaaatagaaaggcattgggaagggaagagagtgggtagagagaagaaatccagaaaagggaacaaaaacagatgttatcttcttcaacatttgataaaaagagaagtgtgtttatgtgtatgtatatgtgagtgtgtttttctggtattgagatgggtgtaggatagagggagaaagaaacttatcaaatagtaagattttactaataaatttgattgtgtcagtgccccattcacattatcttatttaatgctcacagggatcttgattattttccttaattcatagaccctgagccaaaaacataaagaggttaggaagctagcctaaaaaggcacagaacttgtcccttagtcaggctaggctagggtatgccaagataacaaatatgccccaaatctcagaggcttaaagctgcaaagatttatttctcatgcatactacatgtccatcacatgttggctattggctctgcttggcattgtcctcactcttagacttaggctaatggcacagccaccgtcttaaatattcccttactatggtagagagaaaagggagctctagcgggtctcactctggccattaagccttctacctggaagaaacacatgtcagttccactcaaaattttttggccagaactaattgcatggccacaaccaacttcaaagtagatgggggaaatgcagccctaccatgtgcctgaaatgcagaaagctagaaatatttgtggagctgtgctaataactaccacaagaactaagtaagttgggatttgaacccaatctgggtggctccaatgctcatggtcttttgctcgcctgctcattgttgccccatatcatcttctctacaacaggtagattcttgcaagaacgttatttcctccctctgtatgaactttttgtgctaagatagaagaaagaaatgttagaaggtatatctgcaaagaaaagatgatagacttgggttggctctttagctaatcatcaggctgttctgtgaaagcccccaaatgttcttaagcacctcaataccctggggaagtattgccatgctgagcctcactggggcctcctgcattttgttagattcaggaaagctaaggatgaaaacatttatgctttttgggagatgcactaaaggcagcattgccctcagatgattcaacctcctggatcccgttatgccaaaggaagttactaaaggagggtccccatggagagatgctctataggaatatcatttgcagaaaaaccattttgcagtcctgttgaggaagcaatttcagttctcagaaacaagagccttcctaagcatatttttaataatgtgggcttttgtgaaactcatacattcttaaactaagcacttctgtgacactctatccctaatgaggcacactggggtaagcaaagaaggaaggagtggtcttcctgctgaaccttgattcatttacataagacacaaaacacacaaacacactacacacacatgcaagctaggaaagaaacaaccaggctaatgctcttatggcctttgggttgatttcaatttcacttctaaagtttctcaaaccacagagctctagcctttctccagaaggatagctataccctactgaaactcatctaaacttactatttcagctgctttcctaagtagttgattccatatgcttatagacatttacataaagaaaatgtgtgaattttaatatcccccttgtcatctcattttagccttaaaaactgggaagtctgtggaggaagtacacacacataaaatgtgtttattcacatacatttatgtgtgtatacatatatacacgtatacaaagtattaacttatttaatttaaaaaaatctttcaccaagattgaatttgaatgaaaccagattccttgaatcagatatgctatagtcccaagacatttaaatcatgcatatataaataactgtacaaaattccttcatatatgccaagtttcagtctggagcacatttccatgttacaaatcttggcatattggattttacaaccttcattacaacagtattatcccttttagtactcaaaagtgcctccctgtgaaagttcttcttggggattattcagctgtgaatacttgtttattagtgaaatgcatattttaaaataatgatcataaatatggacttagtaggccaaatttgagaatgattgattatattttttgttagacttcacactccacgtggaggattcgtgttatttattgattatttattaatgtatctccagtgccaagcacagtgcctggcacataatagaaactcaataaatatatgttgaaacacatattttcaacaaggcttattcaatagttaattaaactctattaatcagaactatgctatcaattcattactttttcaacaaaacagtctatttttatgctgtgataattgaatgtaaaactttatgttcttttatatataaaacaaaaatttctctcctggcaaaaccaaagtgcagtaaagacagttcctaataccaagagtactcaggcttggccaggttgatatcagggagaaagagaaagtagtagggaaagaataaggcagagaggaagggaaggacaaagacacccatgtctgagacataaatggtacagaaatccacaactaatcaccataattctatggctagtctccagcctctcaaaccatagtattctctggtgtattcttgaatatttagatacatacgggtatgattatttatacatgtgaaggtaacatgtgctgtgcaaatgtgaaacctaaaaatcagacaatagatgtaggtgaatatcaacagtaattagaaatggtaggtatagaagcacaatttgtacttgtaccatagttggcaggagagtttattgacatattcattgcagaaaattagatacgacttcagatgagtgtgtgcttccgaaaatgtcgtcagtaagggagtgaggaaaacaagaagggacttagacttgggctggctctttagtccaagtttatgatgagagggagagacatgtgcacatgtgagagaaagagagagagagagaatgagcaagagagagaaagagagagagtaaaagagtgacttatcttcccaaagccgtagctagctaattcagaatatggaaatttaaaaattaaatgtcactgctctaataccaggagagggctgaaacacttttgaaactttctcccacattttcatttttaaaaagtattatactattcataattttaagaaataatcatatatggccattagtcatttttttttacttagtgattaattgtgaactttaatgattttaaacaattaagaaaatgttacaagatgcatcatttcaaattagcatctgacagatttgtaatcacttcacttcttggccctctttgtgtccaccttgacatccttttgggtttactgttttcccactgaactttgtccttcctccttagctttcctcagctgacatgctgcagtttgaaaatatgcatgataaacattcctgtctgtatgatttttccctcctcttcctcactctcatctgcctggtggtactaaagacccattctgtgaagtaatgtcttataaaccaggagccaaaatcctcatgttaacttaagtataaatgagtctctagggttaagctaattgaaatattttctgtaacttggaaataccgcaaaagaattcaaatttggctagcatcttataatccaagttttgatgatagtttcactaggctccatccgtccaagtttgggttagaaaaagaaataaagtatggaaacactgtcagaagccttttctgtttacaaaaagatccagggataccatgagtaatgccagaaatctcatgtgacagccagctcttgtgggagttttgagctcaccaagttcaggaaatagttccagaaagctgattggagcattggagcacaacgatttttttttttaatctgaagtgaataattgtgttccccgtctgctgtccacactgctgctcagaactataccctggtggggtggacatctccccagtgctaggtaatatttggcactcagtaaatactttctgatttgaatcacctacttaatgattcttctcctgaatattccaaagttgatctctaagagattttgtacagttatttagttccatggaaagtgagaatttcagtggtgttccaggactgcaagtaccttgaaaagaccttcatttcattccttctctttcaaggattgtttttatccattccatataggagagaatttgtcctccattaaagatctttccagagggaattccacagccttccattaaaatgtttaactctccctttcctgaaagtcttcttatttctagtgtaaatcctctctgttggtggtattaattgtcaaatcagccagaatccatgctctgtaactagctcttctgttttctgtatagtcacatttctcaagcttttgcagtttcaagttagaaaattttttggtgctcaaaactggttggtgaaaaaaatttttttaagtcatttatttcagttttgtctacactccatctaactgaaaccacttccatcctcttttgtagcagaaaatatgctaatattgaaagactgctggtaaatccatatatctgagaggctttaacaagctccatggatttctccatcaggtttttcaactatctcttattaacagttaataaaatagttcatggatggtttggaagacgactgtagcttttctgagatggtatgacttacagtatatgcctttaaaaaaatttaaaaagaaaaagaacatgacataaaaaatggacccaaaaaaaaaaaaacctcttccatttagggacagagctacttcttctcccagtggatgcgtaatatattatttatgtcggagtgagcattgtgtttttggctcacattccatttggagcatacacaatatgacagtttccttggcttattgttgtatatgtggctatctatttttaatacattgcttttgtctctttttcatgcttgcttacatctgttgttatgaaaactgacataaagtttttaaacataaaagaagtgatggagaaaaagatgttaagagacacacaacatttcaagggaacatgaggtggagaaacaggagcagagtcactactgagggaaaccgaaagcagcctctgcaagataaatgggagggaggttgagaacaagggtgcgcaatcacagaggaaaaaaaacagccatggcgctacacaaagcgtttctaatgaatgaggcttagtgccttttcctccagatcattgaaacattttaggcttccgttgttaaacgtaggaagtagggataataacacctaccttgaaagattgttgttaggattctatgaagtaatgtatataggggcttcacctggtccttggtaaatagtatgtgctcaaaagataaaacagaatcggggctgacaactatgacctgcaggtcacatgcagcctaccactcatttttaaaagaaagttttgttggaacactgccaggcacattcatttatgaaatatctatatctgcttttacgcaatggtagagttgagtagcatgaacagtgaccatgtggccagcatgcctaaactatttactatctgcctccttacagaaaatgtttgctaatccctggtataaataataactattatggcaacgctttaggaatatccattattgtacagacttgaatggtttcccaattcaattttctatctgctatattgcagtaatatctgttgattatgatcctcttgccccaggttctaattttccttttgtaacaacccaaactctgttttgcttgcttttcagtgtaacattaaatgattaattggttcatgtcaccaccaggtggcctcctatactctgttgtgcttctggtaaccaaagaaaatcagaaagtggatcctatacatttctttcaactgtggttgtcactgtgctcacaggcacttctctggcggcttgactgctctgaaattgttcattgaaccctacacttcatgtttggccttgaaacataaatagattcacacggacctttttataaaatgaattaatgcttttaaatgcatacacacacacatacaccaaaatggatttttaataaagaagcttggttgtcactaatagcttcgccatgattcagtcccactctcataggtatacagagttaactgatcttgaagcttcctcaggaaaagacaaaggccaaagaggctcagatctctatatgttaatttcccttgaagggaatggatggacctcatctcagtgccccagtttatgttattttattctatagatccccctttgagctttctttgatcttatttttaagcttcactaaagaccagtgttagcaaaggaagattgagaagccatgtgataaagccctggagaaggaggccagattcccctcgggcaattattcttatcctctcaggcctcattttcttcatctgtaaagtgaggggggtggactcagtgtctctcaggtccattccaacttcagtattttctctttggtgaaaaaaatcaaagattacttcaattagtaattgactttgcctataagcaattggacaaaatcagaattttaagacttaatttcacaggctaaaagaacaaactcatgggtaaatataatacaggcatacctaagagatattgcaagttcaggtccataccaccataataaggcaaatatcataataaagcaagtcacgtgaatcttttggtttcgcagtgcatataaaagttgcgtttacactatactgtaggctgttaagtgtgcaatagcattatgtctaaaaatgtacttaatttaaaaaaattttattgcaaaaagatcctaaagatcatctgagccttcagcaagtcataatctttttgctggtgaaggtcttgcctcagtgttgatggctaccgactaatctgggtggtggttgctgaaagttggggtggctgcggcaatttcttaaaataaggcaatgaagtttgccacattaattggctctttcacaaaggatttctctgtaccatacaatgccgtttgatagcattttacccacagtagaacttctttcaaaattggagttaatcctctcaaaccctgccgctgctttatcaactaagcttatgtaatattctaaatcctttgttgtcatttcaacagtgttcacagcattctcaacagcagtaaattccatctcaagaaactactatctttgcttattcttcagaaggaacacatcatttgttcaagttttatcttgcgattgcagcaactctgtcacatcttcaggctctacctccaattctagttctcttgctatttccaccacatctgctattacttcctccactgaagtgttgaacccctcagtcatccataagggttggaatcaacttcttccaaactcctgttaatgttgatattttgatctcctcctatgaatttcaaatgttgttaatggcatctagaatggtgaagccttttcagaaggttttcaatggactttgtccagatccatcagaggaatcactatctatggcagctatagccgtacaaaatgtatttcttaaataagacaacttgaaagtcaagattacaccttgatccatgggccacagaatgaatgttgtgttaataggcatgaaaacagtagtaatctccttgtacatctccatcagagctcttgggtgacccagtgcattgtcaacgagcagtaatattttgaaaggaatcttttattctgagccataggtccccacaatgggcttaaaatatatagtaaactgtgctgtaaacagataaactgtcatccaggctttgttgttccactgatagagcacaggcagagtagagttagcataattcttaagggccctaggattttcaggataggaaatgagcactggcttcaactcaacgtcatcaacagctttagcctctcacaagagggtcagccgttcctttgaagctttgaagctaggcattgacttctcctctctagccatgaaagtcctagatggcattttttttttccagtagagggctgttttgtctacactgaaaaatctgttatttcgtgtggccacctttatcaatgatcttagctagatcttctggagaacttgctgcagcttctccatcagcacttgctgcttcaccttgcacttttatgttatggagatggtgtctttccttaaacctcatgaaccaacctctgttagtgtccaacatttcttctgcagcttcctcacctctcttagccttcatagaattaaaatgagttagggccttcctctgaattaggtttggcttgagggaatgttgtggctggtttgatcttctatctagaccactaaaactttttccctatcagcaataaggctgttttactttcttttcatttatgtgctcactggagtagcacttttaatctccttcaagaacttttcttttgcattcacaacttggctaactggcacaagaggcctcgttttcagactatctcagctttttacctgaattgctcacaaagcttagctatttctagcttttcatttagagtgactctttctttcacttgagtacttagaggccattgtaggattattacttggccgcatttcaatattgttgtgtctcaaggaataggaaggtctgaggaacagagagaactgctggtgggtggagcaatgagaacatacacagcacttacggattaagttcacagtcttatatgggtgtggtttgtggtgcctcaaaacaattacaatagtaacatcaaagatcactggtcacagatcatcataacagataaaataataatgaaaaatttgaaatattgaccaaattactaaaatgtaacgcagagatacaaaatgagcacatgctatggaaaaattgtgccaatagccttgcttgacacagggttgtcacaaaccttccatttgtaaacattgtagtatctgtaaggcataataaaaccaagtatgcctgtattttttttaaagtaccataaaaagtgtataatttctaaatactacactgcttttggttcatttcagaccataaaaacataaatatatattttatgaaacttcttagacactttccttttccttttactttttttcagtggcagataacttccattggattctctgcagtgtcttttgctgcctgtaatggaaattcagctttctctttgacgtcttattttccacacattttaatttttctaccttcttctttaggcagaattaccaaatgcccctcagtttttttcacagcatggaacagatatattcacttacatttccattgaaactaagtcatttcataatatatgagcaaccttttcttaccttctgcttgtattgtggtacacacattggtagtttatacagtatttgaattgtcacattggatgtcatggcaaatatgactaaagacatttagctgtctatgaggaaaggacctgaatagtccctaaggcattttggtaaagaacagactcacgtttgaattcgaagtctacaccctgggagacctagtgacaggcaatcactctaatttcaaattccctactggggaggcttctctggagagctatatggtcgaaggcagattcatatttgcttgaggaaaaaatgattacaaatttttctaccttgcaaactgtactaattggtgtcaaattcaactaacaatttatgaagtttgcatcactttctgtgtgtttaagcacaaagacatttttcacctgaattctcttattttatcacatatattttgaaaattacatatgtccatctaatacatatatcaggaattaatggtctaattattttacttttacttaaaaggaataaggaatgatgttatctcattttagtgactgtgaggatgagacaataagaattcattaggatactatggtgtgctgtggagaaccaaataaagggaggttatccttttccttaagtaatttataatctacttagaaaagcaaaacgaaaaaacatgaaataatagcaaagatagcaaatttatgtggtatgaaaaataagtgctagtcttcttagaaagtcctcatggaataaatgatatttgaactgaaccttactggatagaatttaaataactggaatagagatagatgcattgcaaaataatgcattttagggggaaaaaaacctcagatctaggaaatagcttggcatgttcctaggattttaccaaaaacaggaagacaaactggagaagaggaaaatcagtgacaaaccatatagcttttatcccatgtgttcagtgaaagtcaataaaaggaaagattttttttaaaaattctagtgaattcctagattcaatgtttcatatagtgaagagaagttatatatacaaataaggaattagtggcataaaagagatgagaaaagttatgccagagatcatattttcttagcatgcaactctgcatgctaagaaaattttgaacaaacatttgtatatggtctttactatgtaacagaaattgttctaggatctttgcagatactggcttatccaatcctcacagcaacctaatgaagtattaacagtattctcaaatgagcaactaaggcacagggaagcacacagctagtaagcaatgcaagcaaagtttaaatatgggcagtctgattccaggcatatatttaatttttttaattttcttaatcaatagccttttatctcattgatttacaaattaaaatgtttggcatggtttctgtcaccatgtttatgtttaatcactcatgagcgattaaatggttacatatgtataggttttaagaagtagtattaataggtaatatcaacaagctccctcctcccttcattaagagtcaagaaaaatagtaaaactttgtcactgtatatatatatgcactgtatgtattacgtactatatcctattaggctggtgcaaaagtaattgggattttgccattgcttttaatggcaaaaaccacaattacatttagtatatactatagtatacactatgtatttagtatatgctatagtatacactatgtatttagtatatactacatatatactatatactatgtactctctctaaatatgtatatattcctgtcttttagaaaatacataatatatataattatatattatctacattatataatgtatattaattatatattatatggtatacattatctatctatctatctatctatctatctatctatctatctgtatttacctttctaatgacttcaccctgatgtgtgatttcttttactctctaatatggccaatctctaataacaatagttacaatacattatttctaagacagaaaataaaaaccatgggaaatttgcagtcttgctttcacatcggtagcaaaccaaaaaatcttattacaaaactcatctgtgttaaaatcaaagacttcttattaatggtgtattttatatcgggatctaaaatttcttacaagtatgatctatttacctcttaaaatacctgtgttagacaagtggcaaagatagctttgtccctgttttgcagatgggatgaccatggaaatatgaaatgactttccctggagcaggtggatcaggtggatcaggtggcaagccaccaagagaacaaaggcagaagtaacagttgcaggattgatggtgcccagtgaaggtgcttagggaaaattctcaaaaatcacatgttttggtactcacatcttcttgaaaagttatcccttgttgtggctataagctgtgctaaatggccacatccttgtacttctgcttcttttggttctaatatcctcttaatgaatttttttcagcctttatgcaaaatgtttaagtcatcaacatcatattctgtcatctgtttatttcagggaagccattcactaagaccttttctccagctgtaatttgcttccttttctgcaatgctgtttatttttatgtagtttttaggatttattccctgtagactaggaattgtttttcctatctggtgaaacctttgtaacttcccctatttacttattaactttctctccatgcatctatgcatctccatcattacattctccaaattttcacttcttcctcctctttacttttatcactcttgtctcttatcacacacacacacacacacacacacacattctgtttctcttcgatgtaagagaaacttctttgaatatttatagcagactcctttacatagctgaaaaagtgctcaaaagcagttataaccaaggtttgttctctatggtcttagtttataccaacaaatttccacttgtaccctagagcttctttaaactgtgaactgtcattcttctgagtgacaggcatgaccatcagtgagaactctcctatctgcccttttagcctcaacctcaggctattaaaaatctgttgggtttttgaggatgagcctacgccaaatgaatctggctaaagaggttcaagagtagggttcttaagtatgtgttggccactccattgtcactttgtatggcattcttgactttatttacattatactcttagggcccaccaatttcttcagacttctggactgagatctaaagatgtattttcaagagcagtagtatggcttaccaagctaagctgaaattcctcctgaaattctatttgtggattttagtacaatcttactgaccttgggcaagtcacttagcttctatgtatcaattttttatctgtaagacagaagtaatattactaactttccccatgggcttgccataggagaacagcaaaaaaaagaacaatccattgaaatgacagtcaagctttctgaggctgcagcagcagcgtttaagccttaaagcctaaaatctctaaaatttattttgtcaaaatatttttctgacaaatatgggtaggtacccaaaagaaacaaaaaggcccaaggggtcaggggatgggtagaacagaatggtttttaagcctgtagcatactggtatcggaactaaaaattagacttagcctttcgcattctgatcaaatgttcttgctatgagaaaacactgcctcataaaaggtgcccttaaaatattcaaagaactactgccaccttcctcttttctttgataggttttcacagaagcttttcttgtgttaaccgttcatggccatgataaacaattaactttgttcatggtttctgtctgaaaattgagaataatattcctgtattggatgtttcaccaaataagtttttcacagaaaatgaagctcaaagataaagcaatcacactgtactcatttctgtgtactaacactgtatctggcatatatttcaacagctctctatatctgcctggactttcttttgggagaaattcaaatgaataaatattttccaacaacctcctacatttaaaccataatgctaagaattacagtgggtaaagagtgaatgacatgtggtctctgacctcctacagtcccttgtagaagcttataatctaattctgaaaccatacttatcctcatctgaagtgaaggcaccagagatattcttaaaaagtagcataagaaatcagatattttcactatacagggatttgagcagtcaccaagaaaaactccatagcattatggatctgttaagattatagatgtgaaaaccctttgaaaattaaaaatactctgccaaaaaaaaagtcacaatgtgaatacataaaggtataatggcacttgcattgtgttttgggaacaggcaaccctggaaatgctttgatcagctctgtcttaacacctaccatcgcatggtaaattctgggtgcagcctctcagtgctggagtccttagtccttggggaatgcccatttgcatgaaacttgaaaagatagttttttgatgatgacagtaagggcgataatacattcagcctttatttaggcaactgattctcatagatttcaaaagtcaccatgttctgcagcaacacctttttgataaactacaatggttacagtgttctacttctcatttttcttcttatcctcagagagaaagcaagatatctctttgaggaaatatcaacagagttaacataagaaatatatagtttcttccttatgaaattaatttggcattatttttgaggtgtggagcatcttggcaactgctttggtttaaaactctatgtgatttgggaaaagcacgtttcagaatgtttaattcagtgatacaaaaggcactaatgaaatatgcatgtatgaattttatatcatattagttccctctttcttgaaatctgaataaaagccaaacatctggattatgtttgaaaagcctgaatttccaattttcagagagatccagtctattttgacattgcacacttagccttcacatttacagtgtgctattaacattacttgcaattgtagaaaaaaaaaagtccagatttaaacaaacttggtgcctcctaatgctaaaaataaatctatatttgaaatggctgctgctgctgcacaaccatacacatccatagttcaggcttcttcagcattttcattataaatacttgcactgaacaggcctataattcagctataaagatatgtggtaacctatgatacataaattctcctttgattgtatattaaaacaacaaacagcaattcatacatcacttagtttgagaaactattcactgactcaaggctttctgagggtctcaaatattcaagatactctgtggtcaactaaagaagacatagccaccatcttttaaagtttattcttcaaatttacaaggcaaataacatttatgtttttatagatatttgggtatattttagcatctagactaaaggcaagtgaatatttatggttttagtagcttagagatgtaaatatgcatatcattgctttatctcatttcattatcatagttaacttaggagatagatggtcaatcaagttttaggcaaatagtagtctgtccacacaagaggtcatggaagatagaagaatgtgactgttgtgtttgaagtttgcataatggtaattcttcagtggactttaatttactacacttaacttgttattggatttcttatagcacatattaggtaagtgttttcttttgttatgtttggagaacagctagaatcaaagatttttcttttccttttcatcttattttgtgttattagaaaattctaaattaagtagttgtgctgagtgcagtggcatgcacctgtagtcccagctacgtaggaggcttgaggcaagtggattacttgagcccaggaactcaaggctatagtgtgtgttcatcatgcctgtgaatagccaactgcactccagcctgggcaacacagcaagaacctgtctcaaaaaaaactttaaaaaattatgtagtagtgccaaattcaacagaaatagctgtgtttagaggtgtttgtttaggttgggaaatggaaaacaaaataaatgaaacttttacattggaaaccttttttaaaggagaaaactgagtttcattacattaattgctgcgcctcaagtcttttttccttcctacattgcatactctgacagatattacataattgcataactatttttactatgtgcagacatgacattacaacagccctgatatggtgcatcataatgaaaccataattagagtagtcatgatgtattatggcaatgatccacatcgtcactaaagtgcattggaatgcacagaaaaccctttgagatgtgtagattttcaatgtaatatagcacaactctgaagtttcatagcatggaggagaaattgcaattatgcccatgctgctggtagcaaggattaaaatgcacatcttcgatatctaccgaagaaagtctgtattgatgaaggaaatttttgagggtgatatttatcttgaagtttatgtcttttaaaaaaatttacaggaaggacgttgttgaaatatgaacctaaccacataaattctatagtagaagtctcctgtatttatcagataaaaagacttgaaagtttcattctgtacctcaaattcaatgaaacgcctctctaaagtaggatggattgaagacagttttagaattttcagttaaccctgccctttcttttggttctctgtagcccatcttagcttagattatacagcttacattttatgtggttgtgtctttgctccattgttgttctctcaggtttttctgcatgagaatcttgtttctgaatcttgttctagcgagtgacagcttcttcttaacttggtgattttcagtcttggcatttcttttacctgggataatgtaattgttatggctgatcttatgaatgtggatccaaagaagctcaactttctaaaacagagaggaaatttaggctctatctcccaggccaatcctcattcaatgcttcatttgcccataatatatcccagccaggtagacttctcatctctgcctgaacacctctgatgaatgggaacccactatctctcatgctgtgttcctactcaagcttcagcatttgacccccagtctgacctctgaggtcagatggaacaaattaatattttttatgcaaaagtcctctaaatattcaaaatcttctaacatgtccttcctctcttctttcacctctaacttttatttgccctcttagctgaatacctttagctcattcaacagcttgacccttggggaagtattgaatcttctcccttactgaagtgcttttttttggaacatttaatacattgtctaggtcccttttggaaaatggaatgcaagcagtacaaggttggggcctagcaaatcacagtcaaactaatatatccattacctttctttttttaaccctgtgtttttcttaattcaatccaaaatcatgtttcctttcaatatggacaggaagcagggaaatattgggtagaagagggcagggtccctggcaagggctccaccttcaagcctggaaccgcagccctaaatgagaacatgcattcctgttttcctgcccgaatgttgccttttccaaaaccaccctggcccaccacgccccctaccctgtacccgtaaaaaccccaagctccactggcagagcagagcagtgcagcacagaaggagagaagagaagtgtctgaatgttaagaggagttcggctggctggggacagagaggagttcagccagggatggccaaactctagggaaagattatcttctcactccatcgccttcccagctccccatcccagtgagagccacttccatcactcagtaaaatcttccacatacatcacctttccatccatttgtgtgacctaattcttcctggatgctggacaagaattcaggatgcaccgggtgcaggaacccaaaaaggctatcaagctgactcttcgctaagctgtttaacaccatccatggatggcaaatgctaaaagaacattgtttgtaacatgtgccctctgaggctccagaggttatgggcaacccctagatgctgccgcgggccagtgcagtgttttttcctgctgacacccaaagtcacttgccctggctcctgcacccgctcacctgcgggctccccctcctgcaaggggtttaactgcaagtggccgagtaaacgagccacacctctatcacaagtcttgtgaaggggtcaagggaactctcctgtctcacttttttaaaaatttacatctaccttctattgtctgttgactcacattgaacctaaaggcaagtgaagccttgttacctccattctttatgcagtttaaaactttttatcattttggagtgggggtagtggggtgaaatggggtggttattaactctgcctgactttacatttgtcatttctccttcttagatttaactcattatggcagcatgttttgttccttttagagtctattatcatctgaaatagatattataaagtagttgcctgcagattcatatccagagacatagtttgatctgtgtagtgttaaaaagttttaatgcaacatagaacaattttgagacttcacataatatatatatgtgtgcgtatgtgtgtgtgtgtgtgtgtgtgtgtgtgtgtgtgtgtgtgtgtataggctttaaaatgtatatgtcttgccatactgaacccatgttgaagccatatttccacagggtaatagctggcagaactgagttaagggttgccccttttagatgaggcatatgctctcccatcctccacagttcacactatgcctgcttatctcttactgatattagatattagtaatagtcacatttatgcattgtctttatttaaaaaaatagttctcttttttatgacagtagcaatagttagaatatgaaagagagaagaggatttatccttgccctactcaattccttgatatcatctgcctggtaatgaggtgttggagctggctaatactgacttatgagagcatattgttaaatattcaggaattttaccagcagcaaccaccattggtagattggaatcagccacagtgggagtatttacaccagggaaatcaacgaacattacaaatcaggtcttttcttcttcttcttcttcttttttttccttagagaaccagtttactagcatactgctacatttaggtatttgagtttatgatctctgaactaaaatacatattatactttattgatcattgacgttagtataatctgccaatctgatcaatatgccatattcatattttctttatctatgtcattaataaaatatttaataagaatggaccaaagaagagacctatggcataacatccattaaacaatgatctttacatatggttgttcaacaggtcctcagtaaaactctccgtgcttctaaatgattgcatccatctgctcactttatgcttatgaaaatctactggaagtgcatacgcctgatccaggaattcacatccttggtgaagggatttaagtcattagattttgggtgtatgttcttagcaatttaattatgtttaaaatctggttagtagtgtagtaaataactggtattgctacaaaattgcattgagaagataataggattgaatttctacacaagttgacactcaattaaaatttccatatatccagtgagttagccagttcttggctaaggagttagagcaaatgccttcctactaagccgatcacttcaaaacaggcaaaatttataatagagtcaaatcaggactgaatgcatcaacaaaaactggagttcagcttatcaaatacagatcaaaagcaagaaatagactagagagcacacgggatatttcttccttaaatttctctattttttattgacactggaggaaaaaatagcacattaaaacctccttgctgaattactgtcctaaaccaatagatccgtggggcttgttcagctaaaagccacaacagactttgtaatgcaatgatgtaatcttggcatcttggctttgtgtcatttatattcaacctaaaaaaaaaaaaaaaaaaaaaaaaaaaaaacaattttcctgaatagacaggctgacaacaatattgttcagtgtgggtttttatttggattctctccaaatggttcacatgccttcacagtaacacatgcctgcttacgttttttgcctgaattctaaacttttccccttttactagctttctatttttcttttaaggtctcagttatgtttgtaaaactaaccagctctaccacaaaattaggatgtatcttgcagagagcattcattttactttttgcatatttttcccgaggtcatgtcaaggttagtttgaattccatcctacattaagacttctttcacagctatttagctcggcagcctactccccgctggggtctgccccttgggcacgtcaaagcttcagacctgacaaatcacacacagatgaagctgtacagttttttaaacagtttcatcagtaacttttttttctttttcactatcctccttcatgttgagatttttttttctctgaattaccatttcaggaatgttgatttccgtttgagacaatttgtttttacatcagagttgcagactagcaatatcatttattttatagtaaaggatattaatagccttctgtcaccaagactgcagacctacagaccattcctgactattctaactgtaattgctttattaaaatctattcgtaacaggaagtgtagtgttggaaatgtagctatatcatagagtctaccagaatctgaaaaaaatatcaaccataaaaatgcagtttataaggtattatgagttgagcctggaaatgtttcctgaatggttaataatatgctcttatccgtattttagcaaattatgaaactaaatgatgcaactccatttcctgtttaattgatgaagttaaagtccttggttgctaatgagtgtattagcaaacaatgtcccctttacaggcttaagtagatcaggatttttaaaaagcagcttactatccttatttttatgggatgaaaaatattgactgccacaaaattgctagaccaactgaagtcatggtgtaattatttctgtgcagtcattttggcaatttccaacgaccagattaaggttttctagttcccacactagaaaatagttattttcttttacacaccatagacttttcattacattttcattcaggacaaacaacacctgaagatctttactgcagactaaggagaaaacttagaagtgaggggaaaaaataatatttgagtgattcttctctcctcagtcttcttttacagtttgctcaacatgaaagtacccaaatgaagggttctgtaaaaggttgcttggttgaaactaattaaagacaggtctaaatagaaaaagaaaagaaaaagggatcaaaggaattacattaggtgtcaggacatcatttgggagcgttttgtttaatttttgtaatttgattccaggaaaacactaaattctaaaaatgtccattttttgccgtaattttatacttgtgttatttttgcaataagatacatgtcaacaggcaaacatcttgaagagatcattttggtattggcgcattaacacgttatggtgaaaagagaggcttgtgcttttcacgcagtgcatttcagtcttcaattaatgtgaaagcactacaatgcctatgcaacttctcttgcctagtggtgcaccatttatcattgcagttttacattgaccttgacacccacttcattagaataaagattgtctaccatttaggttacattgttcctctgcacagagaccccatgcaaatttctgttcagatagaagagctgcggggctgtcagaggtcatctgcattaaatgattgcagctattttccaactgcttcttttcattctactcaattcaggctaggaggatcaatcaagtcctctgcctgaaacagtgggactgctgggaatatgactgtttttggtagtagtggatatgccctaaacagtattaaatatttaatataaactcattaaaggccatacaaaggcttcagaaggatatcaaatttatggaaatatctaaggggatagagaaccgttttaaaaagtaaatagaaaaataataatcaatattataattttacagggtatgatcaagatagttcttaaacttactaaattttacctataggagacttttttctcacccttgacatgggaaggaaagaaaggagacaggtagacttggcgtccttatgcagtattttttatgaaattgacatgaaagttttcagttatttgtgtttttatttttgttctgtaacagtgacttctagtctagctatatttatttttaaaggcttagatatttgttatttaaaagaaatgactggagaaataagttgccaggtctcctacttaagttttctgagtggtatgattggaattaaattattaatggcagatactttaaaaaagattgttttatgatcttctattagggaatttgcaattcattttaatatttgtagtttgatttatattaaagataatgcaatctatgtccaattaacagtacatggccagtgtaatgtgatttccagatcatgcaaatggaataagctagaagagggggaaaactcaattcttaacctcaggtgtcatttgctgtgcgagttctggcaattttaaatgacattgcactttttaatttttccaaaggctcagcagcaaatttatcccaatcaggaaaacctattattaatttacaaggacaattgtaggagtctttataatttctctatgcaattactcaccataaattctactggtaaaatacaaggagtttgcaagaaataacaactattatttgtcttgggcttgaacccttttcttcagttttgaacatcttcttgaagtgttggtggtactgactccatgtgcagcatcatatgcgttatgagatgctacacacaagtcttctgaaaagcggggcagcacaagagctgctgcacaggcaacactggcctctggcagattcctgcactccgcatggacagctgagcttggaccctggacttttatataaaaagactctttgttcaccactgaatggcattaggcatggacttgctgaggggccaccatgaagcctcgaatgaggagggcaaacactagccagaaaacacgtgagagttgtaaatagacacatccctggatttttttttttttttttttttttttttttttgcaaaaatgcatattttcacacattattttgccagtagtttggtgttttggtatgttcctagcatttgctttcttactgatagactaagtaagatatattttattttctcagtgtattctatctatctatctatctatctatctatctatctatctatcaatcgtatctatcagtcaatcatgcatatatgggaaaggggatcttgctggataaacaggtgtttgtggcattatatttgtaccaggaaagacattcaatcctgtcattctaataactagatcattttccttgttttaacttttcctaatataaagtcaactgaagctcagttaaaagtaatatggtgtaagatgtaaatgctcaaaccctgatgacacagaatacaacagccctattctaataatcaagaaatgtctttagtttaatttgtgtgtttctcgcagccaaagcttcactctctgttcagcaatgtctggtctcttttcagcataaccaacagaagcaccatacaaaagtcttacaatggatgtcttaatctctctgtgtgcttttagagcattattttgaattccatcatgctgccttttttctttcctcttctgaagttttattacaacagcagaattcccagggagctttgggggcaaggttcacataatatagccctcaagttttgcttaggtggaagccatcccccaatcctggccatcttttgatgatccctctatttcaaaaagattcactcggtagagtcttatagcattagctgtatatagtttattttttattttttttatttaccagacagtgagcatctacaaccctttcatgatgttttctttctctgacctcacagtgacaaggcatcttgttccttaacattgagggaggcagaaaaatgcttgagttgctcaatgtgtgccttctataccagtttcaaaatggcttattcttctggtttccatggtgacaattaacactgtttcaaggcattgttccagtctccatttgggcagaattttcggtgtgatttctaacaaaaaaaaaggagggggacttcggtgtggcggggaagcctttagcgtaactgtcaaaaaagttatctcaatcaagtcttcatgcatttctaagtatatttatttcagaaattcctgtttttgctggctttgttttataattcagttttagcatttgtgctaaaagtaagtactcaataagaattttctacaacttctttagttcttagttaaaatggtgggctagagtttgtagttatttttaactcctttttttaaaagtttttctttatatttatatacacagggatggcatttagaatagtactgtcctgtgtctttaatttagatcattcacatatctattaggaggcttcattagtcaaaattgaattggccaagcaaatacacttaataatgtaaatatggcctttcaagagagtatattttatttttgactagacagagaggcccacagcaggtgctgtggggaaattaaatactggatgcttatttaccttagcactcaagaaaagctttctgactttaactttgctaatctcatttttgcctattgaagagtagtctatatcataacatccccagactacaggacacaatggggcagcctctgctcacttactgctgtgggtggaatgaatatgaagattaaattatcttctcaccacaggataaagtagccccacttgataggatgaccgaaaactgatagagctggcagttgattttctgagtctaatgcttctgaaaagatgttaagagacagaagagcaaaaacatactagcatcaacaaaaatataagctcctgacattattacacatacagcttgagcccctaaacatattagatttaaccttcaatatgcttcaaaaattaaaataaatattttcaccttaaattatataacattttagtacctttcatccatatatcaatacatctaacaattaactagatactcttagcttttgtattagagtttgaaggcattgtccatcaatcacatcttaaatcaagctgtttagacagtcggctatatggtgacaaagactgagagcacacataaagacaagtttcttttaaaggtaataaccttttataatagctattgcagtgactacttatacgcatttaacagagaagattggtttattacatctaaaattaaattaattgctttttatatttttatttgtgtaagactatcatttttatgggacacatctaagctgtttcctttcttgactgatgtgctgtgtgagagctgtttaaagttggggtgaagagggggggatgagcttgtcacaagttaaagggataactggtagaggccattcccaagtggcacagccagaggactctttctgtcaatgagtaataccatgtggcataagtaaaatatttgaataagattttcctgcctgcctgaaatactggttcccccaatattatgtggaaatcttaccaaattaattatgtaaatctttgtcagctatatcattttagatgggaacctgattacataaagcagattgtcctctcctccaatcatcgctctgacaaataaaacactgtctaggtttctagaatgctcctgaatattgaatccagaaaattcaagtggacagtgtgtttcctaagtgctggagtaacatggtcctggtaattgccttccattagaaaacgcaatcagaatttctcctgtatcacaggccagattctaaaagcgctctaaagcaacccttgattttctccactatgcatattcatgtaattttggatactctgacaccctgatcaacattcattaataatatgaaatgctttaaatcacctcatttaaaacattttgttctgtgatccacaaatgactaacatttggagaagtttacataatacaagtgatgtgcatgtttagtgtaaatgaaagattaaaatatgaagctaaaagtatgcaaacatatgcacgcaaatgctgaagatctattaaccgaaacagtgatttcataccttcttttcctttaatctgcttccaattgtatttttgtttgggatcttatataatatcatgttttcaaggtgagtgaaatcacccaagtgcttggggacatttgaacttattgatttatttatttgcccagcgaaaagtttttctcattaactctgataaaggtgcttatcttagggcaccgttggtcatgtagggcaaaagaacaaaatactaccatggaactcagtgacctaaatttggtgcctggaagaaaaaagttttaaaattgctattatatcttggaaatgtgctgaaaatgtaaaatatgtttaatattttaaccagaatctagattttctactcagaggagtttttacatgtacatttataaagtacagtcatagtcatttatggctatccataatataggactaactatggagttatccaaatagagttatttgaagagaatcaccatagtaactgtcacattaaatagcacttacattatctccagcaaaacatcttttaggagagactctcttggcagtttgttagaatataatacatactgggggagagggttctgtagtcaactatgatttgggggatattttacagtaatcaataaagaagcatagatttgtaactactcctaaaatgttggctttcctttttctctatatatgtaccttttctccaagcccacacagagtttttaaggaaaagaaaatgaaaacaaaatgttaactgagaattcagataacttacataatctttatgaataattttttttctttcactttgaaactggtcctttaggggaagagatgagaggtggacagcactctggaaccaaataatggccaaaattaactgtaatattaaacccccctagaccagttactatcctatttagaatattttaaagatcaaatatgtgtataaacttgagtttaagaagtaaatcttagtcaactaaatgtaataactgtgtgtgtgtgtgtgtgtatataatatattcagcaatattcttcatctactcaaagtacttaggtttagcctccccataaattttattgggaacaaaaacttttaatgctcgtaagcatcacaaattctgtgttcaatgattttctaagaacacctctctccctaatgatatctctttttctcttttcattttagcgatacagtgtggaaatgtccatcagacacctgaaaaagacggagctgcttagtaaggttgaagctttgaagaaaggtggcgttttactaccaaatgatctccttgaaaaagtggattcaattaatgaaaaatgggaactgcttggggtatttgcatttttattactgtttgtaggttatgtgtacattttttgcgtagtgaagtactctgtccgatttctaatttgaggcacaaatatctctctctttcaattcactacctacgtttcaaacaagctattcatgctattatgggaaagacactgcttttcctcttctgttgattttttttttttctgagcttgtcccctctcagattttaataattttggttctttaatacatgaaaaagtaagtaaaatatgccatgtattatgggtatgcaccaagtcaactataatacagtatatctgatatatactgactgtcatgcttgaatgaatgttaatagaatttattctgaaggtacatgtgagagacatctactgtttaactatttactgtacccttaagatgaaaagtggagttgtcactacagctttcaagtcacactaaagccaccaaaacaaagatgcaaatttgacccaaatctgaattgcagaattgaatcagcctgtgttttgtgcctcaatttccagctcacttttaacaaaagccaaaaaaaaaaaaagtttcatgtaattcatttcacgcaatgatgggctgggtctcagccaaagactgagatgcaagaatctggcaaaaaggcaatatagagattctgttacccagagaccaggatggcactgtgcaggagacagtactgtccttttgttggaagacagctgagagaaaagttaaactgtattttttcatcagcttctctcctaaattgccttcacttcaaatcaagggtaagctatatttgtcaattacctaaataattaattataacagccaagtatggacgatgtcagttatggagcataattttgcatgccttccatttttctaccttttaaaaaaaattttagataaataatactccaaaaatattttgaataaaaagctcttcatgtaccttgatgatttggaggaatgccagtattctgtttatgccatgcctaatctaggagattaaaaaactgcaggtttaagtccttgtttctcatttaaattcactacactctgcagttgtgcaaagtaacttaaaatgttaaaagtttttcatctaacatattgttgccttttaataataattaatggctttcactttataatacggtgacttaaatcaaaacctgccgtattctacagcattcattgatctcaaacaggagaaatgtggttagtgtatgacattttaaaaggttgtttactacatagataagaatggcaaccttatgtgcttgataaagtagcgataagtctgtttacattgcattttaatatatccattggtaatttgataaataacaataatatttttagaaaattgtttaagttatgtcacatgtattgcttcctcaacagaattttaagtcaacattattttgaaaaaagaaataatatttagctatcctttatgaatcagagactttaaaaatagttgccattttgacaaaaacatcattcaaatacaacatgcaggtttgcagtgagagagtagggtgagggaagatttttttaaatcctgtaccacactaacaccaccaggcatactgttttaattggcatgattacattttaattggcatgaaaaaaattaaagacaaggattttaacttctaacaatagtaaaatagaggtatatggtttttaatattactttcatctaaggtgaacagtgtggaatggaaatacattagaatgaaatgtcagtggtgcgtacagtttaatctgtgaaattgtgtcccctgtgctgcatattactctgtctcaattgcatattaaacaaccctatcaaggcaggcattggcatctgctgtgctgacacaaattgtgaattaaatgaaattgatgtcctctgtcgtatatttatgaagacggaccattctctgaagtattctgtttatgaagaatttatgattgcaaactgttccagaacaaaaaagtggcaataaattcttttttgtgaccctaccctccaagggcattgatttcacctcctgctgctacttttgttacagcgtaaaaacaatagctaaatctggattccactgagggtcttcaaattatcagtattttcaccatgaaaatacaagggtgttgccaagaaaggctatttttctgctacagtctcctaaagatactatttacagaacactacacaccagatgaatgtttgttgacttaattttatttatgttttaaagcttatttttgtaggtttaatgcatcattatagatttaaatcctattgattgggactgctttccaccaaaaagaaaaaaagaaaacagccctccccgacaacactctcctgccatagtggttaatttaagtaggcttctagtgtagtgaattggggattattttaacacatattcggtattagaaagtccagcatccagaaatgcaaaatggaaagaattgtgggattgaacaatttccaagtcaggtaaaatcaacaacatcaccaaggaggcttccttttcttaaaaccctttagttatatggtttcggaaatatgtcacaaaacaaaaaatggaatttaattctccgtgtttgatctactcttggcctctttagtatatttattaaacttacatctcctggacattttatgtggagagttttttactataaactcctatcatgataattcaaatgaatttttctctgtgaccaaaaaattcaaatgaatttttatcttgcgaactatgggctaaatctcctttctattaaaggaaagtaagtgaatgaggtcttcttaagtatccgctggtactcagaacaacttgcactgagaattcgaatactaaatggaacaatgacctaatctgaactgaatgtcagtagtgaggtggcaggtatagatggactcttccaggtggctctcgttaccaacaaaactgtggtgtgtttttggtacctaagttaatctatgtttttgtttttttgttgttcgtggggtttttttttgtttgtttgttttattttttgttttttaatctgatgcattagaaaaccctaggagagaagatccaggacacaatggcagggcacagtgggtcgagtccacgtgacctgctctctcctgaaagtggaagcctggtaaggcagctggaggtcaggatcaaagaactgaaaggatggctaagagatacagagcttttcatcttcaattcctgtctgagacaagaaaaggaaggaacaatgaatactgagaaacaactgcaatactttaaggtaataaaaaaacaatcaaagttgataaaaagctctttttatggtagggatgaaatatttatcaagtacatgaagtattatacccatgtatctgtgtatcactgtgcacctaaatgtttccttgaatttatagacaacctccacatttcttatatgtctctatgtgtataaagatgaacattaagcatatcacatatacattgtagaggggaaatctctgctgcatgtgtgttttttgcaatgcttgttgagggaggactttgatgagttaaaagcagaccagcaaacactaaagattactaaggcctttgaaggacagacctaaatgttctgtaaataacttggataaaaatacttacacaaattgatatgataaaaacacatgatttaatcgaagtccattactgctaacaaaaggaaacataatttttacatatgaaagagtcaactatttatggagggaagaaataatgtaaaacaagttcacacattacaggcatattccattatagaatataccaacctgagcaatacaatattcattttcactgtatgtccatggagaggcatttcccctggtttgttcctattgtttacacaatatctatttaaaagcaatttaacattagaatgttttcccctattgcccaacctagcccatactgcttgaatctttccataaatgcagtcattatttgggttctggctagtgctggcctgaggctttggggttgcagaatttgaatttggtggcaataaatcttcatcatgagaaatcttaaagaggagaaaaaggaaaaccaagaaggaaagaactttttggaaccaagcaaccatttcttctcaaagcatcgtaggaccaggttttattcatcccaccttgcctgcaatcatccagtaatccgtcagaaaatttagtcacatgtgattcaccttctctctgccaaacaggcagagtcatcttgctcacctctataaccctagtggaggcaccctcaaagacaagaccacaatacttcccaataaactatctgcattgcacacctgtaaatttgctttcattgaaaacctcctcttctgccacttaactgacagactaaactggaagttaaagtgtcttgccaaagcaaatgggtttatggtctaaaatctaatacccaggtgatttgctgttttatctctacttgacccatcctaacctctactgcagggagatggaatcttcagatcttttaatgaaacttttcaaactttttgagattatggagccctgatgatttttctttatgacttgaaactagttcctttctaaagttgaccttgaggagtttgatcagatgagttagggggatctagcataatggcacctttttattgtttttaaagaaaattttattcatgactgttggaataaatctttttcctagccagaattttaaataattctgagctatttactcttagtgtttggtatatgattaatccagtgttctgtgtattaccacattcactggaagaatggaagcaaatgtttgtaatataataataacgtaatataatgtttgtaacctgtcaaaattataattggtaataagcatgtacagagtaacaattttttacttgccataaacccaaagaacaggtacactctgcctttctaagtgatgaaacagctcagacaggagagtgactgaagaacctttttacatatgggaaaccctctgccatgctctgcctctcgtgggttcctaaaggtctcctgccatgactggtcacacagaagaggacaggctttatctacaaggtttagctttatgattctttatcctataaatcctcagccttttaacataactgaagtcctttatatgacactaagagtaatgacagataaactacaatgtactctccaggagaatggaagggaaggtgctgcatatgaaaaggaaaacccatagctttgtagacagaactgcgtttccttctaatagattggtctgggatgagacaagggatcaggatcttcagttttcagaaaaaaggacaaaccaattgtggaacattttccttttctttaagcaatacgtatgagaaatatgggattagacacagaagaaaattctacccaacaaagaaagagtccaaactcagcaagagggaagaaacatgaaggtgtggtcctaagagctctgggataggaatgcagaattatcaaggaatgaacacactctgataacaaaatgcaggagagtatgtcagggatttaatgaggccagctggcaaagggtccctttgagctgtgtgtgtgcagcttcaatgccattggctggaaagcactactttttaatgatgacccttcagagagaaaagaaaataattacttaatcatatgttccttgtatcccataaccaaattcattattctaaagactccaaatgggaagatattattcattaccagctaaagaaggccacagcgctggcctggtcccaaaacgagtcgaggaagagcaagtttagacctgttacaagactttgtcatcaagaaggtgaatgagtggattagatttaataaccttgttgatgattaataaccgaaatctgctttaataatttaaatttgaccaagcacttttatgcatattgttatacttaaaatatacactaattatgtaagtcagaaaattatgatgaccttcttatatgtgtgggtatttatctttatgaatgaagaatttgagttgtggaaaggtaatgtgactcatttgaatccccatagcaaccagcagcagagacagagggaaaatgattgtctttaagtacaaattcccatcctgtcattcactgacttttcaaatacactttgaaactttgctttactttaaatcaggggttgacaaacattttctgtaaaagccggataatagtataatctctgtatgaattactcagctctgccatcatagtgcaaaagcagccacagacaatatctaaatgaataagtatggctgtgttcaataaaactaatttacaaaactacttacaaaagtagggcagtgggcttgatttgacctagaggccatagtttcctgaccctgctctagattacaaaaattattataagcatgggaatagatacagtctgtgtcatctttaaagaaaggagaccatgctacaattgcattagggggacaaaaagttattttaataattgtaacaaccacacctaatatgtatgaggcacactttctaaatgttttacctgcattcacttacttattcctcatcaccatcctgagacatattatagtatgatctgctatttatattttatttttatttttaaaattttgaaaattcgtgggtccatagtaggtgtatatatttatggagcacatgagtttttttgttacagacatgcaatgggtactaatcacgtcatggagaatggggtatccatcccctcaagtatttaccctctatgttacaaacaatccaattatacttttttagttatttaaaaatatacaattaagttactattgactatagtccccctgttgtgctatcaaatactgggtcttattcattcattctatttttttctttgtacccattaaccaccctgcttgcccctactaccctttccagcctctggtaaccatcccccctactctctatatgtgtgagttcaattgttttaatttttagaggccacaaataagtgagaacatgcaatgtttgtctttctgttcctggcttatttcacttaacaaaatgatctctggttcggtccatgttgttgtaaatgacacgatctcattcttttttatagctgaatagtattccattatgtatatgtaccacattttctttatccattcttctgttggtggatacttaggttgggcttccaaatcttggctattgtgaatagtgctgcaacaaatatgagagtgcagaaatttcttcaatatactgatttcctttcttttggatatatacctagcggtgggattgttggatcatatggtagctctatttttagttttttggagaaccttcaaactgttccccatagtggttgtcctaatttacattcccaccaacagtgaacaaaagttcccttttctccacatcctcgccagcatttgttattgcctgtcttttggataaaagccattttaactggagtgagatggtatctcattgtagatttaattttcatttctctgatgctcaatgatgttgagtcccttttcatatgcctgtttgccatttgtatgtcttcttttgagaaatggctattcaaaccttttgcccattttttgatcatattattagattttttccctatacagttgtttgagctccttgtatattctggttattaatcccttgtcagatgggtagtttgcaaatattttctcccattctgtgggttgtgtcttcatcttgttatttcctttgctatgcagtagctttttatcttgatatgatctcatttgtccatttttgctgaggttgcttgtgcttatgaggtattaccccagaaatatttgcccagatcaatgccctagagatttcccctaatgttttcttgtattagtttcatagtttgaggtcttagatttaagtccttaatccatttttatttgatttttgtatatggtgagaggtagggatctagtttcatcttctgcatatagagatccagttttcccagcaccatttattgaagagactgtctcttccacagtgtatgttcttggcaagtttgttgaaaatgagttcactgtaggtgtgtgaattcatttttgggttctctgttctgttccattcgtctatgtgtctatttttaggttggtaccatgctatttggttaactactaattctgtagtatactttgaagtcaggtatacagttttattctttttcctcaggatagctttagctattctgggtcttttgtggttccatatacattttaaaattgttttttccatttctgtgaagaatgtcattggtattttgatagagattgtattgaatttgtagattgctttggatagtatggatgttttaataatattgattcttccaatccatgaaaatggagtgtctttccttttttctttttttttttttgtgtgtgttctcttcaatttctttcatcaatgttttgttattttaatcatagagatttttcagttctttggttaattcctggtatttaattttattttaggctattgtaaatggtatcacttttattaatctctttttcagattgttcactgttgacatatagaaacgctactgattttgttatgttgattttgtatcccgcaactttactgaatttatcagtttgaataggttttttaggagtctaggttttttcaaatgtaagataatatctgcaaatgcagataatttgacatcttcttttctgatttggatgcctctatttctttctcttgtctgatcgctttagctaggacttccagaactatgttggtgacagtgaaagtggacattcttgccatgttccaaatcttggaggaaaggttttcagttttctcccgttcaatgtgatactacctgtggctcggtcgtatatagcttttattatgttgagatatgttccatccatccccattttttttttaggatttttaccatgtagggatgttgaattctatccagtgctttttcagcatcagtttaaaggatcatatggtttttatctttcattctgttgatatgatggatcacattgattgatttgcatatgttgaaccattcttgcatccttcagataaattccccttggtcgtgatgaataatctttttaatgtattattgaatttggtttgctagtattttgttgagggtttttgcatcagtatttatcagagatattagcctgtaggtttttttttttttttttttttttttagtgcgtctctgtctggtttcagtatcagggtaatactggtctcatagaatgagtttggaagtatgccctcctctattttttggaataattttagtaggattggtattagtttctctttaaatgtttggtaacattcagcagtgaagccatcgggtccctggcttttctttactgggggattttttattatggcttcaatctcattacttgttattggtctcttcaggttttggatttcttcctggttcaatcttgataggttgtatgtgtctaggaatttgttcatttcttctaggttctccaatttattggcgtatagttgctcatagtagccactaatgatcctttgaatttctgaagtatcacttacaatgtttcttttttcatttatgattttatttatttggatcttctctctttttcttagtctgcctgaaggtttttcaattttgttgaacttaaaaaaatgactttttatttccttgatcttttgtatttttttcttcatttcaatttcttttatttctgctctgatcttcattatttcttttcttctactaattttgggtttggtttgcttatgcttttctagttctttaagatgctttgttatattgtttatttgaagtttttcctctttttttgatgtaggcacttataactacaaaattccctcttagtactgcttttactgtatcccataggttttggtatgttgtatttccattatcatttgtttcaagaaacttttcaatttccttcttaatttctttattgacccattggtcattcaggagtgtattgtttaatttccttgtgtttgtatagtttccaaaatttttcttgttattgatttctagttttattccattatggtcagagaagatgcttgatattatttactttttttggaatgttttaagactcgttttgtgatctaacatatggtctatccttgagaatgatccatgtgttgaggaaaaaaatgtgtattttgcagctcttggatgaaaagttctgaaaatatctattagatccatttggtctatagtgcaggctaaatccaatgtttttttcttgattttatgtctagaagatctgtctgatgctgaaagtgggtgcgttgaagtctccagctattactgtattggggcctatgtctctctttagctctaataatatttgctttattgatctgggtactctagtattgagtgcatacatctttcaaattgtatcatcttgctgaattgacccctttatcattatatagtgaccttcttggtctcttcttatagtttttgccttgaaatctattttgtctgatatacacatagctactcctcctcttttttggtttccactggcatggaatctttttctgtccctatactttcagtctatgtgtatctttatagtcaaagtgtatttcttgtaggcaacagatcaatgggttttattttttcatcccttcagccactctgtgtctttttattggagaatttagtccgttacattcagcattattattgataagttaggacttactcctgctattttgttatttgtttcctcattgttttgtggtcttctctttctcattctttccttcctgtcttcctttagtaaaggtgtttttctctgatgatatgatttagtttcttgcttttcattgtttgtgtatccatttgtgtgttttttggtttgaggttaccatgaggcttggaaatactatcttataacccattattttaagctgataacaacaatactgtttgcataaaccaacaaacaagcaaaaagaaaactaataaaaactctacaccttaacttcttcctcctgctttttagctttttgttgtttctgtttatattttgttgtactgtctgtgtcttgaaaagttgttgtagttattattttttattggttcatcatttagtctttctattaggatatgagtagtttacataccacagttgcattgttaaaatattctgtttttctgtgtaattactgaaaccagtgagttttttaccttcaggtgattacttgttgctcactaacgtccttttctttctaactgaagtattccccttaggatttcttgtaggacaggtctggtgttgatgaaatccctcagcttttgtttgtttgggaaagtctctatttctacctcatgtttgaaagatatttttgccagatatactattctagggtaaaaagtttttttccttcagcactttaaatatgtcatgtcactttctcctggcctgtaaggtttccactgaaaagtctgctgcccgccatattggagctccattgtatgttatttgcttcttttctcttgccacttttaggatcctttctttatccttgacctttgggagtttattaaatgccttgaggtagccttctttgggttaaatctgcttggtgttatattctgttctttttttttaatttttttattttattttattttatttttgagatggagtctcgctctgtcacccaggctagagtgcagtggcacaatctcggctcactgcaaactccacctcctgggttcacaccattgtcctgcctcagcctcatgagtagctgggactacaggcacccgccaccacacccagccaattctttgtatctttggtagagacagggtttcactgcactagccaggatggtctcgatctcctgacctcgtgatctgccctccttggcctccccaaagtactgggattacaggcatgagccactgcacccggtccttggtataatattcttgtacttattgatatttttctttgggtttgggaagttctttgtttttattatccctttgaatgaactttctattcctatctctctacctcctctttaaggccaataactcttagattggcccttttgaggcaattttctggaccttggaggcctacttcattgtttttattcctttttctgttgtctcctctgactgtatattttcaaatagtctgtcttcaagctcactaattcttctgcttgataaattctgctgttaaaagcctgatgcattcttcagtatgccaactgcattttttcagatccagaatttctgcatgattctttttaattattttaatctttatctggtagaattctgaattccttctctgtgttatcttgaattctttgagtttttgcaacacagcaattttgagttatttgtctgaaaggtcacatatctctgtttctcctggactggtctcttgtgccttatttagttcatttggtgaggtcatgttttcctggaaggtgttgattctagtagatgttcttcggtatctgggcattgaagagttaggtatttattgtaatctttactgtctgggcttgtttgtacctgttcttcttgggaaggctttccagatatttgaaatgactagggtgttgtgatctatgctgtatctgttttagggagcaccctaaacccagtaatgctgtagttcttgcagactcaaagaggtactggcttgatggtcttggacaacgtctaggataatttctggattgccaggcagagactcttgtttttttcccttactttctgccaaacaaatatttattcattctctctctctctctctctctctctctctctctctgtctctctctctctctctctctgtctgtctctctctctgttatgagccacctaaagctgggggtggagtgacacaagcatccctatggccaccaccactatgactgtgctggttcagacctgaagccagcacagcactgggtcccgcccaaggcctgctgcaaacactccctggctactgcctgtgtttactcaaggccctggggctctacaggcagcaggtggcaaagccagctctacctgtgtgcttcccttcagggcagcaagttctcccaggcccctgttgggtccaagaggtgccttccaggagtcagggactagagttgaaagccttagaagtctaccaggtgttctgttttactgtggctgcactggcactcaaatcacaagatgcagttcttcccactcttccatcccctttccaaaaccaggggagcctcaccctatggccaccagcacagaccatggagagtactgccagactaccaccgatgttcccttaagattcaagggctcttatgtcagcttatggtgaatgctgcctggcctgggactcacctttcagggaagtgggctcccctctggcccagagcaagtccagaaatgccatctaagagtcaagtcctggaattggggaccccaagagcccacttgttactctacccctctgtagccaagctgatatctaagatgcgagaccaagtcctctttacttttccctctgctctcctcaagcagaaggagttttgccctgtagccaccacacatggaaatctgctaagtctcacctgaagccgcaagtctcagggactcatccaaggccctctacatagtacctgggtattactgctggtttttcagggttcaaagggtctacagttagcaggtgattaatgctgccaggacttggaccttcctttcaaggtagtgggtttccttctggcctaggatcatgtctagagatgtcatctgggagctaggtcctggaacgggggccttaaaattttgactgctgccctatcctgctgtggttgagctggtatctgagatgcaagacagtcagagtggatcatcattaaattggtgtacttgtcaagaggtacaaggggaatgattagggagccttctattctggtatcttgctctgccccatccgctattatggatgagaacactgaggtggggaaaattgaagtaacttactcaaggtcataaagttagtaagtgatagagccaatagtcacacctagaaaccgtttcagaatctgcccctatgtagactcaaaagtccctaggtcaaagatctattacttgaaagagaaaagcacatagtttgctcttttgttccttattccattctgaatacttgacagccggctggaggaagtcagggagtcaacattttaagtcttggaaattaaaatttatagaacagggcctttaaaaggatttcaaattaacaataaaatgtgcaccattgacaagtaattactctgaaaaggagtatcactgatttacttttacagaataaaggaagaaaagagctaagcagttcatatgctttaagaaatgtttcctaaaacctcagtgcataattttcagaaataaaaataagaccaatttcatcaagtcttttagggggaatttctcatgtccactataaccaatttcaaatggtatcataagtaatctcacttcctctgaccccaaaaccacatttaaaggagatgagtttgaaagacaggatacaatgttttagcagttttgatgtataagaaaagtagccatgattcctacaggtgcctggatcatccctgctgctctaacttggagccattacaaacttagtaatgatgctgttggcaaagttgcaaataaagaattacagtaactcagtctaaccataacaaaagcatacaaaacactttcaaattcaatagacatcaaacaggacttaatcctttctacatatcatagatacatttaaaaaaactattatattaaccacgtatatccatcaaaagaaaaccacgtatattcatcaacagtcttttattaggttttttccccaccacatattaaaaacccgtcacctaacacttctttggaaataattttaaataattggatacagttcaggactgccttataagaaaaattggctgggttaaggttgaaattcaaaggtagatttaatataaataaatattattcacactactgtctgagggtggtgggaaaacccacagaacatttttacaggcagtcccagtgcagttttctagagtaaaagaaaatggaatagcagcccaattctttctgattacatattttgctagaagaagatgctgaatgattcctatgaagtagagagttctgcccttgatttgagaaggcagagatacagctgtgtactcattttatatgtggtgtttgcactgctgctgtcagacagaccagattcatggaagtcaagggctgtcatgctaatctagaaagaggaaagagagatctcacccatctttacttattgtcttgaaaatcagacagaacagcatttggcctctgaaaccagagaatgaatgtttctactcttaactgatctcttaaattacttaaatgtaactttctttgttagtacattcaaataaggaaaaaactggaagaacataattgcaaaggtatctcagtgctctccactcaagtaagtataggatgggaacagtgaatctgatccatcatagtttagaggcttaagtgtggattcaagttgcttgggtttgtcctagctctacctctttctgacagatcatcttcctgaaagctccaggtttcttatcttacaaacagggataatgatattacttaccttaagaagtggttgtgagtgttaaatgagacaatatataaatgaagactgcttaaaatagggcctgcctactaagagctcaatatattttagcagtcagcattagaattctaaagcatgaaactgtactttcaaaaaagcattaacatttaataaagcagggttatagtaaatagataaagcaaattccttggggtttcacctactttggtgagttgtatgatctctaggaactgaattatctattaattggatcattgacctgcttactacctagataaaaccataagagaacttttttccctcccaagactaggaaaaaaggagatagtcagtatacctcccaagtttgccctttgacctgggaaggaagagctcttttggggtggtaaaaaccaagtcccagattattaagggtgggtcttcactttcaggctacttttcctcttttgagcaaggcggcacaccatttacttcgagtccattttctactccaacttctgtctccatgaccttcttttgtaaaccctctttttacctcttgtttctccaaaattattgcattatgagtgcacacacaagtgtacacacacacacatatacacacacaattagaccttcatttaaggagagaaacaaaatttatattttaatgaccatattgaattgccattcatcttctgtaacttttactacaacatgattcttttataattggccaattaatagtatttattgagtatcatcactagtttctgttagttggcaaccctatgacctaggactttcagctgtgtaatctcaggaagtaagttttctttgcctgagactatttataaatttaggtttttttgattgagaagattcctttcaacgctagccttcttgtgattctgtaagagctacctttttccattggtaaatttttcaattatagatgtcatttaatttctttaaacagcactttcagcttggcacaaaattttaagtagatcagccaatagccaattctgtataccaggatttatgtttccctcatcgaaaatgatactgcaaaaggaaagaagcatcttttgaactaaaattgcagtgttcttgcctttagcacacggtagcagtctttctctttgtacccatttcctttctagcattgtaatattcagcacagacactggcccaaagagggaagtaaaaagtcttcccatttatgaatttcagcctggatagccatactgataacgtgaatatatttttactggcttataaattaacagagacttgtttgattgagtcgtttttaaagtgaaaagaaatacactaataaactgctagtgcggtgatggcaaacaaatgtacagatctataagatatgtaagacatacaattctcagttaaaattaatgaccaagttgaagagatggaggatttgaatctggaaggactaaccagaaaccctacaatcataggcctagcctcttcctttctcatctcttaggtaacttgaagtccttcacaatatatgtagaggcttatagtatatccttgcctgtccttttggtatcagttttccacattgtattattttaggcaagtttcttacaaattgcattctacccaaatctgacagtttctatcttctaataagaatattaagcccattcatatttatttccttgattaagattactgatcttttttcatcttatgacattctttcatttaggcactgggctgagttttagcaataccacaaagcttatattatgggctagtttaaatattttgctacatggaatgttattttctttgtttccactgcagtgaattggaaggattttttttaattacgtattttctttatttacagtgccaagattgaatcagatgccacttttacaatttaaaaatgagcttttttttcctgtgtcctccagcctatttccctatttttgttgatattatataatcttagatttaatttttaggttttatgattattttactaatataattatgtcctttttcacaccttcaagtatttcttttgacatttgcattatattgaaagtaattcaggtctagcttggaggctcattcttgtaatcatagcactttcggagaccaaagcagtaggatcacttgacgtcaggagtttgagaccagcctgggcaacatagtaagaccccatctctacaaaaaaaaaaagattgtgctcaattatctaagtgtggtggtgggtgcctgtagtcttagatacttaggaggctgaagtgagaagattgcttcaccccaggggttcaagggtacagtgagctacaattgtgcactgtagcctggacaagagagcaggactgggtcactaaattaattttgtttttttttttttgttttttttttcagatggagtctcactctgtcacccacgctggagtgcagtggtgtgatctcggctcactgcaagcccgggttcaccccattctcctgcctcagcctcccgagtagctgggactacaggcgcctgccaccatgcccggctaatttttttgtatttttagtagagatggggtttcaccatgttagccaggatggtctccatctcctgacctcgtgatccacccccttggcctctcaaagtgctgggattacaggcgtgagccaccgcacccagcctgttcattctttatactgcactctagcctgggcaagatagtgggactgggttgctaaataattttttttaatgaataaaaataaaagtaattcagaattaattatattattttcattgctgaacttcagtttttttcatatcacaactttccactaaaaatgtatttttagtactggctattggatcatcttctaataattttcacaggaaaagtccattcctagtattttttccaaacccttgtgtgtcagaaaatgtattttacttttacctcacatataaacaatagcttggctgaatataaaatttttctaagggcagcataatcttttgtcatcaaaattgctaatgattcttttggaatttatagtcattaaagagaagatatgcttctcttttatgtgtgagttgtagcttttgttttagtttcatttatgtaggactaggtatctgtctcttttcactttttttttttttttttgctgggaacttggtgagtcctaaatgattttgaaaatcctgctttagatcaggaaagttttacccgctgtttgattatcgtaatttctctatatgtttagtttcgtctttttggaagtcctgctctgcgcatattgaatctcccagatcttgccttcacttaaaaaaaaatctatttttatttttgtttcttcatctagggacttctggtagaattctcaagcttgttttctgtttctgcagaacctaattttgtaattcattgttttcattgcaatttttaattcaacagaagttcttttcatttttatacaatctttactgatcttaaattgttctgtcttcaaaagtaccaacttatctcagtgccatgaatgcaatatccttgtgcatattttcaagacatgaattgttttctcttttttggtattaacttatttcagtattgttctgagtcttcaaattgggccctcatttgaactacagtgtctgttgatgtgtgttgatttttctgtccctttttaaggagtttttgttttctaacactgggtgttgagatagatcctctttgaaatattatataaatggctccctgtacagatatttcagtctgagacaaaaaccaaagggaaattgtagattttcttcaattttattaaaattcagggatgagaaacaccatatgtgcggaatagcaaattgtttattgatattgaagcatagggtaaactgtctgatgtcaagtggggctgcaagcaaagcaagtagcctactctttgttaatttaccagggatgtcctcagtgttccagagcaggagggtggtcttgcagagcatgtttcaaccaacctggaaggagaaagtcctattaggaggttgctattctgtaacttaggtgatatgccctgagggtttgatatgggacaattacagtgagagggaagagattggatttccaccccccacctcccagctttattaaggtataacagacaaataagaattgaacatatttacagtgtacattgtgatgttttgatatatgtatatgtcgtgacatgattaaatcaagctaattagcatatccatcacctcatatacttgtcatttttcttgctttctaactgaaactttgtcaccctttgactaaaatctcttcacccctgtcacccccatcccctagcccagtctctggcaactgccattctaatctcttctctgagttcaatttattaaaattttacatataaatgagatcacgcagtatttgtctttctgtgcctggcttatttcacttaatataatgtcttccaggttcatccatgttgtcacaaatgacaggatttctttcttttttaagactgaatagcatttcattatgtgtgtgtgtgtaagtgtgtgtatgtgtatgaatgtgtttatcccacattttctatatccattgatcagtttggttttttccatatcttgattattatgaataatgcaatgaaaatggtagtgcagacatctttttgacatactgattttacttccttaggatatatatccagaagtggtattgctggatcatgtggtagttctgcttttaatttttttaggaaacttcatattgttttccatatttatattaatttacattcccaacaacagtgtacaagggttcccttttctccatatccttgctaacacttgctatcttttctctttttgataatagccattctaacaggtgtgaggtgatatctccttattgctttaatttgtatttctctgatgattagtgatgttgagcattttttcataaacctgtcttctgttgagaaatatctgttcagggactttgcctatttggattatttgttttcttgctgtttggttaagttccttgtctatttgggatattaaccccttatcagatgtatggtttgtaaatattttcttccattcagtaggttgtcttttcactctgttgattgtttcctttctgtgcagagctttttagtttgatgtaattctatcaatctgtttttgtttcttgtgttttcgaggtcatatcccaaaactcgttcagaccaatgtcaagaaacttttcccctatgttttctagggggaaagtttatagcaattttggttttatgttttacttttaagtctttaatccattttgagttgattcttgtatatggtgtgagataaaggtccagtttcattcttctgcatgtggatattcaattttcccaacaatttattcaagagattgttattttcccatggcgtgttcttgctacctttgttgaaaataaattgatcatgaatgtgtggatttattttggggctctctcttctgttcaattggactacatgtgtttgtttttaatgtgagtaccatgctgttttgattactatagctttgtggtatattttgatatcaggaagtgtgatctctccagctttttactttttgcttaatattattttggctctatagggtcttttgtagttctacataaattttataattattttttctatttctatagaaaaagtcattggaattttgatctgtccattattgaaagcagggtattgaaggctcctactataattgtattgctatttctctcttcgtttctgtcaatatttgctttagatataaaggtgctctggtgttgggtgcatatatatttataattgttatatcctttagatgaatttacgcctttatcattataaaatgaccatctttgtctcttgtgaaagtttttgtctgataaaagtatagccaccctgctctcttttggttaccatttgcatggagtatgcaactgatgttaacagcttaactgtgaccacatacaaaaactacattttaacttctcctcctcccccattttgctgatgtcacaattcacatatcttacatatgtaatgtaaaatgtattcattaccaaactattttagctataattattttattacttttgtcttttaccttttatactagagttacaagtgatttatgcaccaccactttattggaatattctgaatttgactttatctttacatttacactaagttttatactttcatgtgttttcatgtttttagcatccttttgtttcaacttgaacttcctttagcatttcttgtaaggcaggtttagtggtgatgaacttccacaacttttatttctctaggaaaatccttatctctcctttatttctgaaggacatcattgccaaatatggtattcttggttgccaagaatactttcttttcctttagcactttgaatatatcttcccactctttcctgccccgcaaagtttctgctgaaaaatctgctgatagtgttaaagctacccttgtaaataatgagttgcttttctcatgctgctttcaatattctctctttgtctttgacttttgagaatttgattataatttgtcctggtgaagatatctgtatttaattgatttggggttctttgagattcttagatctgaatgttcatgtccctcttcagattttggaaattttctctcactgtttctttaaataagctttttgcccccttctctggctttgcttattctgagactttcatatgcatgcattggttcacttggtgtggctcaataagtactgttggctttcttcactcattttcattatttttttctttttgttctacttactaggtaatctcaaacaatgttttcaagctctgtggttttttttcttcttcttgagtctgctgttgaagctctttatggaattttttggttcagtcattatgttatttagctccaaaatttctctttggttcatttttattgtttctttttgttgaactgtagttttgtttgtgtattgcttaccagattttgtttagttgtttaattttattgttgtttgttagttttgttagttgtttgttttgtttagttgtttatttgtgttctcttgtagcccactgagattaaggcaattattattattattattattattattaatttttgagacaggatctcactctctctcccaggctgtagtgtagcagcatgatcttgggtcactgcagcttcaacctcttgggctcaagggttccctccaccttagcctcctgagtagctgacactacaggtgaataccaccacacccagcaactttttgaattttttgtacagacaaggtttcaccatgttgcccagctggtctcaaactcctgggctcgagtgattctcccaaagtgctgggattacaggcatgagcccagccaagacaattatttttaattatttgccaagaagacatttagggccactaactcatggtttattttgtttgtttggtactgtcatgtttctctgattatttgtgatccttggggctaggcatttgtgcctgcacatttcaagaagtagccacctattccagtctttacagactcacttcatcagggaaaactcttcaccagtcaattggtctagagattctgagtgtgacatctggtagggtccatggccaggctggcctgctacctgggtcagcaggtgggtgggcttggcacctggattcatagggacttgccttgagcctgggtctataggatcatgcctggagctaggtccactgggatgagcctggagctagaatctaccaggacaggcctgaagcttgtgtctgtggtggctgggtgcagccagggttctctagtgtcaacctggtactctgtgggccttgagcctgagtctgtgggggctggcctaacactgggataggccagtgcttgggtctttggggataggcctggagtctgagtcatggaggtggacctggcttctggagctgtactagggtgagcctggatcctgggctcacaggggtaatcctggagcctgagtgtgtgggtatcagcccagtgctggagtatattagggcacactggagcctaaggcaacagtgactggcctggagcctgggtccatgaggcgttggtctggaacctctatcattggcttcagcccatgggttctagcctggtacctggggctatggatgctgacctgaagccttgctctgcagggtagggcgtggaggctgggtttgtgcataatggcctggaggctatctctgcaggagctagcttagagcctaaggccacaggggccagcctgatgctggaataggcctccaaggctggttccccagtagctgtcctggtgctagggtctcctgggatgggttttgactgtgagtccattgcagtgtgatgctgcaggggctggcctggagactgggacagtggatagcagcctcctgcctagaatcacgggtgccatcctggtgtctgaagttgcacgtgctgacctggagctggggtgtgcatgtgccagcctgacagtgggggaggcttggagactgggtccatgagtgccaagctgtagtctggggctgcaaaggccagagtggtgcctggggttgtaggggctagcctggtgctagagtcccagataaagtcaggtactcaattcattctccttgcctcaaatggtgggtgtctttccatgttgtgctgccgaggcttggggaaggagagacagctataatgtaaaagtttccttcctagccttttcaatacatcttttcttgtctctgtgctacccccaagtgctgtaatctctcatctggtttccttagctcttgtgaaggtatgtttgtgtatgaatagttgttcaaattgatgtgtctgtttaggggatgagcactggaaagtcctattttgccatcttgctgacatcctcctaggaggctaggttagagatgataggatttctgaactggtttgttggtaggggtggggaagagggaggaggtcttctgagaacgcctcactcccatgaaaagtccatctgtccctggaatgctaactgttggatcagcccaggctcccctttaaataaggaagggaatgtttaatgaaaggcattgtaagtaatagaatgtatgtaagaatggagaggttctggtagttagaaatgagaactagttcaagatgatttggggagtataagtagagatatttttaatttattcaacacccttctcttcagcaaacatctgtgtcaagtgctgggcatggtggatactgtggtgagccatatatagtcctcttccaaggaacacacaggctaaacggagatacagacagtgaaacatgcaagttgagtaggatgtggatgtggttggatgggagttaacatagtgtgctatggaagtgcacaagacattcctgggagggcttgggtgttttctcgtgaagagaagtgaggaaattcctggaataagtgactataaaatgagatctgaagtggaggggacgaaacagaacaatatatgcatgtgtggaggcctggagataagcgatggaagaaattcctgtgttgttttgtgtgcttatttgaatattattcaaatatgtgtacttatgagtctgtgtatcttgtcaacagactaaagtataaacttttagaaagtatcttgaagttttatttgttttgcatgccctttatagtattatagacaatgccttggagtcactagatactcaagaagtgcttagaagatggtagaatatcctcaccaattgatacctgagctcatctagctaacttagcctccttattccgaagagaagaaaaccaaatctctgataaattaaatgactcacccaggatcacacagtcagagccagctggcagcctacatcagaataccaatccaggccatagtccagtaacgttgaaccattggtttcttgtgggttatccttgatggctttgtaactttcacatcccaatttttactctgtaaaatataggtgataaacctgtatcatttgatgcatagaaacaaaaaaaatgaggctgggtgcaatggctcacgcctgtaatcccagcactttgggaggccgaggcgggcagatcacctgaggtcaggagtttgagatcagcctgaccaacatggagaaaccccatctctactaaaaatacaaaattatccaggcgtggtggcacatgcctgtaatcccagctgcttgggaggctgaggcaggagaatcgcttgaacccaggaggagaaggatgccatgagccgagatcgcaccattgcactccaccctgggcaacaagagtgaaactccatctcaaaaaaacaaacaaacaaaaaatgatgatcacaggggctactatgattaataggaaatatagaaatgcttattaatactactaagtactattttaaacagaattaaaaacacatatgacaacagaccaaggctcctctggcattggaactcagagatttaccatctcaacttgcaacagtttctcgttcccaggggctttacttttgggagctcaactcagcatagagtttgctaacatttttcaccttgtgtttatgttgcacctccatacaaggagcttaaagagctttacagacattagctcattaatcctcccaaaacctctcagagagggcggagacataaatcattattcccgtctgggaaaaaaaatggcctaacttatctcttttaattttactggtgctctaaatggctgattaaatcccaagttataccctctacatttagaatatcacattcttttttctcaaggatatttttctttcttttttgaaattaatattattaggataagtgtaataatagattgaaaggtttgatgttgaatgttcttttgagaagcatagactaggcagtaacctaggttcctcttttccatcatgccctctgcctttttcctcgtgccctctgccttttctcaaaatatccttctttatttttctttagtcatgattgggagaaatgacttttaggaaatggaaggatgtttcaagacccatttactccttatccaagccaagaccaccagcaaaagagccaatgagtgtctgtttagtcatgctgtatgaagccattcttgcattgctataaagagatacctgagactgggtaatttataaaaagaaaaaagaggtttaattggctcacagttctgcaggcttcacaggaagcatggtgctgtcatctgctcagcttctagggaggactcaggaagttacaatcatagtggaaggcaaagggggagcaggcacaacacaaggcaaaagcaagagcaagcaagggggatggggaggtgccacacacttttaaatgaccatatcttgcaataattcactgtcatgaagacagcaccaaatcgtgagggatcttcccccgtgacccaaacacctcccaccaggccccacctccagcataggggattacacttcaacatgagatttgggcagggacagctgtccaaactatgtcacatgccattctaactcttaataaaatactggtgcaacaaatttcaaaactttatcaaagcaacaatggaagttacattttcaatcttgtttgctttgcttacgcatgtggttctcactataatgttatttggagttagactttgaaggtgttagaacacgaccaagacatgaacggaatctgagaccaaacaaggttgtttcatgcaaattgttgcaacaacacacttatccagttaaagccagcaataaaggcatattgaaattaatattctgacacccctagaagttaatcagagaagatgagaaccaacttatatcttatgtgagagatattcaaaattgtattttataattattttttaaaagtccatcttagatcaccagaggacatttatcctgtctcagaataaggttatataatatttgatcccagaagatgttagagcctaaaggatcaatgcattttagagaaagagtatggagggcacatagaagttacatgttttacctgagattgcacaagtagttattatcaaactaggagaaaactcttaagttgtggtttgtttttcaatccacattgcttctcagatattcaaataaaacacctttatgattagtgacttgtgttctgtcttgctgccaaaatgttagatggcataaatgaaagtactaccctcccgtgtattcaatcttctttgagagagcaggcaggagagaggtgtggtgtcttttcccagaagaaaataaaatttattcctctaaaggaaaattagctttattcaagaaaatggtcttgaaaaattctcctagatcttcactttgttttagctataagagtgtttgatgaatgaagttattatatttccttttcacagggttgaaatactgcttgaagctaaataatcattataacaatttaccagttgactaatatttagtcaatatctctctactacctaatatcatatttgaagagtattttgctgttatgtattggttaaacttctaaatgaccctgagagtattaccacacatctgggaatactgaaaactggtgaaaaggaatcaagttgccttgagcttccaccacaaacggaaaggaaagagctaagaagcaaatacccagtggtccgaactcataggaaaatgtactatttattttagacgctatgaaaataaaaacagaaatatgaagtttataaagccatctctacctttgcctcttccgagtcacagaggagtaaatgaataaacagtatgtcttttctaatgttgactttttctctctagtatcattttccttctttttagaggtgttatttccccatgcttgactctcttcctgcattcttgttatgtccctagagttcttgaatccatttatttcccttctgtagcattctggaataataggaaaactttcctaaaataccttttcctagcgtttatacttcaagtaacagtctgaactttgtgacgagttctaggagtggcttgttagaaaattaagaatatattagctaaaaataagtctggaaaaataaggcttgctagaggagaagggtggagaatagccaactacgtatggatgagagagcaagaaaaataccatgcagcagggttgagcaagtcatgaaactaattagtaaataatctgtcctctcccatgagtcaggtcgcctgtgtgttctacattatccctaggaattcctcttgggtcatcatcctagctcctgtgttctcttgctttctttcttaatgttatttcatacccttttgtggccttttattatgattcttttttcagagagtttactgacggggtgtatggcaccgtaccctctcatactgaatcatttccttcctttcttcaagactgtcctgcatatcctttgacctgaccagtgaatacccaagatctattaaaagcaaagatgatttcaggtagctaggatcaacaaataatctagagaaggaaaatgccttcatccattccccagaattactttgaactaattcccacagaatcaataaaagataaaaagcacagtgggtgttgtaaatagatttcaaaatataataatataaaaataaatggcaattaatgcttatctgcttaggaaaagtgtgattgtggggttttaaggaaaagtattttgtagtataatggctaagtcgtgtttatatccagcacctttttccccctactactaaaagttaccttcctataattgcaatctatttgagcattttaacaataatggacatgtttttaacagattattgctaaaattgcatactttattccagggagactctgtaatagataccagcattttagtaatgatacaagcaatctgtaagctattacagttttctttagagtaacttaatcttcatattgttttatatgtctggaattttaatagtgtttttaatttagaaaaggagcgatataacatattattaattacatgtgaatatgaactaaacactgagcttgactggccactgagcttgactcttaaaaacaaacatatttaaaagtatgtaacttagtttagggaaagtaacaaagaaattaaagaatgccacacagagataaccgcagctttcgtgggataactcactgagggtctacatttttagaatggttattatattttggccctcagctacacaaaagccaagaggaatagaaatgcccctttccaagtaaaattaatacatattttttccaacagaaaaaaatacaaactattaaaacaaaattgtgaatgtttgtaaaagaatgattcttttcccttgatgtatctattcatccaaggatcttcaagaatttacagtattaattaataatcctggttgcccttaatgattcaacttgattggtgagtataccagatggcaagaaaaattaagatctttaggtcaaaaggtcagttcaataaggccatggaggtaaaggtgattgcggtaactttagacctcacttatttgtggactgggtaaacaaacagaggggaggtaatttttcttaaaaatgaaaagacttactgaaaatatttttattttaaatggttataagaaataatttagtgtttgaatctagacttataatatcatgtacaatgtcgaaactattttggcacactacccaactcctcttcaagagccaatagaaatatgcttggtgaaccaactcaggaagctttaatgctatttttaaaatctagcttttacattgaataaaccagtttgctgttttgaaagaagttataatctacttaaaactgtcattctctgtttctgacttgcaattagatgatatttccaaaatgtcaaacttagattctgcttctaccatcaccataataaaatgtgacagccaagatattatatcaataccttttccataattagcaataaggatcctgccaagggttaactagaaaagtttcataaacgtttttctacaaatggtcctgaagacagtgttatgcttttaaaatctgctaatgtggcaaagactcatgacaaccaggagacaaatctatgagcaaaactatttggagagaatagttttgtagtatatgatgtatgttatgtaaatgagcttattaggactctcatctattttattattggtgaccaatttaatagaggcttttaaaaaacaatatttctgcctgactcctagaaatgaagaagatacattgatataattgagagcaaatgattgcatgttgtgccatttaatcatgtcatttttcaattgctattttttgcacttcactgcatgcttatagaatatttagcttcaatatagattaagttccagggtttgcaactgagctgaatctctatattggctgacgttgtcttttaagtttgtaatcagttaaaacacccagatgtcatttgcctatattttctttaaaatatgcaagtcattattcatacttcatttgaggtattttaatgttttgctattttgaagaattacttcttacaattccaagatacaaattcttatttgcaacatttatatgcaaggtatagttaaacacataattggctagagaatagagctatcaggaccaaaagagcttctgaccccttgctggaaatgttgataatcacttgcctaaatgaatgtttcctacctttttaatctcttctttattatttatataatttacatcttcctcaggaaagagattactcccactgtccccaggaatatgaggtctttgagaaaaggttttgtctgttttgttcactgaaattctgaagtacttacaacactgtctattatgaaaagtgttccataaatatttgttcaatgaatgaatcagtatttttcccatccctgttattataaccaccctgagcttaaattctgtatagattactaactgttacatatttgcaggcctgtgaagattggacctctaaaaaggttcaatctccttccctttgcagaaagaggttgttggctgtcttaacaataactttatggctatggccacttctggttagaaatcagggacaagattgtctgaaaatgtagaaatcatacaggcttcttcagctttcttatgaaaagcaatgtagcatattgtttttgtgaatcagctttggattcaggctgcctgggttaaaatcctgcctttgttgcttattagctgtgtacctatggtcagctacttaaccactctgtgtctccatttcctcgtttgtcaaataggtagatgacaataatacacacacacacacacacacacgcacacacacatattgtagtgttgctgtgaggattaaatgattcaatacatataaagtaccttttaaaatgtgtggcacacataaatatacaaaaaatgttggtcattactgctggagattagtgaaaataaccaagaaaatattatttaaaatagtgctccagcaattgataagtcccaatgattataggctattattttgcattcaagtgaatctttttttttttttttttttgagacggaatctctctctgtcaccagggctggaatgcggtggtgcgatctcggctcactgcaacctctgcctcccaggttcaagcaattctcctgcctcagcctcctgagtagctgggattacaggtacatgccaccacgcccagctaatttttgtatttatggtagagacggggtttcaccatgttggtcaggctggtcttgaactcctgacctcgtgatccgcctgcctcagcctcccaaagtgctgggattacaggtgtgagccaccgcacccggcttcaagtgaatcttgatgaaatatttgaagagaatgtaacattatttttattttgtattggttcagatgcatatagtcgactcagaatgatctttggtaaagtatgtgaagcacatctgatatgtcaggtctctcatttttgcactgatactaacaccacaatagattacagtttcataagatgtatatgattatatatgaaattcatcactgcaataattagatttagttaacattcttcatttcccacatttgctttaactcctctttcagattcatagtcttctatgtttacttttatgtttatgttttatgctatttctaggagtaggacagctatattaaaaatgacactgcattatttttatcatacagcagaatgtctgatctgttggcagaaatacatagatgtatatggcagaatgtatgtataatgtagtaatgactctatccgaggacattttatagccataacttaaaaaaaaaaaaaaaacctacaagtttgcattggtaaattaatccttgtatccacccatggttgcagaaccatagtgattgtatggtattagttatatcattagcatctgttgtatgacacaccctagcagaatggtaaattctctgattgtataatcatttatggggttgataatatatttctggccttaccaagaggttttcttaaaataatattttcattgagatataatttacataccagaaaatcttatttcagaatgttttcaccactcttaaaagaaaccccttacccattagctcgctttttgcccctcactggaggccatggcaatcactattccactttctgtttctatgtatttgcctattctggacatttcatataaaaggaatcgtaaaatatgtgaccttttgtatctgtcttctttcacttaatatgatgttctcaaggttcatccatgttatgatatgtataagtacttcatttttaaatgccaaataatattacattatatgtatttactgcatttttttaatccactcacagttgatgggtgtttgacatgtttccactttttggctttatgaataatgccattatgaatatttgtgtgtaggtttttatgtggtcatatgttttcagttctcttgggtatatattcaaaaggaaatcgctggatcatacagtaattatatgtttaactttttgaggaaatgtcatactgttttttcatgtggctgcaccattttgcaatcccactaatggatgagggttccaatttctccacatccttgttaacacttgttatttcctttttagccatcctactagggggtgaagtaatatctaatcatggcttacatttgcatttatctgatgactgattgtgttgagccttttttcatatttttttgccatttgtatgtgtttgcagaaatgtctattcaaatactttgtccatttaaaaaattgagttactggtcttgatattttctcccattctgtggtttttcttttcacttttctatggtatcatctgaagtgcaaaagctttaaattttgatgaagcccaaaagttgcttatacttttgtgtcataaagaagaagccattgcctatgaagtcaaaagctgtttctacttttgatgtaatatctacaaaatcattgtctaacccaacatgatgaatatttacctctatattttcttctaagatttttatagttttagctcttacaattaagagtatgatccattttgtgttagttttgtagatggtgtgggataggggttcaattcattcttttgcatgtggatatccagttgtctcagcaccatttgttgaaaaaactattctttcctgacttaattataccagagctttttaattttacttattttattgaaaggtatcttatatttaatctttaatatgccataattaactgtaaaagaagtcttttatggcataaattagtcttgattgtatgaacattatcttgtctacactattacagcatcagaacactaggtgatattttgtttctacattgaacttgttattatgtgaagtcaccttctcagagaagctttattgaaaacccaaacgaaaataactcccaagccactttctgtcatatcaccctgttttatttgatagcttttagcactatctgatattttcttgtatatttcatgttttgtttccagcctctcatcattcacatgcatacaaatgtgaatgtaaattctatgaaagtagacattttgtgtgtcttgctcactgctatatccccaccactgagagcactgcttggcaaataaaaggcactcaataagtacatttggatggatagatcaatacttgaataatgattattaccacaccccacttgaacttccatcttgttttaaaatgttacaaaaattatggcttcttggcctttttaaatgtgtgctccccaacctgtaatgcctatcctctcttctctccacctttcttaccttcagcaactttcacagcctggttttagtcccatgaatcctaatctgtctactccagttaataatgatcttttttattctcaaactcagtgcccatagtttagcatatatatcaatcacaccttacatttgggtcatggcctcactattctcaaagcacattcacctcccttaccttatttagaacctactacaacctgatggtcttacagaaaacctttgcctcgtatttatttctctcactttgaggaatcagtgtcttctctttgccaccagctcttaagaacaggtacattttattacatgcctcttatccaccaacactaattccataatgaaaagtataaagtttggcacataaatggtgcccaatgaatgcttatttgctatgaaaattatcatttgccaaccttcccccacaaaacaatgatcccaaagcagccagacaaatgcatcttctaaagaagcatagaggtaccagaatagcctcttattttccccacttgctctatttcttattagagtatagcttcaggcattaacattatctgtacctgaatagcttgtaccttccaagtaatcatcattgttttgctttattatgtgtgctttctgggagcagagtttctttttagcttagcaaaatgccatatgtattagagtcattaattagcaaatgacttatttgataaaaatgacaaaaaagagtaaaatcaccaaatactggatccaaatgacctaatacataattgcactggaaattctggagatcatcaagaaaatactagtaacataaagatatcactggatgaaaagatctattcattgattcactcatttcttttcagtcatttgataaaaataggaaagtaattgatcatcaacaattgtggtccctaggctcttggctaccagtttcattccagaattagaacataaaatttctattactatttttatactttaaaaagtctactcagctagattaatcctcttacctaaaaactaagtttctttatttcctgtagactagtgttctcaaactttagcatgtattggaatcacctatagggcttgcttgttaaagcatggttcattgggcatcaccccagtattcctgattcagaagacgtatagtagcatcagagaatttgcagttctaacaagtttctgggtgatgtgaatactgcttggcgtgggcaccgtactctgaggacccttgttgtagaaaatctggtcataggtagcagacaaagaggagacagcaaaacacatggaaaattttaggaaacttacaactaggggatgcagctgctcttttgatttttttttttttttttttttttttttgagacagagtgtcactcttgtagcccaggctgcagtgcaatggcacgatctcggcccactgcaacctccacctcctgggctcaagccattctcctgcctcagcctcccgagtagctgggattacaggcacccaccaccacacccagctaatttttatatttttaatagagatggggtttcactgtgttggataggctggtctcgaactcctgacttcaagtgatccgcctgcctcctcctcccacagtgctgggattacagatatgagccactgcgcctggcccctcttgataatatttaaactagaagtcacctgtgtttgttcacacttcccttctctctccagctagattgaaggcaggtacattatcatatatgcagattataccttctttgttgtgcttgccacatagaagccatgctcaactgatgttaaacagttgatcagtttagaaggcgaagtctgaaagtgggaattgcttcatgggttttttgtttttttttttaacagatcagctaaagtcccaccactttgttcatattggcctacctaatgatgtttaatcaacctacaaagttaaattatgtaataaatattggagacaaattgctttggagtttctcagctaaatttgtttctctctgtttttaatatatacttagttttggtgtttttaaagtattattttccttctcatctctctttttttctgatctggttcttacatctcatttgctgtaacagttcttggtgtaaataaagctgttcttttattataagcttatttatatccttttataaactatatgacattcaatgtcaagtatgtgtatacaagtaaatataagtaaatatctatctgtttgcatatatgcacatatttgatatataatgaagactaaataccagtattgaaagtcttaacttcaatggtgttaaactgaagccaatgtgaggaataatattgcacatttgctcaataatatgattggtttaaacagttgaaaagagtgacagaggaagtcagtagaggaataaaacccagataaaccaaaaaacacccctgcacattgccactggtaaattgaaaatcaaattgacggtttacaaatgtgaaacaaaagccttaagcctgttggtaactaccttataatgtggatcggagatcattataaagggggaaaaaagacagataatgacctccattctaacagatttaaccttgcaagacgaaattgcctaaagattatcaaattataggtaaatataaaagcacttgcaatccctttcttaggcatattgatagttgtgtttttctttctttttaaattttgtttccctcttctttatagttttctaggaaggcaatatgactatgcatgggaaccaacatgatctcattagatatcaaggaaaatgcttaaaaatggcaataatgaaaagcatttcaaacttttctgtttcctacttccttttccagctcagctgcttcactgtctctccccaacacaccaggcactcccactgccagaggctacttacttgttttccactttaacatacctctcagccttctacccatgtaaccaccaccacccatcttggtccatctggttcacaccattcccctgaatatttcattgactcttcaatagcaacttgcacatacttctgttagcaccttcctctttgatattatacttatttgtatagtttacttccagtagactctcaactccttgagggtaaaagggaacttgctcctttttgaaagcttcattcctgaaacggtgcctagcatatggaaagtgcagtacacatttgaggagatcagggaggtagggatgtgtttgtcttatttctgtgctttacttaggttacttaccttgagtttctgtttcaaagcacattttctctgaaatgaagccaaagatagttataataattgtttctatctatgcatattttattatggaattaatataaactactgattctaagaaatgttgccagcacatccactgattttattatgaatttttgattacgaatgcatatgtatattttaatggctgtcatggaagcccatttatgtagaaaaatgttattttattaattatatcttctaggtataaaaaagtactgaaaaatatgttggtcatgtaaaatttccaattttcccctcctttttaaaagtagcattatttcccaagtgcacatgtaggataaatttttaattcagaatgtagactaagccctgtgttcatttaaaggaaaaaaaaaaaaaaccctgcagaattgtgaatatccaaaaatcagatattgaatatcaacagtaattgccttcttagtttttaaaccactgtattcatcttgattattcatcttaagataggagtggggatcacctagatacttaaaatactggatacattctagatacttacaaaaaaatttatggccaatgatctttatgaaaaatttctcctagcaacctcagatgtcctgtttcagaactttgaaaatgcctataaggtgaatgaagtctgtttggggtgctttgcaaatgttgcctgatgtggcctgtgctaactctgcacatacctttagtgccatccattgcaaattttcatttggctaagaactttgggactttttgttggcttaagaaatacagttattatgctagttaactttattttaaagacagttttgcaaaattcagttctatggcacagaaacatctcttttgatttttctaggcctttacgcttaacaagttaacaaaacagaaagaaaaccccaaatccttaatattaatatttataggactcacttgggccaatttcatttggccgtaatgttatcttgaagtgtttaatattgggccccaaattggcaggtattaggtggccttcatagtttgacttgcccaacagtcgttctagagcaagagataaattgaagggtgtgtgtggatgtgtgtgtgtgtgtttgtgcgtttgagtgaaaagaagagacagagagggagagagagaaagagaacatgcacgtggggttgaggggagacatttgacagggttgtaggaagagatggtaacaatgctggttgccttagtaggcttaggttttatctttgaatgtcttagggatttctcctcattcagcactgaaccaattaatagcagcagtaaagaaatttgtcagacatggtggttatatcaggacttatataggaaaatagtaatgaactctaggaaaataaataaggataagttcaagaaacataactgaaactgctgcgctggtataaattgaataataaaatttctagtcatattttgccataaatagaggtttgggaatttgtcattcaccttatttaaaattcagaaatattaaaggtacagagttctctcattacagaaataatagaattccagccattactgagtcagggtcatttaaatggctctagcatgcattatatcagtaagtgggacatctgtatgaaatgtccacctgctgatctgatacccccactccaagcacatttcagcgcaccacacttaatcattttaagatttcttctaatgaagccttatctagattaacattttaagcacaaatactttcaggcattaaaactctcacactaaatgaaattgcattgtcttgtttacccttgttgattaataagcactctgttaactgttagaacagtccaattgtggcagtagaaggagattagtaattcagtgatgtttgtggatataatcatcatttctcctgaaggctccgaattagaatatcacttacacactatctgtaggcaaagaaaggatataatatttttagacatgtgtacccactattttgcttgaatcattcagtttagggtcactgcagcaatacaaatgcttctgggggcaaaatgctattttggtgccggcatgtccttcttaaatagtgtgaatgtctattaaaagaaacacagcaaccaacaaatagtgcagtaataatccagtatcttaattttcgctttcagaacattattgctttgttaatcaagcttcggaagaggaatattgcttatctttttttttcagataatagattttatatataaaaattctttgcaatcttgtttaacttgttctcagccagtagaaaactgaactttttgcctccaaagaatgtaggagtaaatttggaaaaattctatttcttttcggaggatttttctatcttctgcgtttccttcgaccttatgtcaaagcatgtcaatctgtttggcattcatgtgacctaaatgatttatttcattaggctagaaattgttaattacccaggtgtctagggaggaccctacatttcggagggataaatcagtgaaaagtgtggaggaatgggatgcagctaaattctttagcatattggacttctgtaggaggcctccattctaaaagggacatcagagctcttcttgtcctattgttggtagctgagtgtatcactacaatttgaaattatgatggaagaaggtgtttcatgttttagggaactctgccctataaacactcatagattggtttctctctatgttgcagtccctctgtcgtgaaatcaagcaacgacgtcgaggagttgcctccattctgcgactatgccagcatcttttggatgaccgggagacttgcaatctgaatgcagaccaccagcccatgcagctgatcattgtaaatcttgaaagaaggtgggaagccattgtcatgcaagccgtccagtggcaaacacgtctacaaaagaagatgggaaaggaatctgtgagtgatgctttttttaagcataattgtctgtcattttctcagacaaaaaataattctttcaggcttggaaacggtgttcatcttataaatggttttactaactaacttaaagtggttttgccatcttacaagtggttttaactaactaaagctcatagttttactacgaactagctgtccactaaatgaaactccatttgtcataacactgacatttatttgctttattaaaattcctttagtgtacctcattgtctttttgaaaaaaatcacatggagatttcgcttaaccttaccaacctaagccattaattctttcaatcattccttcactaacaatattcattaatcatacaataacccatgaatattttgctagaaagtagcttagtactgtcagagcatatggagtaatgtgtatgctctgcagataatacaacgaaataaagtacattgtttacttttccctgacatgacatgagttaacatcatctatttgtacagtaatctcctagtgttcctgcttagagcttcttctgatagttacattgctgagaattggcaagtttcctcttagagttttaatgcagtgctcaaggtggtgagtagagattccttttaaggattttccaaattgagtacaggtttaagctgttgctagatgaaggaaatagatataactagaagttgtttccttgtaatatacgatgcatatttgtccagagagccttcatatcctttaggaaagaatttatcgataaaaaagattgcatactccaaatgaccttgaggtcaatgtctattagttgaaggcccaactcccatgtttgacttatataaatggaatgcatacatacatacatacatacatacatacatagaatggaaagttttccttatatgtttatatttttcagttctataactttggaaagttcaggatccaaaattgaaaaatcaaatgtaaaaatcatgaaaaatcctcctatgaattctgattttaacgaagccttaatatctgctctttgacgtgttaggcacttgggactgggaacagaagggacaatgaatcagcaagccatctaattctttttgcatctgtagatatattgagtctagggggtgattttatcgtcaatagttctgtttaattgttttaagctgaagttgttaaatttcttaagacttccaagttattactagtaatcagagtcaacataattagatgtcttttcttgaaatgacctgtttttttgtaaagctatttagctggcatgttttttgtttgttttgagagtgtttggaagggcagatgagattattattattactttctatacttttaagcctgtaatcgtggtagtggccataagatatatgcaaaaatcaactgcagcaggcaaagttgtgaaatttttgaagcattcaaactgctttggaggaggcaaagttgtgtttctttgaggatttatttgaaatcgtatgatcaggggttctagagcagttctctgcagactagatgtagacatttttatcctttttttttttttttcaaggatggagtctttctctatctcccagactggggtacagtggcctgatcatagcttactgcagcctcaaactcctgggctcaagtgatccccccacctcaacctctcaagtagctaggactacaggcatgtgtcagcatgtctgcctaatttttattttactttttgtagagacatggtctcactatgttgcccaggctggtctcaaattcttggcgatcctcccaccttggcctcccaatgtgctggggttgcaggtgtaagccactgcactcagccttttattctacttctatggtaaaggcaagctttagctttgaggcaaccctggctgcttcttaaaggttcaagctactacatacaggtagatacaaattccaaacagagaaaggtgtttccttttgtttaaggtgactgctgaatgtgtagactggaaaaatgaaggtagcaaataaggtcctctgtgctgaaagttgaaaatctctgtcagaaaaggaatgaagagagtggtctaatgccaacaaatactgtgagcaccgggtacatcattcagtgggagatatttctctgcttcttatctctgttggttgagtgaagagtccaggttgctttgaagttgccaatgtgggaggctgcctttgcagagaatcagaatcctctaagttggctcttcagttatcatatgtccccactcccatttcatccttgcttgtgcattgggactttcacttctttgatatggtttgtctgtgtccccaaccaaatctcctcttgaattgtagctcccataattcctagatgttatgggagggaccgagtgggagataattgaatcatgggggtggtttcccccatactgttctcatggtagtgaataagtctcactagatctgatggttttataaggggaaacccctttcacttggttgtcattctctcttgtctgttgccatgtaagatgtgccttttgccttccaccatgattgtgaggcctccccagccacatggaactgtgagttcattaaacctctttttctttataaattattcagtcttgggtatgtctttatcagcagtgtgaaaacagactaatacactgctatatcccccagggcctgggaaatacttgcacatagtaggtctacaaataagtatttgctgaatgaatgagtacatgtgttcatttaataaattttgtttcattctggcatttgatttggagttactgtatctatattctaaatttttacattttttcacaaagtagctgagtgttatgtttctataagaacaccaagaagatgatctttaatctttcttgcttaataaggcctccccagactctcagacctgtttcctaaactcaaggagactgtcagtctctaagtggagtctaaggaggctaaagtggctaacattgctacagggcagagtgccaaaggggaaagggctacacagacagggcgcaccggagatatacagagggatgctctcaagtactcagcagaaggaaccacctgaaaggattagagggaacactccctggagcttgcacagagctagaaatcattcccttttccctcactcatagtagaaaccctcatcattcacaaggcatgtgatagggtaccaagaaaagtttttgccttagtaatggggcaaacttagactaaatgctgctctggtcttgcccaaaaaaaacttaaaagcaagacctgaaaggatcaaactgtttcaaagtaatttaactatactcccaggacaaagctcaagaatatttataggaatacaaatacccaacatacaacaagttaaaatttataaaatttatagtgtctgacatccaatctaaacctaccaggaatggaaagaagcaggaatagtcagctgatgtgaatatgaatattaatcaatataaactgatccagaaatgtcacagagtatagaattggtagacaaaaacattaaaagttattatacccgcattccatatgttcaagcagctggaaaaaatattgatcatattaagtagagacattaaaaatatctacctgaaatcacattataaagaggaaaactatcattactgagatgaaaaatacactggatgagattaacagccaattagacatcacagaagaaataatttgtaaacctgaaaacatagcaataaaaattgtgcaaaatgaagcagaaagaaaaaaagacaaagcaaaataaaatcagagcatcagtgagctctgaggtatcttcaagcagcctaattgaagattagaattagaatcccataataaaaggaaggtggaagctgggtgctcttgctcacatatgtaattccagcactttggtaggctgaggtgggaggactgcttgaggccaggagttcaagaccaacctgggcaacatagcaagacctcatttctacaaaacaatacaaaaattaggcaggcctgaagacacatgcgtgcagtcccagctacttgggagacagaggcaggaggatcacttgagcctgggaggttgtggctgcagtgagctgtgtttgtgccactgcactctagcctggatgacagtcagaccctgtctcagaaaaataaaaataaaaagatagtggaataaaataacctagaattatatatacagagaaaatatcattcaaaaatgaagacaaaatagttttcattcattaaaacctgaaaatattcattacccatcgacctgtaccacaagaaatgttaaaggcagtccttcaaccaaatggaaaattatatcagatggaaacctggataagcacaagggaatgaagaagactgaaaatagtaactatgtgggttactatgaaattttttttgtattatttaaatctctttaagtggtaatagactgcttaaatcaagttgataacagcttattgtctatttataacatatgtagaagtcaaacgtatgacaacaaaatattgcaacggccaggaactatgtggtttttattctatgtgaggtggtataatatcatttaaagtttttttttttgaaaagaggattaaagaaaaaattagacatgtgataagataaaatatatggttttgggttttttttatttgtttgtatttttagatacggggtcttactctgttgctcaggctacaatgctatggcacaatcatggctcactgtagccttgacctcctgggtgcaagcaggtctcctgcctcagtctccaagtagctgagaatacaggagcatgccagcatacccagcaatttttttttttttttttggagagatgggatctcgctatgttgcacaggctagtctcaaactcctggcctcaagcagttctcccaccttggcctcccacagtgctgggattacaggcatgagtcgccatgcctagcttataactctttaaaaacataacaaaaagctataatgagtaggccaacagaggaaatgaatagaatcatttaaaaaaaaaataaaagaaaaagaataaaaaatagatgcaataaatagaagaatagcaagatggaagacttaaaacaactgcataaataatcctgttaaatgggaatggactaaaagccccaattaaaaagcaacaatgatcggattaggtttataaagctctactgagttacatgttgcctatgagaaacccaatttaggccagatgtggtggctcacacctgtaatttcagcactttgggaggctgaggcagcaggatcacttaaccccaggagtttgagaccagcctgggcaacatggtgaaaccccgtcactacaaaaaaataaaaataaaaaattagccaggcatggtggcagtgcacctgtggtctcagctgcccactactcaggaggctcaggtgggaggatcacttgagcccaggaggttgaggctaccatgaacagtgtttgtgcccctgtaccccagcctgggcaacagagtgagactctgtctcaggaccaaaaaaaaaaaaaaaaaaaacaaaggaaacccactttaaacataaagatataataaagctaagagatggaaatatatatattaagctaacacaaacagagttggagtggctgtattaatagtaaacagtgtagatttcagagcaaagaagattacaaattataaagaagctcattcttaatgataaagatgccaattaatcaagaagacaacattactaaatgtttatgctctaaaacagagctttaaaatacataaagcaaaaattgatacaactgtgaggagacaacaaaaacagaccattttgggcagagattccattactttttctcaatagctgatagaccagaaaaatcagtaaagatataaaagacttggaatgatactataaagcaatttaattggcacttaaaacactctatccaaggcttttatcaaaaggataatgaataacaattgttggtgagggtgtagaaaaaagggaacccttgtccactgttggtaggaatgtagattggtgtagcctctgtgggaagcagtatggaggttcctaaagaaagtgaaaatagaactaccgtatgacccagaaatctctcttgtaggtctatacccaaaggaaatgaaatcactgcctcataaggatgtctttagtcacatgctcattgcatcattatttatcatagccaagatatgggaacaactgaagtgtccattagatgaatggaaaaagaaattgaaaaaaaaaacatatatatatatatgcatgcttatacacatatacacacacaatgtaatatttggccttaaaaaaaaaggagatcctgctattggtgaaaacatggatgaaactggaggacattatgctaagtgaaataaaccagacacagaaagaaaaatattacatgatctcacttatatatggaatctaaaaagaaaaaaagaaagaaacagagaatctgaagggaaatggaaagatgtaggtcaaaagatatgaagttggagttatggtcctattaaaaaatctagagatctaatgtacaatctgagatgatggatatgtaaatttgcttgaatatagaagtcacttcactacatgtatcaaaacatcatgtcgtacacaatatatacatttaaaaatcagtcatgtcatccagcagcagcagaatatacatttaagtgcacacataacatctactaaaactctcttctgagccacaaaacaagtcttaaatttaaaagaattcagccaggtgcagtggctcatgcctgtaagcccagcactttgggaggctgaagcaagaggatggcttcagcctgagactagcctgagcaatatatcgagactccatatctatttttttaagttaaaataactcatgtcatacaaagtatgttatttgactataatagaattagtttcaaaataagtaatagcaatatatttggaaaatcctcaaatacatggaagctaaataacacacttatatacaactcatgggccaaagaagaaatgaaaagggaaattagaaagtatttttaattgaatagtaacaaaatattaaaatctgtgggatgccaccaaaactaagatcttagttttcaccttatgaaactagaaaaagaagaccaaattaaacccaaagtaaataggagaaagaaaataataaaatcaaagcagaaatcagtgaaatagaagacagaaaaaataataaagaaaaaaatcaatgaaatgaaaatctggggttatttttgagaagaccaatgaaattgataaacctctagctagattgattagggaaaaaaagagaaaaataaattatcagtatcaggaataagagacagacatcactacagcttctaccaatactgaaagaagactgtcagccaagatcgcgccattgcactccagcctgggcaacaagagtgaaacttactctcaaaaaaaaaaaaaaaagagaatatgaaggtaattttatgaataatcttttgtctactaaatacattgagtcattagtttaaaacctccccagaaagaaaatttcagacctagttggctttataggtgaattctaccaaacatttaaagaatacataatattaattttatgcaaagttgtccagaaattgaaaaggaaagaatatttttcattctcattccttgggcaagcattacccagatgtcaaaaaggcaatacaagaaaactgctggatgatatcccttatgaatgtcaataaaaagattcttaacaaaattttatcaaatcaaataaaaagtatataaaatagaaactacatcatgatattgtgaggtttagcctagaaatacgtagtttcatacttgaaaacaatcaatgtaattcatcgtatttgcacactcaggaaacccatttgattatctcaatgctgaaaaagcatttgccaaaatccaatatccttcctgataaaaactctcagaaacctaaggaaaaaatgtccaggtgtggtggctcacacctgtaatcccagcactttgggaggccgaggtgggtggatcacttgaggccaggagttcgagaccagcctggtcaacatggcgaaacccccatctctactaaaaatacaaaaacttagctgggcatggtggtgcgcgcctgtaatcccagctactctggaggctgaggcaggagaattgcttcaacctgggtggtggaggttgcagtgagccgagatcacgccactgtattccagcctgggtgacagagagcaactctgtctcaaaaaaaggaaagaaaggaagggagggagggagggagggagggaggaagggaaagaaaaagaaaggaagaaaggaagaaaagacctaaggaaaaacttaataatggggatccacagctaagaaacagttaacatcatactcaataggaaaaaacagaatacttctcctctaagatcaggaataaggcaaagatgtacaatttcaccatttctattcaaaattgtattggaagttttagccagatccataaagcaagaaaaataatttaagacatgccatttgtcaattaagaagcaaaattatttttactcagagattccatcaccatctatgtagaaactgctacagaatctacaaaaagatactagaacaaataagggaagttaacaaggttataggatacaagatcaatatataaatgtcaattatattctagatattactgataaatagtcataaattgaaatttttaaacattcaatttataatattaatagtacatgaaatgcttagggatgtatctaacaatagatatggaagaactgtatgcaaacagctacaaaatattgctgagagaaattattaacaaataataactaaattaatagtggactatactgaattcatggatcagaggatacaatattaagatatcaaatctccccaaatttatctatagaattaatgtaatcccaatgaaaatctctgtgatttttttttttcgtaaaaatttgtaagctgattctaaaattcatttggaaatgcaaaggacatagaatacccaaagcaactttgagaaagatgagttaaattggaggatttatacctcctgatatcaagagttataataaagctacagtagtcaagaaagtatggcattgctgtcaaggtcaacaaatacatcaatggaacaaaataaatatttcagaaatagagctacacataaatggtcaattaatttttaatagaagtacaaaggcaattcaatgaagaaaggatagtcttttgaacaaatgatcctggaacaattgaatttccatatgcacagacatagattgatccgtataatgtgccatataaaaattaagcaagataaataattgacctaaatgtaaaatgtagaaaattttagaaaaaaaatcatagggtaaaatcttgtgatcactggagcaataataaagggtaacgagaaatcttttgggagtgatagaaatattcatgatcttgtttgtagtgatcattttgtatgcatattcttatatcaaaacataaaattttacattgtaatatgtataatttactttatttaaattatacctcaataaagctgtttaaaaaaaacacatattcagaattttaattacaaaggagttgatagattaccctgaagcctggcagtgagtatccttgtcttggtataagtaaatgaaaatgggcattccttttctgaagaaccaaacaatgctaataacagctaacacatcgcacttgatatatatcaggcaatgttcagtcctttaagactcttaataaccatataatttacgtgccattatcctctattttacagaagaaaaaaattgaggcaaagaaaatttcagcaatttttccagagttaccacctggtttgtaactcatctgagatttgaacctgggagctctggcttcagagtcagtgtcctgaatcaacaacctaaactgcctctctaagacaaagccttctttaatgataagaatggtacatatgcagccacctttaaatcaagtaaatgaacaagactttcataaatacaaattaagtgacttagatttggaaattaggtgattctattttcaatatattttggaaaattatggatcaaattttcgtatcacatgtgacatatggagaagttttaattgtcaaaaattatatctaaatgggctatgaaaagcaataatttcttatgagaactttaagaaaaaggcgtaagcaagcactttctgtttcaatgtgctagagaaactagagaagaggatttgggctgctgtgtgaattggttgaccactgatagttcactgacacttatttaagcatttcctataagtccatgggaattcttattaaattcacacatgcttcacagaaactcatgacatttatggaatttgtagtaagaaggacacttttccagcagtgatttgtatataccacaaatcaaatttctcttctcaaatgccatcttaacaaacctctctactgaacaggttcagtctagtatacacaatttcctcaggggaatctgcaaaattgctaacacaagagggtgttatacattgtgaggagacatgtttctgtttttaacttttttccatattagttttgtttgtctaacttactgttggagatccctctaaaaagccatgtggcatatcttaagtgtcactcaccaagagagtggggctgttgtattacttgctaacagcattgaacatgtactgtttctcagttgctgtgttaccacttttaatatgttgtgttatttaatcttcataacaaccaaagatgaagaaactaaatttttgatagattacataaattatacaaggttatgcagccagtaggcggagaaaggtgtggacgcaggcgtatctgactccaagatgtaaagttcttttagttcttaaagggtttattgacaacaatttcttgcctttcttccccctaagactactttggttgtttagtatatcttggttaatgatttatattgttattctttttattggagactgcctggaattcctttttgaattgaatacaagaagaatcatataaatgattgatagcacagtaatttttgttaatatactgttttctattcattagtcagttctgaggactttggcatgacatattaaagatctgcagactcaagttagactggattgaattagagaacaccatttggaaataaatccagtgcttccctccattcttgttcattggctcttttttctctattgcatgtccttccaatgaaaattggctcttacataaagagttggattcatcagaagaaatacatgaatagaattaactattggtattatttggaaaaatttcaaaccaaagaatgagaaataacagaataaagaaagtaaatcttgagagggaaaacatttcttttgaataattgaaatttaaaattaaattttgaattgagaaagtttgaataattattaagttacagtttagatttttaatatatatttttaagaatgaaatactttggataacatcatcatatatgatcattcaatgttttttacttttaaaatattaccaaaagtaatagaatgagttctatgtaaaactctcttgagtttcctgttggcagttttcttgaatccaaagacgaaaatgaagggaaaactgatctgacagttaatatatgtgtgaagcttagttggggaagtacttgcaaagtgttgtaaatataaggctctttgagtgttggttggaagtagtatgggattttgctataaatatccttgctttgccagtctttgaaagatcttgtacaggacaacttctttctctcacaactttcccagttcagattcttacgtcatctgtaccatataaacgaatgctatacttatttggacatagtcaaaccaaccaagacataaactaataagtaaaaggacacaaatttctctttagttttcagaaatatgagaatgtgatttaaaaaaaaactggtgaagacacaagtatcattctcagaaaatgaaaatgatttcacaaagtgtcgtattacatttattgatgatgtccccaagtaatgtccaattcactcccagattttttaggaaaatgttctggggtcatttctaacaactgaggacaccactgccattgagtgggtgcatctggggagacagtaacaatgcatgaaacaaccccgtatgcagacagatttttccacaaatgccagcagcgtccccattggaaaacactttgttctgtaaccattttggtgcactgttactttcatgttcgctctgaggacagatctctgataatatacatctgtaaaatactcatttcagctctacttagccctctgaaagacctaaacctttatctttttttttttttttttttttttttttgagacggaatcttgctctgtcgccaaggctggagtgcagtggcgccatcttggctcactgcaagctccacctcccaggtgcatgccattctcctgccccagcctcctgagtagctgggactacaggcgcccaccaccacgcccggctaattattttattttattttatttttttatttttagtagagatggggttttaccgtgttagccaggatggtttcgatctcctgacctcgtgatctgcctgcctcggcctcccaaagtgctgggattacaggcatgagccacagcacccagcctaaacctttatcttaaaagcaagaaaaatttgcctttcctgtctgttttcttacctctctaactctcatataagtcctctgaatagtcctatcactgttttctgagttcagacaagtagttatcagtagcaagtaaattattcttgcttttcaattaaatgttttaaacagaaataatgtggattcctttgaaatatttttatttcaaagagtgtgcttttgaatcctttgtgaatttagggttttaagtttttattctttgtacaaatatatttttttcttttgctctggcactccagaactccagcattgaaaacagaacatcgtgtctagagaaaccttacacatttattggccccaaaaatacataacacatctagccacataattgaaaataataaggccacgataaatgggatggccccagggtaaaacacccaaaggattcaattggtgtcactttgcatcaatgtccatgcatcatggtaattgaggtaacataaccaattaccacattttaattagagttctaagaactcgaggaaatttgcaatgatcagacagctcactttacaaaagaaaggaaagaatgaaagaaagggggggaaccccacactttttctgcctctcaatcttattatttggtgatgcatatattaagataaatagcattcttatcttaatctgacgaatgatttcagaaatgtatgaccaaagaaattctctagattgtgacctcagcttataatttcatttcccatctaggtgtacctcgccattgtaacttggggattcattctaagtttttaagtcagtatctgaacacagtgacacgttattaaatacatatttatctgggtttggttgctgaacaaaaatagatctagatttcaccccccccaaaaaaattaaaagcaaaaagaattactacatttagaaaataattttgacttgtggcaattatttttataaggctagagtttaagtgaaaaacctcctgtaaaattttagtgctgctacataatcaagtaattatgtaattacttgtacttaattacttacaagagagatcgctgttaaaaaaagtctttatgcatgtcaaaaacagctctcttctttagagtatttctaggtaagcttcaaataccaaaaagctctttcaaagtaatctccaataaatttatttttcttttataaatccctcaccatttttttcaaatatatgcaagtacattacatagagatctatatgccctccctcctgtttccacttattacagccaaaaacaaatgtgtcattccaaatccttgggaggctgaaacaggaggactgcttgagcccaggagttcaaggatgcaatgagccgtaattataccacttcattctagcctgggcaacagagtgagaccccatctcaaaaaaaaaaaaaaaaaaaagaaggtgggaaggaagaaatgatttttaaattacacatgaagggcttggtattaaatataagaatataagacatgtatccttaatgtgacagtttccagtagacagagtagattttcaagaaagctgggaattttcttgagtattataatacaatatggtgattaagagctagagccagactctctcacttagtagctgtgtgatcatggcaaattatttaacttttctgtgcctcagtttcttcatctgtaagatagagataacaatgataaactataaaaaccctagaagggaggttcaagatggccaattagaagcagccgtggtctgtggccgcggaactcacggaaaggaatgaaaaggggcaagggaattcagcaccttcaacttatatatccaggatctcacattgaaactaactaagcaaacaactcaacccatgcagaatgaagaaaagcagggggtgggggcaacagcccacctgggagtggcgcggagcgaaaggaacccccaccctcagccaagggaagcagtgagtgagcgtgcaaccccacccaggaaaccatgcttctcccatgaatctttgcaaccggcggatcaggagatcctcttgtgagcccacactaccaggtctttgggtccgagacacagagctgtgtggcgtctcagcaaagcagccactcaggcacaaacagagacccaggagttttacaattctggccctggcatccctggcaaggcgggaaatccatccattcatatccctaggaagggtgctgaattcagggagccaagcagcgtcattctgcgggccccacttccacggcacctcacaagttaagacctactggcttggaattctagccagccaacaacaggctggagtctgcctgagacaggactgagttcctggggagagggtcggccaccatctatgtggttcggtagactcagccattccagcctgccacctttggacaatacaaaccgtatgaacaaggaagggtcctccacaatgcagcacggctgccttgccagattatggcgagactgcttctttaagcggaacctagatccattcctcctcacagggtgggatctccctgtggaggctttagccactccagcaagggttctgcagacagagctctgatctctccctgggacagagctcctgtggggaggggcagctgccatctctgcagttcagttgactcagccattccagcctgccagctttggagaatacaaactgtctggacgcggaagggtctctcccaacgcaacacacctgctctaccaaacagcagccagactgcttctttaagtagatccctgatcccattcctcctgactgggtgagacctcccaacaggggtctccagccaccttctacaggtgtggttgggccggcaacaggtcagtaccctactggaacggagcttccagaggaaggagctggctgccatctttgctgtttcacagccttcactggtgaaacctccagttacaggaaaaaacgagccaactagggcctggagtggacccccagcaaaccgcagcagccctatgctagagtggcctgaccgttaaaagaaaaacaaacagaaaacaacaatatcaacaaaaaagaccctacaaaaaccccgttcaagttagtatcctcaaagatcaaaggtagataagcccacaaaatgagaaagaatcgatgcaagaatactgaaaactcaaaaagccagagtgcctcttctccatatgactgcaacacctctccagcaagggcacagaactgggttggggctgagatggctgaattgacagaagtaggcttcaggaggtgggtaataatgaatgttgctgagctacaggagcatgttgtaacccaatgcaaagaagctaagaatcacgacaaaacagtacaggagctgaaagccagaatagccagtttagagaggaacataactgacctaatggagctgaaaaacacaacatgataacttcacaatgcaatcacaagtatcaatagcagaatagaccaagtggaggaaagaatctcagagcctgaagactatctttctaaaataatacaggcagacaagaatagggaaaaagaacaaaaaggaatgaacaaaacctctgagaaatatgagattatgtaaagagactgaatctacaactgattggggtacttgaaagagacagggagaatggaaccaagttggaaaacatactacaggctttcatccaggagaacttccccaacctaccaagacaggtcaatattcaaattcaggaaatgcagagaaccccagtaagatattccatgagaagatcaaccccaagacacataatcttcagattctgcaaggtcaaaatgaaagaaaaaatgttaagggcagccagagagaaaggccaggtcacttacaaagggaaacccatcagactaaccgtggacctctcaacagaaaccctacaagtcagaagagattgggggctaatgttcaacattcttaaagaaaataattttcttttcttaattaatttatttattatactttaagttctgggatacatgtgcagaacgtgcaggtttgttacataggtatacatgtgccatggtggtttgctgcagccatcaacctgtcatctaggttttaagcccctcatgcattaggtatttgtcctaatgctctctatccccttgccccccactccctggcagaccccgatatgtgatgttctgctccctgtgtccatgtgttctcattgttcagcttccacttgtgagtgagaacatgtggtttttggtttcctgttcctgtgttagtctgctgagagtgatgatttccaccttctttcatgtccctgcaaaggacatgaactcattcttttttatggctgcatagtattccatggtgtatatgtgccacattttatttatccagtctatcattggtgggcatttggattggttccaagtctttgctattgcgaatagtgctgcaataaacatatgtgtgcttgtgtctttatagtagaatgatttataatcctttgggtataactcagtaatgggattgctgggtcaaatggtgtttctggttctagatccttgaagaatcactacactgtcttccacaatggttgaactaatttacactcccaccaacagtataaaagcgttcctatttctccagagcctctccagcatctattgtttcctgactttttaatgatcaccattctaacagtcatgagatggtatctcattgtggttttgatttgcatttctctaatggccaatcatgatgagctttttttcatatgtttgttggctgcataaatgtcttcttttgagaagtgtctgttcatatcttttgtccactttttgatggggtgggtcgtttttttcttctaaacttgtttaagttccttgtagattctgggtattagccctattagtcagatggatagattgcaaaaattttctcccattctgtaggttgcctgttcactctggtgatagtttcttttgctgtgcagaagctctttactttaattagaccccatatgtcaattttggcttttgttgcaattgcttttggtgttttagtcatgaagtctttgcccatgcctatgtcctgaatgatattgcctaggttttcttctagggtttttatggtttttggttttgtgtttaagcctttaatccttcttgagttaatttttgtgtaaaatgtaaggaaggggtccagtttcagttttctgcttatggctagccagttttcccagcaccatttattatatagggaatcctttccccattgcttctttttgtcaggtttgtccaagatcagatggttttagatgtgtggtgttatttctgaggcctctgttcttttctattggtctatatctctgttttggtaccagtaccatgctgttttggttactgtagccttgtagtatagtttgaagtcaggtagcatgatgcctctagctttgttctttttgcttaggattgtctggactctgtgggctcttttttggttccatatgaaatttaaagtagttttttctagttctgtgaagaaattcagtggtagcttcatgggaatagcattgaatctgtaaattactttggacagtacggccattttcatgatattgattcttcctatccatgagcatggaatgtttttccatttgtttgtgtcctctcttatttccttgagcaatggtttgtagttctccctgaagaggaccttcacgtcccttgtaagttatattcctaggtatttattttcttagtaggaattgtgaatgggatcactcatgatttggctctttctttgtctagtattggtgtataggaatgcttgtgatttttgcacattgattttatatcctgagactttgttgaagctgcttatcagcttaagcagtttttgggctgagacgatggggttttctaaatatacagtcatgccatctgcaaacagaggtaatttgacttcctcccttactgtttgaatatcctttatttctttctcttgcctgattgccctggccagaacttccaatactatgttgaataggagtggtgagagaaggcatccttgtcttatgctggttttcaaagggaatgcttctagcttttgcccattcaatatgatattggctatgggttagtcataaatagttattattttaagatatgtttcatcaatacctagtttattgagtgtttttagcatgaagtagtgttgaattttatcgaaggccttttctgcttctattgagataatcatgtggcttaataaaagaattttcaacccagaatttaatatctggccaaactaagcttcataagcaaagaagaaataagattcttttcaggcaagcaaatgctgagggaattcatcgccatcaggcttgccttacaaaagatcttgaaggaagcactaaatatggaaaggaaaaaatgttaccagccattacaaaaacacactgaagtacacagaccagtgacattatgaagcaaccacataaacaagtccacaaaataaccagctatcatcatgatgaaaggatcaaattcacacataacaatactaaccttaaatgtaaatggactaaatgccccaattaaaagacagaatgcaagctggataaagagccaagacccatcagtatgctgtcttcaagagacccatctcacatgcagagacacacataggctcaaaataaagggatagaggaaaatttaccaagcaaatggaaaacagaaaaaatcaggggttgcaatcccagtttctgacaaaccagagtttaaaccagcaaagattaaaaaagataaagaagggcattatataatggtaaagggctcaattcaataaaaaaaagctaactatcctaattatatatgcacccaatacagaagcacacaaactcatacagaaatttcttggagacctacaaagagactcaaactcccacacaataatagtaggagactgtaacaccccactgacactacttgagagatcactgagacagaaaattagcaaagatactcaggacccaaactcagctctggatcaagtggacctcatagatatctacagaactttccaccccaaaacaacagaatatacagtctttaaaccatcaaagattaaaaaagacaaagaagggcattaaacaatggtaaaggcttcaattcaataaaactgactatcctaaatatatatgcaccctatacagaagcaccgaaattcataaagcaagttcttggagatctacaaagagactcaaactcccacacaataatagtgggaaactgtaacaccccactgacagtagtagacagatcattgagacagaaaattagcaaaaatattcagggcctgaactcagctctggatcaagtggacctgatagatatctacagaactttccaccccaaaacaacagaatatacattcttctcagtgctgcatggcacttactctaaaattgatcacataatcagaggtaaaatactcctcagcaaatgcaaaaaactgaaatcataacaaacagtctgtcagacccacagcactgtcaaattgagaaattcactcaaaatcacacaactacgtggaaattgaaaaacatgctcctgaatgactcgggtaaataattaaggcagaaatcaagaagttatttgctagccagctgcagtggctcacatctgtaatcccagcattttgggaggctgaggtggaaggatcacttgaggccaggagttcagaccagcctggccaacatggtgaaaactcatctctactaaagatataaaaattagcaatgcatggtggtgcccatctgtaatcccaattacttgggaggctgaggcacgagaatctcttgaacccaggaggcagatgttgcagtgagctgagattgcatcactgcattccagcctgggcaaaagaatgagactgcatctcaaacaaacaaacaaacaaacaaatagttcttcaaaactaatgagaacaaagtgacaacttaccagaatctctgggttgctaaagccatgttaagagggagatttctagcactaaatgcccatatcaaaaagctagaaagatctcaggttaacaacctagcatctcaactagaaactagagaacgaagaacaagcaaaccgcaaagctagcagaagacaagaaataacaaaattcagagctgaactgaaggagatagagacatgaaaacctcttcaaaaaatcagtgaatccaagagctatttttttttaaattaacaaaagagaccactagctagactaataaagaagaaaagagaaaacaatcaaatacacacaatcagaaatgataagggggcatattaccactgaccccacagaaatacaaccattagaaaatactataaacacctctatgcacataaactagaaatctagaagaaatggataaattcctggacacatgcaccctcacaagactgaaccaggaagaaattgaatcgctgaatagaccaataatgagttctgaaattgaggcagtaataaatagcccaccaaccaaaaaaagcccaggaccatttggattcacagctgaattctaccagaggtacaaagaagagctggtgtcatttctacagaaaatattccaaaaaaattgaaaaagagggacttctccctaactcattccgtgaggtcagcatcatcctgataccaaaacctggcagagatgcaacaaaaaaagaaaacttcaggctaatatccttgatgaatgtagatgcaaaaatcctcaataaactactggcaaactgaatccagccagcagcacatcaaaaagcttatccaccacaatcaagtcacctttatccccaggatgcaaggttggttcaacatatgtgagtcaataaatgtgattcatcacataaacagaactaaagacaaaaatctacatgattatctcaatagatacagaaaaagcctttgataaaatccagtatcccttcatgttaaaaactgtcaataaactaggtattaaaggaacataccttaaaataataagagccatttatgacaaatcaatagcatgctgaatgggcaaaagctggaagcattcttgttaaaaactggcacaagacaaggatgccctctgtcaccactcctattcaacatggtactggaagttctgcccagcacagtgaggcaagagaaagaaataaagggcatttaaataggaagagaggaagtcaaatcatctttgtttgcagatgacatgattctatacctagagaaccccatcatctcagctcaaaagctccataaactgataagcaatttcagcagtctcaggatacaaaatcaatttgcaaaaattgctagcatttctacataccaacaacaggtaagcagatagacaaatcatggatgaacttccaatcacaattgctacaaaaagtataaaatatgtaggaatatagctaacaagggaagtgaaagacctcctcaaggagatctataaaccactgctcaaatcagagagtacataaacaaatggagaaacattccatgctcatggataggaagaatcagtattatgaaaatggccatactgcccaaagtaatttgtagatttaatgctattctcattaaactactatttacattcttcacagaattagaaaaaaactttaaaaattcatatggaaccaaaaaagaggctgaataaccaagacaatcctaagcaaagggaacaaagctgggggcatcatgctacctgacttcaaactatactgcaaggctacagtaactaaaacagcatgcgtggtactggtacaagaacagacacgtagatcaatggaacagaatagagaactcaggattaagacttcacacctacaaccatctgatcttggacaaacctgacaaaaagcagcaatggggaaaggactccctatttaataaatggtgctgggacagctggctagccatatgcagaaaattgaaactggacctcttttttataccatctacaaaggttaactcaaccgatggattaagacttaaatgtaaaacccaaaactataaaaacgctagaagaaaatctaggcgataccattcaggacatagccataccattcaggacatagccatgggtaatgatttcgtcaaacactgaaagcaattgcaactaaagcaaaaattcacacatgggatctaattaaaccaagagagcttctgcatagcacaagaaactcatcagagtgaacagacaacctacagaatgggagaaagtttttgcaatctatccatctgacaaaggtctaataccctgagtctacaaggaacttagagttacaagaaaaatcaaacaaccccattaaaaagtgagcaaaggactcttctcaaaagacatacatgcagtgaactaatatgaaaaaagctcaacatcactgatcattagagaaatgcaaatcaaaaccacaatgagataccatctcacgccagtcagaatgactattgttaaaaataaaaaaacaacagatgctggcaaggttgcagagaaaaaggaacacttttacactgttggtgggagtgtaaattagctcaaatattgtggaagacagtgtggcaattcctcaaagacctagaggcagaaataccatttgacccagcaatcctattactgtgtatatacccaaaggaatataaaagatacatgcatgcatatattcattgcagcactattcacagtagcaaagacatggaatcaacctaaaccctatcagtgatagactagataaagaatatgtggtagatatataccatggaatactatgcagccataaaaaggaatgagaccatgtcctttgcagggatatggatggagttgaaagctgttatcctcagcaatgtaatgcaggaacagaaaaccaaacattgcatgttcttacttataagtgggagctaaaaggctaaatgatgagaacacatagacacatgtgggtgaaacaacacatgctggggcctttcagagggcagtgagagagggagagcatcaggatgaatagctaatgatgctgagcttaatacctaggtgatgggatgatctgtgcagcaaaccaccatggcacatgtttacctatgtagcaaacctgcacatcctgtacatgtacccataaacttaaaagttgaagaaaaaaaaaacaaccctagaagaaaacacagtaaatgcctttctggacataggcccttgcaaagatatcatcataactaagatgctaaaagcaaaaattgaccaatggaacctaattaaattaaaatgcttctgcacagaaaaaaaaaaaaaaaccattaacagagcaaacaacctacagaattggagaaaagatctgcaaactatgcatgtgacaaaggtctaatatccagaatctagaaggaacttaaatcaacaagaaaataacaaacaacccccttttaaaaaatgagcaaaggacatgaacagacacttctcaaaagaaaacatgtatgcatccaacaaacatatgaaaaaatgttcaatgtcattaatcattagagaaatgcaaatcaaaaccacaatgagatgccatcttacaccagttagaatggctattattaaaaagtcaaaaaataatagatgctggcaaggttgcagagaaaagggaaagcttatacactgcaggtgggaaagtaagttagttcacccactgtggaaagcagtttggagagtgctcaaagaacttaaaaccatttgacccagcaatcccattactgggtacgttcccaaatcatactactgtaaagatacatacatatgttccccacagaagtattcacaatagcaaagacatggaatcaacctgaatgcccatcaacaatagactggataaagaaaatgtggtacatatataccatggaatactatgcagccataaaaaagaatgagatatgtcttttgcagcaatgtgaatggaactggagaccattaccctaagtggattaatacaggaacagaaaaccacataccacaatgttcttacttataagtgggagctaaacattgagtacacatggacacaaaaaggaaacaatggacactggggactacctgagaatggagggtgggaagagggtagaataaaaaaactacctatcaggtactgtacttattacctgggtaacaaaataatctgtacaccaaaatcctgcaacatgcaatttaaccacataacaaaaccacatgtactttctgaacctaaaataaaagttggaaaaaaaaaaataatacctacttcataggtaatgggaggtttaaatgaattaatatgtaaaaactgttttgaacagctgctgccacatagtcaatgaatgttaattgctattattagtttagttatgctattgtagtaactaagtcttatttatatttgtaattgtctagaaataatacgttgtgtggcatagtagacaatatatttttgcttagtaaacatatgaacaaatgacagagaagtgaatagaggaggaaatcctgtcttaagtgatggatttcatgttagacttcatttatccttgctctcctccttttcagcaagagtgggccaaagctaaaccagttgaattattctagatgtatccctttcagtactggctgatatagttgattttctctgctgtttccttgttttccatttcattgacttttatgctcttatttttaatatttttttcttctgcttcatttaggcttaaattgtttttctttctcagtttcctaaggtgggagattaggttgttgattttaaatttatcttcgaatatatgcacttaatgctgtaagtttccctctaagcactacttttgttgcatcccgtcaatcttgataagttgtatttttgtttttatttagttcaaaatattttaaattttttattgagacttctttaactcaggtgttatttagtaatgtgttgtttatttctcaatatttgggaaattttcagctacttttctgttaatgatttctagtttaatttcattatggtcggagagcattcgttgtatgatttctattcttttaaatttgttaaggtgtgttttgtggcccacgttgtagtatgtcttggtgaatgttcaatatgaacttgagaaaaatgtttgtattcttctgttgttggatcaagtattctataaatgtcaattagatcaagtcaagtgataatgctgttcagttcaactatgtacctattgattttctgcctgctggatctatcacctaccaaaagagaggtgtagaaatatccaacaataggctgagtgtggtggctcatgcctgtaatcccagcactttgggaggccgaggtgggcggactgcttgagcccagatgttcaagaccagcctgggcaacatggcaaaaccctgtctctctctctctctctctctctctctatatatatatatatagaaatatatatatatacaaaatatatatatagaaatatatatacacatatatatatacacatatatatacacacatatatacacatatatatacatatatatatacatatatacacatatatatacatatatatacacacatctatatatacatatacaaaaatatatatatacaaaaattagccaggcatggtggtacacacctgtagtcccagctactcagaaggctgaggtgggaggattgctcaagcctaggaggcagaggttgcagtgagctgagatcctaccattgcagtccagcctggtcagcagagtgagaccttgtctcaaaaagaaaaagaaaaaagcaatattgagcaataataatgggtgttctgtttctccttgcagttctttcaatttttgcttcacatattttaatatgttccattgttttgtgcatacatgtttagaattgtatgttttcttagagaattgactcatatattattgtgtaatacccttcattatccccgataattttccttgttttgaatctgcttttcctgaaattaatataaacactctagcttccttttgattagtgttagcatgctatctttttcttcatctccttacttttaacatagcagagtctttgtatttaaagtgggtttgtgggccagttgctgtggctcatgcctgtaatcccagcattttgggaggccaaagtgtccagattgcttgagctcagaaattcgagaccaacctgggcaacatagcaaaaacccatctatgcaaaaaaaatacaaaaattagctgggcatagtggtgcatacctgtggtctcagctactcaagaggcagaggtgagaggatcacttgagcccaggaggtccaggctgcagtgagccatgattgtaccactacgtgccagcctgggcaacagagtgacactctgtctcaaaaataaataaataaataaaaagtgagtttgtatagacagcatatagttgggtcttgttcttttgtctattctggcaatctctatattttaattgcattatttagacccttcatatttaaagtgattattaatatagttggattaatatctatcacattagtaactatgtttattcattgcatttgttctttcttttttccttctttttctgctttttttattttaaatgaacattttatttcatttcattttgtttcctcttttaatgtatcaattatatttctctttaaaaaatttagaggttatcctagagcttgccataaacattttaaacaaatccgagtttaccttcaaacaatactatactgcttcgcatgtatagtgcggttaacttataacagagtatactcaattcctccctcccatttcttacaacattgctgtcatcactttattcatatgtatggcctaatcacccagtacgttgttactactgttaatttaaacagttttcttttagatcaattaaaaataagagaactgaaagatttgattttaccttatttatttcttctctgaggattctttctttatgtcaatccaggtttcttacctatgttatttccttctccctaaataactatttttaatattttttgtagggcagttctgttggcaatgaaaccacccaggttttgtttgtcctgagaaagtttttatttatccctcacttttgaaggagaatttgtggatttggaattataggttggtggtttttttcttataacactttaaatatttcacttcactctcttcttgcttgaatgatttctgatgagaagtccactgtagttcttatccttattcctctatggatacagttttttatcctctggcatcttttaagattttctctttgtctttcattttctacaatttgtgtatgatttgcctaagcatagattttttggtatttatcctgcttcctggctctgagatttgtctgtcattagttttgaaatactctcaaccatttcacttcaaatattctactccatcctttctttgctttctggtatcccaattatatgtatgttataccattagaaattttcccacagttcttgggatattttattctttttacttttttctctgcatttcagtttgggaattttttgtttattgtaattatgttataccactcagcaaggatatgttttggcttcattttgcttgtaaatcaaagttcataatcttccaagcctccatagtctggtaccactgtgactatataaatattttgccccaagaatagcctacctatccagttggttctaagtatcccagaaatgggcagaagatatgaccaagtgattcacaaagtaataaatacaaaaggttactaaacctataaataaatatccaatccaaatagtagtgaaagaaatgcaaagtggcagtttgtcatttgctatttgtttactcatcaaaaagagggaaaattaaagacaaatttcagtgttagagaggtagcaatcggttgcaaattcacataatctttagctatttatcaatatcctgaaaagtgttcacaccctttggcctagtatttatctttatcaaatttaccctcagaaaataacctgagctatgcatataaagatattcatcatgctttatttacaaaaccaaaaaaaattggaaatatgaatttctaacaatatgggttttaagtaagcctttaagagtatttaacatccttaaaaatcacgtttcttaaaaatattttatgaaggctgggcacagtggctcacacctgtaattccagcactttgggacgccaagatgggcagatcagttgaggtcagtagttcaagaccagcctggccaatatggtgaaaccccatttctactaaaaatataaaaattagccaggcgtggttgtgtatgcctgtaatcctagctactcaggagactgaggcaggtgaattgcttgaactcgggaggcagaggctgcagtgagccaagattgcactccagcctgggcaacagagtgagtctctgtcttaaaaaagattttttagatctgtcttaaaagattttttaaaaggaaatattttatgaattaagaaatatttgtggccaggcacggtggctcatgcctgtaatcccagcactttgggaggccaaggcaggcatatcacctgaggtcaggagttcaagaccagcctggccaacatggggaaaccctgtctctataaaaaaaaaaaaacaaatatttttgatgcacaaagaatgaaaagcagatatgcatataatgctgatcatgtcgggtatacataacaagccatcaaatatttacaggtgttatctctgggttattaagaataatttttattttcttctttatattttgctgcgctaaaaaaattcctacagaattgtaaaatgcatcgttttatagaagaaaagttcttctaaaaatcctacttaactcccagagtcgagctcaaatacctcctcttcccaaatttctttctgactactcttattttttttcggagatacttcttagaagtctgattacttttgtttacattgatctttccattttctctgtttatctttctctacccagcttttgagtctagatgctcttttcattctcttctttcgctctaggcaatctcactcatgcccataacttcaagaactactcatctgagctctaaacacatacatacagctccacagctctactgaggtttcctaaaggcatttcaaactcagtttgtcaaaaacaaaactgctgatcttccttgacaaactgattcttctccattattctggctctcaaggagagatagcacaatctcttcaatctttcccaagatcatgggtcatccttggcaactcactcattatcagtccatctagtccgttaatgggtctgattggttttactttctaaagagctcgtaaatccatctacttttgtataactgcagtatcaccaccttagcccaacctaccagaatctctcataaatgagttaatacctataaagtgcttaggatattgcttggcacaaagaaagtatccaataaatgttagttgttattcttcctattcttatcagtaccacttatctgtgccacttacctatagcctgtaatattgccttcctcacatcaacttttacccacttccagctgttctctacactgaagcctatgtaatctttcaaaaacactatctgattatcccatcttacctgcttctccaggcacataacctttctcattgcaggccagaccctccaaagggaggaattttacagctgggctgctgggggtgacatcacatattggtaggaccacgaagcccgcctgagtctcagaccagcaagtttttattaagggtttcaaaaggggagagtgtgtaaaacagggagtaggtacaaagatcacatgcttcaaagggcaaaaagcagaacaaagatcacatgcttctgagggaacaggacaaaaggcaaaacagaactactgataagggtctatgttcagctgtgcacatattgtcttgataaacatcttaaacaacagaaaacagagttcgagagcagagaaccggtctgaccacaaatttaccagggtggagtttttccccaccgtaataagcctgagggtactgtaggagaccagggcatatctcagtccttatctcaaccgtgtaagacagacactcccagagcagccatttatagacctccccccaggaatgcattcctttcccagggtattaatattaatattccttgctaggaaaagaatttagagatatcttccctacttgcacgtctgtttataggctctctgcaagaagaaaaatatggctctttttgcccaaccccacaggcagtcagaccttatggttgtcttcccttgttccctaaaaatcactgttattctattctttttcaaggtgcactgatttcatatttttcaaacacatgttttacaatcaatttgtacagttaacacaattatcacaatggtcctgaggtgtacatcctcagcttacgaagataacaggattaagagattaagacaggcgtaagaagttataagagtattatttgggaactgatgaatgtccatgaaatcttcccaatttatgttcctctgccacggctcctgcctggtccctctgttcagggtccctgacttcccgcaacattgaactacttaaactattccttcatcttctcatatattcatggttttgccaaccaaagaaacctctagttatacttatcttatgcagagttgcccagccatgtaccatgattcatttagatgtggactaagatattgaaattgtcatcctgcgtgtaggaggagagatgggtggggaaggggagacctgggagaactataggctatttgccttctgcggtgagcaacttccttcccagtatgcaaatctatgataacattttctgtgtgttatgacttgaaaaaggttgagaagcattggtctagaaataatggatattaagcctcagtatcaactccctgatcatgaagcagcagtcacatttaaattttgactaaagagaaaacatttaagtggaaatgccactggggtcaaataattttcttatccctctatagaagatcagatttactctaattttctttttcatttagttctaatattttaggtctgttgtttcccttgaattgtgtttatgaatttttaacatataaatgggtaagtttgcagaatatcaaacaaaagatgctatgtttagtcatccagggggttaacattgaaataccaatattgaaaaagctaattattgcatagagaagagtagcagtgcaatacagtacaagcaaactcatgaggccatggtatgaaggctattttagtattgattaactattcttcctatagccttagtactattaatgtatcactgctgattatgcaaatattggattctgaatatttaatctatttgcaaggatggttcgttgtatgtttccatggattgaaaggaactgaacctgggggcagataatcaagaagtaccatttgagtgcctgccatatgctcagcattgttctgggatttgcctacacagaaatagaacgggacatgagcttcacacccaaagaatttgcaagataattttgacatagatgagacagtagttattccaaactatgtctgggatggaaatgacagcaccaattacaaaactaaatacaaaactgtaagatacttgataggtgagtctgcttgattcacctttttatctgctcagtgcttgggcagtactatgtaataaatattcagtgaggcctggggcagtggctcacccctctaattccaacactttgggagactgaggcaggtggattgcttgaggccaggaattagagaccagtctgagcaacatggcaaaaccccttctctactaaaaatacaaaaattaaccaggggcgctggtgtgtgtctgtggtcccagctactcagaaggctgaggtgggaggattgcttgagtctgggaggcagaggttgcagtgagccaagattgcaccactacactccagcccgggcagcagagcaaaaccctgtccccctacacacacaaaaaaactcagtgaacatttgttgaatgcataaatgaatgcaagtgctaaattatgtgattctatctctaatgcaagaatcaaataagctggaaatcactgagatctgggttagcagagaaatctttaaaggagtttaagactgaattttgagagattggggtaagggtagtataaaccacatttatgtattcattcattattcaaaaaatatttgttggctgggcatggtggctcacacttgtagtcccagctacttgggaggctgaggtgggagactcgtttgaacctaggaggcagaggttgccgtgagccatgatggccccactgcactccagcctgggtgacagagcgagactccatctcaaagaaagggggggaaatatatatatatataaaatcccacatctttggaaggccaaggcaggaggatcgcttgaggctaggagttccagaccaacctgggcaacgtagtgagaccccacctctacatacaaacttaaaaaattagccaggcatggtggcacaagaggctgatgggagaagattgcctgagtgcaggagctcaaggctgtagtaaactatgactgcaccactgcactccatcctggatgacagagcaagaccatgtctcaaaaaaaaaaaaaaaagatttaaatttcactcattttatgtgacaaaattatggaatgccttaaagtcagggtaatttagaagagaaaatatccactgaaagttctgggtttaggttctgtttttgttctctagtgagggaagaaaaccaaaggatttgttttaggaagcttggtttgaaagtggttcatgtgattatcctaagtacatggttgtctcttctgttctgaaaaaagtctagtgatgagtttttcaccaattttcatgagactctgtgaggatattaaattgcctttttaataatggtttcttcttgtgtatctcacctattttttcttgtggcaatatcattccatttctcgagttttagagttgtggaaataaagaacttttcctgtccaataacttttcaaatactatagaaaagaagtagactttcactcacctggtgaaatatcaccaactcccttgaaccttctcacattgtttgtttcctaaattttaaagatcattccttaactattaaactttagtgatacataactagattcacctatgtgggcctgacttgtccctttgtttttacgcttgagaaagagtggtcataataacactgtacctgtaaagattaaaggactagaagctcccaaaataaccgcatttcaagagcagttttgcatatatagaaaagtcaactttgtccaatgcaggttaaagaatttttaatttggtgtggactaaaacatctcacattctctttattcctcaccctatcaccatcattattatttgtgttactttcttgaatcttgtcatccccaataattagaaaaggagttaacagcaataattatccagagagctgtcccttctttcctagaacacctatacatctagctgaggtcagaaaggttcaattgatttgcataaatctgcacatgcagggatgaagagagaagacacattagctgagcactctaagacaactcctgtccatgagatgctatttcctgatggaacttttatgggcccgtattgcctactccacctcctaaccaaggaccgcattctgagttaaaaatctcagtgttcagctgaaattatcaagggtggagaaagggctgggtaaaacttcaggtgtttttgtattttaaaggtcattcctgtaagattactaactcacctcgtctaaattgatgcacattaaaattgttttaactcacaaagcaaaagtagagaatattaagagatccgaaataatccatgctttttgctcctttcttttcttgttttacggtccgaaagaacccacttcaaatagggaagggagtccaattttccaaaagcaattcttcctttttttttctttctgagcagcactcatacagtagcagtggtaaaataaacaacgatgtgttgaattttgtttctctttatctatatgacatttgtgtcatcaccgtagctctaatccatattcaggtcttcatgtttggtgtgcagtaatatgtaaattatctcaccagctgcatggagcagtgtttgtttattctatttcttttggcactgcacagaactgaatttctgccaaaatggggctgcttcagggagcactaatgctctaggaggaagttttgaaaggaaacgcacatcataagtcttcactctgtgaagcagcaaaatcaaaacaaactttttgtttacttaaatatcagtattatgaatgtaaaataatgtgtttgttaaaatataatgagcatgctgcccatctctaagatgctcagtgtacgtgggctttggaaatgaggacataaagctgagaaagctggcgcatttttattcttagaaagaaagtaggtgaaataaaacagacagagacaacagctagaagtttaaggggaaagaaatattttaacatgcgtattaatctctggaaacacatggcatttacatgcatttaaatgtggacagctgtggcgtttaagtgttaaaaaatttcattaatgatgcatagagctatctacttctgttggcaggcctttcagtcttcaatctgacacttccttttttatccagcaagctaatttcccctcttttgtgaggagtaactgttttcacactactgcttacccagcaagcctccttattgtttcatggttaattatcttctccagcttcaccttccccagcaaagggagcaggactgttcctccccagcactaatgaaagctgggttttatgggtacactgtgtaaataaatgcaaggtctgatcaggcaacgtaataaatgagttcctaaagtttatggagtcacacacagctcatctagtggctttactaaataacgaaggaaaatgattaatttggtggggttgggagcagggggcttcaattttagagagaaaaaaataaagcctttgtcagcttaggatggaaactatctgcaggtaaacataagggatctccgtttatccaagtcttccttgtgctcagtaatcgcagccatgacatttgccaggagaatgtcttggagaataggcctttgagaaatattgttgatttggtaaaaggtggaggtcacctggtattttatttccctgattgctcgctatttattaagagaaaaaagcaaccaagctttaggtagtgcaaagtatcctacactctgcgctggaaggaagcaaagcagagatattcacaaatgccaccattgtccagtgcctggagaaataaattcagcaggcatggcccaggtaatcaactccactagcaggtcagtgtcttacatctctgtgcgatcaactcagtcatagtctcttagttgctagctcaaggccccatatcttagagtttgggacttgtagttattttgattattttttgcaaagaattttaggagattaaaatgaccccaaccccctaatgctcgtttttttttttaatttacaaaatgaattcacattttgaaatcctttttctctatattgaaatgtgcatttctttgatttgggaatctttgatttgggttacagtttgaattaaggtcctgacatttaaaactctcaagagcccgtgtaagagcccaggacaagaacttctattccagtcaagatttagttcttaaatttaattggatctcaggatcctaagtgtgtttcccttgaggtcgcaaaaagaaaccctcccaggggagtctatgttttttaacgtgtctagggactctagcataggaatcagagtataaaatctcttggaaacttacttcaaaaatgtgtattgccttctaggaaaattcatcctaaaatttcaagcaacctttctagcatcagtgtaacttgtgaacttcccagtcgtttttatggaggggactcaacagaggtgttctggcaattctgagactttttaatctcctctaaatctaaaagcagttatctttatgagaggctattaaagcacagatacgttaaatgaaataaaatcagatgtagaacaaggattagaccatcttaagaaaatgactcatagctgacccacctattaattagcttaaaccctgggccaatcaaatgataagcatgaggaaagcaagacaagtttccttgacaggcttagttaagatgaaaaagagattggctgggtgcggtggctcacacctgtaatcccagcactttgggaggctgaggtgggcggatcacgaggtcaggagatcgagaccatcctggctaacatggagaaaccccgtctctactaaaaatacaaaaaattagccgggcatggtggtgggcgcctgttgtcccagctactggggaggctgaggcaggagaatggcatgaacccgggaggcgcagcttgcagtgagccgagattgcgccactgcactccagcctgggtgacagagcgagactccgtctcaggaaaaaaaaaaaaaaaaaatagttgaaaaacagactaagataatgtgtgccatttttggtcattcttaatttgctaattcaaactgaccaacattttattttttttctctgaatgacttgtaatcatagtctcattattaaaaaacaacaaaaatcatactctatttatttgagaggagcaaacaagaacagtaatgatataatgttggctcccaatttgtcctcattgagaatgaagacacaagaggctctcaataaataaaatatgttcccatggttaggttacaactgtaactatgggtcagaaggatggggacttgcgtgattggcatctgaagtgaaggcagtcttgtgggactgagccctctcacgtatgggatctgatactaactccagatagatagtgtcaacgttggattaaatagtaagacacccagctcatgtctggagagtggacagttgcttttttacttgagaagccttatatcagaactgtaaagggcacggttcctaaacgtgagtgaactctattatctgatataaggcttttcaggtaaacccacatgttggcaaagctctccttgtaccttcgactacctcaggatcatgccaagaatcttgtgttcttgaaactgagtttgcaagttgggaccttatgtctatctcacaggaaaattcgtatgttagaaaacttcacttgtttacatgactattcaccttctcttttctaccaatatgcattgtaggttttaaaaaatgtaagtttttattaacgtaagatcattttcataaaggagggagaagggtatacttttcccttaggcaaaggtgaggcaaaaattacatccaggggtataaaactcacatgttatgtcaatccctgagcaatgtcaggaaaaaaaatggggccagatattatcattgggagaaaagaatgtatgcaactttgcatgtggttctgtcactgtcattcaaacagatttaccatgtggtagaatgaagaaaatgccaccatttcattgcagttgggatttttacaacttcattgatgttatttttctcttgaactttcttttatttgtttcagttctatgtaatactaaagaggtaagaaagagaaattcttttaattgaaaaactcttcctaaatttttaaaaaattcattttaaacagtcctacatttaggtactttcttgaaactctgggggaaattccagggaaacaccaaatatagtgactgagaaacaaaaaataaaccagttctcctattcaggctcttctcagtgtaataaaaatttcagtgtgttgacatgtaaagcaacagtcaagataatttatttgccagtgaaaagtagattatttttcaagttacttctagtgaaacattcagagttaggtgggaaagtaacttttttctacagtagatgcttaacaactatgaataatgatttgcacaagaattaacttgcttaagaaaaacagagcctgatgcaagggattcatctgttgccacctacctataatactatcaacactgaggttattgcacctgagaattctttagaaattatgacagtatctaattctttgatttattggcacaaatatattgcttctctataaaaagtttctctacacacacttaaaagtttctctgcacacactcagacagcaaatgtgtggggtttttttacaccaagctactgtctgctctctggacatgagctgggtgttctactatttaatccaactttgacagtgtctatctggagttagcatcagatcccacacgtgaaagggctcagtcccacaagactgccttcacttcagatgccaatcacgcaatttcccatccttctgacccacgggctgtaaattcccacaacccttccttaggttattctagccataacttgctagaattgctagaagagctcaaggaaacactttactcacatttaccagtttatttaaagatacaactcaagaaaaaccagacgtaaaagaaatgtgcagggtaagggggagggcaaagcttccacatttctccaggtaccttacccacctagcatctccaggtgttctgcaacctagaagttcatcaaatctctttgttcaagaagagtagttacagttttcatctctaaccctacccccccccccaacccctttcccagaggtccttcggtggagctgaaagttccagccctctaatcacttggtctttctggtgaccacccccaacctgaggctatctcaggaccctgccctaaattttctcattagcataaactctgttgtgatcaaaaggggccattatgaataacaaaaggtattctatcgcttaggaaattccgagggctttaggggctctgtgccagagaactgggacaaaggccaaatatatttcctattataccacagcttcttaatcaaaatagcacttatgtgggcagcccctccagtgaacctgaagttacagtaagaaagggaagaaaagaaatccttatatttttttgtattgctctttcttctcggaattccttcctacaacttcacaatcatcctgtttatagaacattcaaggtctttgcaacttattcttcacacacaaaatcaaattcaaaagtgataggatttttttttttttttttgcagggggcggttgttatgtagagttgagatgggctactgtgctttgagggtagaggtattagaacaattgaagggtttcctgtacattctatgacctctgtggtttctccaattgtgttctccttccaagactggtgctgggacaaacaaggtgttgaacagtacctgacagggccacactcctaatttcaactcaaattttgccagagaagctggactttttcaggctaccttctagcacatcctgtacttgtttcttcatgcactggcctctagcacctgccctctctaaggttacagatgattttctcttcgtttattcagtggctttcccttaattcacataaagttaatcactttaaagtgagcagttctgtggcatttagtagttttaaaatcattttaaagtgagcagttctgtggcattcaccatgttgtgcaaccaccacttcttccaaacattatcatcactccaaaaggaaaccccaagcctgtaaagcagttgcatcccattccttcctccccgcccgcaggccctggaaagtaccagtctcattcatctctgcagatttacctattctggatactttatataaatggaatcatacaatatatgactttattatgtctggcttctttcatgaaacatgtttttgaggctattagcttttacaactgagagtttgcaccagttgaaagtcagggattttccacgtgattttgccacagcacagtttaccctcagaacctttctccagatcccttcaacagttcttgagacaacaggcaagtctttttacttttttccttcagatcactcagtaaatttttcctttctttcttttttattttttggggacagggtctcactgtgtcatccaggctggaatgcagtggtacaatcatagctcactacagccttgaactcctgggctcaagcagtcctcctgcctcagccttacgagtagctgggactacagtcatgtgccaccatgcctgggcaatcagtaatcactttttaagaagctgcttcatgccaggcactattttaagtactggggctctagtggagacaggacagtcagagtacctgtcctcatgaagtttatttatgggaagaaaacccctgcttcccattactggactcccttttgtccctgatcccttttgagaacaaaggcaatttttactgttataaaacttactttaaaacaacatctaatggatttttcattttcaactatttcagaattatctgtgtagtcaagactaggaaatgtgtccgtgtcagtactgattttagtgagatttgtgagatgactttggattttacttgtctgttttgagtttctgatcagctttgttattgaaaaagagcattcactagaacagtttttgatcattagtgtgagatagactttcaaagcgttttctgaactgagacaagttactttaacattgttgtcaatctgatagatagtgagcaggatttgattgctctaatgggtcagttgtgatagaatttcagacaatggacttgccttttttaaaaaaaggttattttcaggaaatagaaagttcttgagctatgggccttgctgaggactgggcaagtgtcttttctcatttggttatctttgtgggataagtccagctaggatatgaaaagacaaatgtatcacctcatttacagtgcagtagaggtgagtaaggggcctaatcaatgtttctttctttgactctttggtcgtaccaaagagattagtcaaccaacctccagtcttaaacactgttaacggttatttaggattcagccatactatcgtctcctcacttcaccagagggaatatatatgctgatggctgccagtcattccacccctactgtgtaccgggctctcccctaggactttacgtacattttagtaatttaaagctcccaacagtctataaggcagatacaatgtactgtaattgtcccaagataaacaaatgatggaactgaggcatatagaagttaaataacttgtccaggatcacacagctaacatatgggagggctgatccaggattcaaacccaaacctgtatgagtacctcctccagttgcaaaatggctgataaacattgaacattattctttttatcctaatttctattttattctatgttttttcttgctgactctgaatccattctctgctcaataagaggcagagtactacaaactcagagttctcttaaaagttatctttccattttcagagatggaagcagctgtttgtcattgctcttatatggtttgtttgtttgtttgtttagagacagggtattgctgtattgtcaagctggtgtgcagtggcatgatcatggctcactgcagtgttgaactcgtggcctcaagcaatccttccacctcagcctccagagtagctaggacaacaggcacatgccaccatgcctggctaattttaaaaaatttttacattgagacagtgtctcactatgtttcccaggctggtctcaaactcctgggttcaagcgatcctcctgcctcagcctctcaaagtgctggaattacaagcacgagccactgtacctgtcctgcttttgtttttgtttttataaaatttctacctaagtctaatttaggaaaataattatgtaactaatgctcagacactttggtttaggttcagggttacagggtgccaagaaaagcagagtatagaatgttggcatttcccctagtttaaattggttcatctatactgaggtatatgttattttctcccacctctccatcaccccctcaaacctgtgtgttctgcttttcaccctggggtaaatatgtacacctttattcaattacagttattgctgcttatgtttttgtcacttttatttatttatatgttattgttgtgttctacttttctccagataaatctctcctgcctggtttttgcatgtggtactgcccaataaactcctggatctagaataaacagggggagcacatattacaaaaccttcttaaaggttctgcacattctgagtaccagaagtttgactgtaacattcagttcatcctagtctttttgagattttttagaaaaaaatctttcaaaagatgcaacttttgaaaggaaattaaaggtatctagaggcggctacatcaattctctattaggttattgttttgtagactgtcgagttcctttatctttactctttagctaataaagtatttctcatctcttatacacacccaccatttaagctaaaattgtaagaaaatcctggaaatgcaatcatgggagacctaactcaattaaagccatacacatgcagagggtattaattgagatgggtattacctgccacagttggaatcttggttcttctttttttgtcatcatcataatcatttctccaccacttttattgctttctctgtatatgttgtgctaatataaataaaatgcttccaagtgtaaaaataataaaataaactagcattatttaattccatttgtttcttgagcagatctgtatagctgtgtgtgtgtgtgtctgtgtctgtgtctgtgtctgtgtgtgtgtgtgtgtgtgtgtgtgtgtgtgtgtgtaattatttatataatgccttggtttgggccaaaattctgtacccatgcagcaagtctatgaatagaagacccttgcatgaattaattcagaattatttctggaattgcaggctgtcttttggaacctcatttattactccctatccatttggtctcattcaaatactcttagattttgtctaaattcatttagatttatcactatatcaaagacaggaacattgtgccttttttaaaaagtaccaaatagctcctctgggaaaacaacaacaacaaaaacaaacgtttgattagcttgagcattattggttgtgttgggctatcatcaaagagagcattcaaccaaataattttcctatcagttacatctttgtatatgcaaatcttttttttcccaaagagaacttttttagttatataaatactctaacatctttcttggaaacttttcccactttcttgccccaggggtatattttatggttgaagttaaatcctgaggaaatggagattttattgaaaatattgacagaatttaatccacaacaggaagggagtgagcgagggcagagtgagtagcacttctttaatatgaaaaaatttaaagtctaaagtgaatgattttctaatgaatcctgtcagatatttcctggaattgccatacaagaaattttcagaaatcacaataaatataagaggtttataagagcagagagttaataaaagaacagtattacatccaaaagtttaatcttttcctatggaaattttccattccaactacagctgtttgtcagtgttccttccccaccacacacacacacagataccaaaatcctcagatgcccaagtctctgatataaaatggtttattatttgcatataacctacagtcatcctctctctttactttaaatcatctctagattagttacagtagttcatacaatgcctacacatcacttgacacagggaaaacttgggttttttttttttgtaaccgtgaaatttttttttacaaatatatttgatctgcagttggttgaattcatgaatttggaacccatggatatggagggccaactatattttactgagcaaaggaattttttcctttaggtgctgctataaattttatagtttcttaggcttgaattcgtaaagccgtaaaggcagcatttggtcagaaaacgactgtgtcatggaagatgagtctgacttgcaggtgccacttgggcttagctcccagcccatccagatggcacaattcccgcttctccatgtgagcccctaggtttgggatccttgtggaaaatctgtgctgctaaatgttaaagtcaaccagagagttacaaaaagagctcctttgaaagactaattcaattatttattagcactctcagagtacagtgtcagccaagatagtatttgaaattaatatactatttgattagactgattgattgttcctacagctgaagattttaacattcattagccgtactaactggtcattagtacttcctttatcagcaagcaaagaataaacagaaattctaataaaaattcatcacagtgaatgtactccgtacctaagccactgtgatgattgctgggtactagattaactgctgtaacattggcagtgggaaagatttctcttagaaaacttaaaaatttcccttaattaatgtttagcttgtaactggactcttaaacttaagtaggctatacagataatctcttacatacccagtataataaagtgctaatgggtattttatacttaatgtgtttgtgtggtaccctttaactattagtttcaggaaggattgagggcttcttaggaaagtttgctaacatgctgcaggtgacgctttttccccactactgaggaatacaagcatcatgggctgtttttcaaccagacagttaaaataattctgacattaatacaaatatgctagcctgttatgctgtgtgatacctctgtctttctgccaagtcgtgaatcccttgtggttttaatagcaaattggaaggtatgatgtgaagaagagaatgaagcaggcagaggaaaccctttatgaattgactcaagaccacactagagcgattctgcatgtattaagaattatagctactggctggatgtggtggttcacacctgtaatcccagcactttgggaggccaaagtgggaggatcacttgaatccaggagttcaagaccagcctgggcaacatagtgacaccctgtctctacaaaaaataaaaattagccaggtacggtggcacgcacctgtagtcccagatacttgggaggctaaggcggaaggattgtttgagcctgggaggttgagactgcagtgagctgtgattacactactgcactccagcctgagcgacagagcaagactgtgtcaaaaaaagaaatacatatatatatatatgtatggccacctaatactgtctgccttctcagcacttcgcaagcactagcttgtttaatactcagaatgatcttgaaaaattgacagtgctatccccattttacaggcaatgagactgttgctcagaaaggttattaagcagcttgtccaaggtcatgcatatggtaagcagcaaagtcagcccttcaaccagtctgcaagttctagtgccatactcatctgcttggctacgctgcataagcataagctgaacttagaagttctgtttgtgtttctgtctgtaggtgagcccatcaagttctgcactatgtatatatatatataatctttcttggctctagcatgaattcagacagctggagagcaagtaaggacagtgaaggaatttgaacagagtccaggagcctagccagctactgtgtcccaaaatatgtcaagctctatctaaacagaggcagagccaagaagtccaaggaaacatcaagggtcccaagtgggcaggcagagagcagcataagggaatctgggctacttcatcctggggtggtcaggaaagtcttcaaataattattctggggctggtgtgggctggagtgagaggttcctgtctatcagaaatgggggaaggactaacagtaagtagtgagccaagttaacaaggaccaaagtgaagtctctgtcacagatagagactggaaagaaaggggctgagagaactttgactaagaaattgccctggagcattcagggtctaggaagatacagctaaggagaatagtcaagtgttgctagtcttatgtctgattgggagcagggccacagtctgaaaagacagatccctgaataggaacacagaggaagggggggtacacagtcatgtgcctctggcccatgaagtgctctacatggtggctacaactctattttaagtccccaggcaaaagctgcttaaaatggagaacccaggaatagaggcaagaaggagtttgccatgtgtggctgcagatagtattctactatggactccagaactgaaatagtatcagtgtgaatgcaccttaggagatgtcataggctgtactatttttaccttcattcacctgatagttttcactctatccaagattcaaaatgtagatgaatcaataggaaatggctaattccataaattacaatttgacaataataatcttacattttagtctatgttattgccttcagtaacaaattactattgatagaaaagcctctttcagtaatttctgggtgttatttcagagaggaatagagttgataattaggccgtctttcaagtccatgcttggggcagttttctttcctgagtcttctgagagattttcaatggataaaattttcatgcttgtgttccctaattcttctccttttctttttctttctctcacacaggagactttgaatgtgattgatcctggcttgatggacctaaatgggatgagtgaggatgccctggaatgggatgaaatggacataagtaacaagttaattagtttgaatgaggaatcaaatgaccttgatcaagaactccaacctgttatcccttccttgaagcttggagagacaagtaatgaggaccctggttatgacgaggaggctgataaccatgggggatctcagtatgcctcaaatattactgccccctctagtccacacatttaccaggtgtacagcctccacaatgttgaactctatgaggacaaccacatgccatttctgaaaaacaatccaaaggtcactggcatgacacagcctaatgttttaactaagagtctcagtaaagactcttcattttcatctaccaaatctttgccagatcttctaggtggttccaatttggtaaagccctgcgcatgtcatggaggagacatgagccagaattcaggcagtgagagtggaattgtcagtgaaggagacacagaaaccactaccaactctgaaatgtgcttgctcaatgcagtggatgggtccccaagtaaccttgaaactgaacatctggacccacaaatgggagatgcagttaacgtgttaaagcaaaaatttacagatgagggggaaagcattaagcttccaaatagctctcagtcgtccatttcaccagtgggttgtgtaaatggaaaagttggagatttaaacagtattaccaaacatacccctgactgtttgggagaagaattacaaggaaaacatgatgtgtttacattttatgattactcatacctccaaggctcaaaactcaaattaccaatgataatgaaacagtcacaaagcgaaaaagcgcatgtggaggatcccctgcttcgtggtttttattttgataaaaaatcatgcaaatctaaacatcagactacagagttacaaccagatgtacctccccatgaaaggattttggcaagtgcatctcatgaaatggatcgcatttcatataaaagtggcaatatagaaaagacattcactggcatgcagaatgccaaacagctctcccttttatctcatagttcatctattgagtccctttctccagggggtgatttatttggattgggcatctttaaaaatggcagtgacagcctccagcgaagcacttctttagaaagttggttgacttcctataaaagcaatgaagatctctttagctgtcacagctctggggatataagcgtgagcagtggctcagttggtgaactaagtaaaagaacattagatctcctgaatcgtttggagaatatccagagcccctcagagcaaaagataaaacgaagtgtttctgatatcactcttcaaagcagttcccaaaagatgtcctttactggccagatgtcattggacatagcatcttctatcaatgaagactcagcggcatctctaacagaacttagcagcagtgacgagctctctctttgctcagaggatattgtgttacacaagaacaagatcccggaatcgaatgcatcgttcaggaagcgtctgactcgttcagtggctgatgaaagcgatgtcaatgtcagcatgattgttaatgtctcttgcacctctgcttgcactgatgatgaagatgacagcgacctgctctccagctctacccttaccttgactgaagaagagctgtgcatcaaagatgaggatgacgactccagtattgcaacagatgatgaaatttatgaagactgcaccttgatgtcagggctagactacataaagaatgaattacagacctggattaggccaaaattgtctttgacaagagataagaaaaggtgcaatgtcagtgatgagatgaagggcagtaaagatataagtagcagtgagatgaccaatccctctgatactctgaatattgagacccttctaaatggctctgtaaaacgtgtctctgaaaataatggaaatggtaagaattcatctcatacccatgagttagggacaaagcgtgaaaataagaaaactattttcaaagttaataaagatccatatgtggctgacatggaaaatggcaatattgaaggtattccagaaaggcaaaagggaaaaccgaatgtgacttcaaaggtatcagaaaatcttggttcacatgggaaagagatttcagagagtgagcattgtaagtgtaaagcacttatggatagtttagatgattcaaatactgctggcaaggaatttgtttcccaagatgttagacatcttccaaagaaatgtccaaatcaccaccattttgaaaatcaaagcactgcctctactcccactgagaagtctttctcagaactggctttagaaaccaggtttaacaacagacaagactctgatgcactgaaatcatctgatgatgcaccgagtatggctggaaaatctgctggttgttgcctagcacttgaacaaaacggaacagaggaaaatgcttctatcagcaacatttcctgttgcaactgtgagccagatgttttccatcaaaaagatgccgaagattgttcagtacacaactttgttaaggaaatcattgacatggcttcgacagccctaaaaagtaaatctcaacctgaaaacgaggtggctgctcctacttcattaactcaaatcaaggagaaagtgttggagcattctcaccggcccatccagctgagaaaaggggacttttattcgtacttatctctctcatctcatgacagtgattgtggggaggtcaccaattacatagaagagaaaagcagcactccattgccactagacaccactgactcgggcttagatgacaaggaagatattgaatgcttttttgaggcctgtgttgagggtgactctgatggagaggagccttgtttctctagtgctcctccaaatgaatctgcagttcccagcgaagctgcaatgccactacaagcaacagcatgttcttctgagttcagtgatagttctctttcagctgatgatgcagatacagtggctctttcaagtccttcctctcaggaaagagctgaggttggaaaggaagtgaatggtttgccccaaacttccagtggctgtgcagaaaacttagagtttactccttcaaagcttgacagtgaaaaggaaagttccggaaaaccaggtgaatctggaatgccagaagaacataatgctgcttcagccaaatctaaagttcaagacctctccttgaaggcaaatcagccaacagacaaggccgcattgcatcccagccccaaaactttaacctgtgaagaaaatcttctaaaccttcatgaaaaacgacatagaaatatgcataggtagaatgtaccccctccccaagcatgaaaatcatctcactgaaaggtacgtatagtcctcatgccgtatatgtatttaaaatattgagttcaggtcagcaaaaccatggcaggagaaaaggctagtcagaatgaccagttacggcagacagttatctgaataagacatttaggtagaagaaatgctctcaacaatgaaagtaactgtgaagcaaaagaaaaaaaaaacagggaaaattgacattcttagtgacattatctttattacataattctggcaagaatacaaaatttgaggaagtagttgaacaatttaaggcctcaaattcttccattgagggagaataaaaagcttatccaaatcgcaattatactccatgatcaaaatgcatgcatagtaacaatgctctccacttcagtttcctgcacagagagctgtccgttctcttcagtgcctgcagatgaacaatgattaggctaaaggccacatctcctgatttggcccttccttttatgcttctgtctaatgtaactatcgtcacatttgcttccccagtggaagactgtgctgtcacaactcctaatcacggccatgtctaaggattcaaacaggaggggaaagttgatgttaaagaagaggctcttatttatccacatacagattgagaacaggctcagaaagcaaatgcagagagaatacatgacaagttaatggcgttttgataaaaacagaatttttgaattttgcctgaaggtgacaggctgatttccatcaaattttttaagaaagtcattccactcttcacatttaataagacagctattgatcgataattccaagatgatgatatgtctctaaaagtgacacaaagattctgttatttcccatttctaagccccagtgatgaatatgctttctcaatcaagtttaaagaaaatttgagctttcaaatgtgagagtcatatttcacccaagtatgagatgcctaatgccacctccaccccccactccagaagcttaatgccgtcacctaaactcgtgctataggaaatgaattacagaagcaatctaccctaatttgttaacttattcaaataacagttattatacttaactatgctaaagattatcttttttgtggcagattgtttattttttgatgagcctaattactgattttctaaaagtaatttacatttattacaaatacatcttttaaaatgtgacagataaatgttgttcccataatgtattatgaaaaaagttactatttaaaaacacattatttaatttgaaagatgaatggcaaacatcattatttttttttcctgcaacacctgtgccctaagcttattaaaatgtgtgattctgtgtagagctgctagaaatggggactaagggggggcatctataccatatataccctaaaaataaactcagtatgcaaaattgaagaaaggcatcccacttactaatatagctcaactaattttctgtgtttcagactctatttacaattggctgcaagtgagaacaaaagtaggagagagagaaatgtattttctgtgaaacatgtccaccctataatcacattctccatcagtatgcagtaaaactgaccattaagggagagtaactgcaattccataagctgcttcaaaacaagtcctattagaaccgattgtactgctggctctgccaacctccgcagaagggctggtagagcctggctgattttgttttctgaaaggggataaaggcttgaaagcaacaccactctgagcatgacatcatgtgactgtgaccctcaagtcaccagtcatgctgagatctggagctccagaagctctggcactggagaagcctttgcgaagcactctcccttttttgatcctctgggaatttcttctctctcttacatagacgtagaattgaaatgaaatgtaaatgatgagcagctccatctttagacttggaggaagtgaatgtgctggtggatctgtgtaaccctcacattttacaagcagggacaatgtcaaactagcagccagcccgtctgccagtcagcagtattttttgttaagccccggtgatgcctggccttatctcgggcaaagggagaaacagccagattttacttctgcagaactcacatcgcccccaagtgacttgttataggcctagagccatttaaatagccatatttactggtcctattcaggatttttttcagtatcatgtggacaaaacatctggatgcctgaaatttttaccagacgttagcattggataactgggtataaatagtcacatattgttaaaatactatcaaccaggacaaattatttaatctcaaaatgttgacatgccttcagtatttaatgtcaagaatacatagtaaaaattgtttgataaatatgaggtttcatgtctacaagagcttaattgttgtcattgttcttactacaagttcagaaaaagaaaaagaaaaagctgtgctttttaaagacatttgaaaaccatcagtggtgatgctctttttatcaggacagtaaaattcaccaaattccatttgcttggtttttttttttttccagaactaagttttcagatgatgaaatgattataatgccacccagaagagatataacttagaatagcagatagagtctgcaacagtaacaaaaatgttttccagattttcaaatgttttttatttactgtgttctaattaaaaacccactgaaactgcttgagaagttttaacatgatctaacagtatgcatttgcactgatttccaggcatactgctgtgcttttcactattttcatttttgtgtcatgtttctataaaaatagaggggtcagttacagcaaatcacatcaaaggaaaggtaactggatagatccagatctttctgcctaatttggaggaagcacataatgtatgtctggagtgcctcctaggacctgcctcagagatgtactttgcgctaatctttttgctgtattctgacagttatttcttcataatcctcatcataagcctctgatctttgatgaatggtttaaccctaaacttcaggctggataaatcccgtggtataaaaatttaactcatcatatgcggccagtgtgtgctttttcttttccttttggtctgctctagtgatttggggttttgttttactatgtgtatgtgtatgagtgtggtgttttggggggtgggttgaggagctgtatttacttacagtgcatatatttcctttagaactttttagctttattgccttttctactttattggtctgtaaatgtgatagttggtggccagtagattttagattttaggcaattacttgtatttgtgcatgctcaagtacgcacataaagagttttaaatgctgctgctcagattttacaaactgagaaagctgtaagagcaaacatttctcatgcacacagcacaattcccattctgttaattggattgacattaggtgcttaatattttccaaagctggtcaactaggtttaagaaactacctttggtgattgtgtatgaattttgcactagacaatacaggtataatcttatcaaacttacctttaaaatcactttaataaaccaatgttttgctggatgtgaagtgtctttaaattatctggcacttctgaataactagccctgctatgctaaatgacaaggatgttactgggcatcacctatcatctatctctctctctctctctctctctcacacacacacacacacacacacacacacacacacacacacactctcacaccccagatctgtgcctcagccaattggcctgcccatttccaagtgggccaagttgaaagaattgattacctagagagaatttaaatgccagcatttagtaagaccagatttgcctcacctagggaatccctattctgtggccagatttcaaatgagtcatgtcctcagcatttgaacaatgcactgggctttcttgtgttactgcattattttactataccaaatttcatcccatctgtttctgtctgtctcccccagttctttatctaatttttcttctttctccaactccccatggctccagccaaaccactttttgttaaggtttttctggctcttaagttgaaagattgtagaaaaacagagagcaagacaaagagcatattcgttcttgaaggacagtaaaacaacctgatatgagaaatcagaactcagtttaagcccagacaagcaaaagcctgctttctttgagagctggtcagggggacttacaatagttgcatcctgcattgcctaaacttggtatttaggtgttcctcacattggaccagttgcttttagccatttagaaacaggcagaatggatcaagtttggaacaaatttatatcatagccatgagatgtacaaatataattgaatccgtctcgtttccacaatgctgtatgtaccttaaatgaaatgcattactatttgagctagaagccccagttgtatctttttataggctgaaacacttaggataatcacaatgttgtgaatatttcaccactatacaatagtggaattgttcgatatcatgcataaaatcactgcaggaagggttaagcctgagagcctatcagctcccagtctgtggaatcattgtacattgtaaatattttgccgcatcacttggcatcagtggcctcacattttcatattggtttgaagctattttgatgttccaactgagtgcacaggcaaaagagtggatgacatccagagaaaaggtcaaacttgatgatttttcttgttttctttgaaaccacgtctttttaaaaaaaaaaaaaaatcaatgtatttttcacatctacgctgagactttttttgtcagtaatgtgaagcttgggctattaaaattatttatattttatgtatctttatatttcagaacattagcaagtagtcccacaattgcagccttcaatggttcctcaaagggcttggttttgctaatgaaaaatacatttctgaaaccttttcttgtcacttttttgtttcttgtagatacgcctggctgcaactcaggggtggcctcatcctcccgccctgggctggcctctggttccatcacgtttgtcactgccgtttattacattgacttctcccaagatgaatcttccttccaaatgtgttttctccacacaagccttgtgatctgaatgtgtgcgctggttctctttaggtgatcgtctttgaagttcagcaaagctgcttgttctcccatggattcctgtcccaagctacctctaccaaccctctctctccagctagacttttctctttgcctcctcccttcccttccactctttaaagttctgcagttcaccaactggtagtccattaaattctcctgtctagaatgacccccccaccagtacttgaccaatttcatgtatcaatctggatttttttttaacggtataatgactgtgtttattgaaagagttttacctaaaaagccaacatttgaattggttgcagcatagagaagaaacactggtccttctttcaaaattaagcaactattaaaagcgccattttatttatttcatttaaaaaataatctatgcagcatttcaagaaacaaccatatggtgttgtatattataaactggtgacattctactattgaattatgtacaacattttcattttttatgcttcttgaggtggtaatgagaaaaaagttttttaaaaaagtgtgccttgctgtatttcttataccatttattaaaaagctgctttcacggtaaaattatgttggtttgaaaggaggaaatagcaaggttaagatgtgtgaataatttctgtatatatgtataaccaagtacaaacattgatgtataatgacagtataaaatgctttcatgtttgtgatgtctagtgatgtggaaaatataagccttaaatccattagattgcatggtaattaaaattggcataataaacacagattattgggggaaaaggaaaattagtgatctcttctactatgttctttaccaaattgttgcatctggttctgaaaaagtatagcatgtagcagcttccaaacatattcatattgcttaagaggcttaacattacctaaactagagactagacgtaaagccttcagttttcaaaatctttctggtcactataaagatcttggaacagcaaatgattaaatgtcagttcccctaaaccaataaacatttatactagattttttatttccacttatcattaatgatttaatgttggatttcaggtaccttgtatgtcttaatttattttaaatatttattttgaatgagtttgatagaaagctagtagaaaagtacagaaaatttgactattatttatagatttcaggtatatttatatgtgtaaaagaaattgacaaagaaatatttcatctggcctttactgactcctgttaaatgcagttttaaatttatatcgtaacacctacttaagtgcctgacacagtaggtattcaataaaaatttactgaattaaaggattaaattaggtgacatggtgacatctatccctttattttgacactaaaacatggacacaactagaaagaggtacaatgcaatataaagtcacaatagataatatatatcaaatttctaaaaggtaaagaatgttgtgggttcatgcagtcacaggaatgacaatcattcaacagatagttcagaaacactttttatctgcaaggcactattctagatccagaagatgcaatgttgaacaaacagacaaagccctgccctcagaaggctgtcctgcattaggaacaagtgaacacgcaaatgacatgaagtatttgttgcagagctgaggaacagagcaaatgtagtgatagaagcgcaatgagagaagcagcagtgggtacaaggaggaagaaaaagggcttgcagagagtggaaagttagtggaatattcatgaaacttcattgcaggggtaatagaagaaaaagtaaattgggaggacttaatggaaggtcttttaaaaagttaacttggagcttctgtatgtaaaatgctaggtaataaggacactttgtacaggctgttttgcacctgattttatttatcattagtgccacgccaagatcatttagacgatgcttatctgtaattctaccactttaataactatttgtatttttatgccccttctgatcttttccatatgtatttctaaatggataaattattctaggcttcttaataggtagtaatttgttcaaaagcggttttagccagacatctagttgcagtgttcaagaggattatgggggaaagagattagagataattgtctagttagggggcagctggagaaaataagctaagtttgcaataacagagtacacaagtatagtggcccaggatgtagtgaaagaacaaatcctagagtctttgaaatttctaagggcattctagacctctgttgggatatggtattattttacatactgacacaacctaaattttctttgggtagtaactaatgtcaagtctacatcgactggtaaaacattcaaagaacaaactgacaatgatgttctacctacttgttacatgctcatggaagaccgtgcagtattgaaagtatttgttaattatctgcttagtattaacactaaatttgtagaatgactttcaggtttgttgaacaatgccttttcaggttggaagaagaaaaatagcctcaatctcccaccccatgtaggcactacctccccaattacccttagaaaatgatcacaccaactctgcctacacacttccagtgatagtggctcattgtctgttaaggcaaactgttccactgttgggcatatctctttgttagaaagttctttcttaggttgctaaaatctgcctagtaccccgctaccctgttctgtcttatggagcagcccagattatctttactccctctttctcatggcaaccctgaagataatcaaggccagttactcatcatctcccaaccactgtttcctcaactgcccttcatatgtcatggttttcagatccattccaacctgactgaatgttaacagacagaattcttcacattaaggaactgtcttcatcatcatacatgtagaaaagaatctgaacatttaagtgcgaagttttctctagaaatatattcaagatatgtttattctattattgtaaatttcaaacaataaataaataagaatccatgacttccttcagtggcccagtccagtgcctaagtcatctggaatcttctccttacatcgaatacaaacctaacctgtttccaagtagggcactccctccgcttatttattcatttattcagccattcagcaaacatttattaaatggctacctatgtgaggcactatatttggcattaggtatataaaggcaactaacacatggtatctgtctccaaaggtttacagcttttcttctgaaagtgccttttgtgtccttgaatagagtgattatgacttttgtctcaattaaatgatgacctcatttagtttctgatgaagtttctctacatttaagaaaatctagtgagcaaaacggtatacaaaaaatcatctggatctgactaccagaaaaagtaaagtggttttaattacagaaagaaaaatatttgttagatttctggtcactgaataaatatgcatcttatacaacacagaacaacctaaatttagggcttctggaaacctgagtttgatgactttgttgtgtttggttcatccggactaggtttcacccattctataattcctagaaacaaactagatgaaaatatcaatgaaatgatccaggtctgtcttacaagtcaatttgctttagcttccaaaagaagttgaaattttttagaattttaaagaaaaactcacttttcaaatgtcatataattcttatattttaaatataaatcgaaccaactaaatttaccgctatatttttttctacatattcttttttcaattttcattttgaaaatattcagacctatgtaaaagttgagagtagaacaaagatacttggtactcatccctcaggttcatttattgttaatatttcaccatatttacttcatctctgtatacacacacacttttttgtatgattaaatcatttgaaattaaattgtagagtatgatacttcatctgcaaatacttcagcatgtgttagctgagaacatgggtattcttctacaagtctacaataccatcttcatgctcaagaaatgtaacattggctggtcatggtggctcacgcctgtaatcccagcactttgggaggccaaggcgtgtggatcacctaaggtcaggagttcgagatcagcctggccaacatggtgaaaccccgtctctactaaaaatacaaaaattagccaggcgtggtagctgtaatcccagctacttgggaggctgaggcaggagaatcgcttgaagccgggaggcagaggttgcagtgagctgagattgcaccactgcactccagcctgggcaagaagagtgaaattttggctcaaaaaaaaaaatgtaatattaatacaataatacctgatagtttatattcaagtttctctaactacccaaattatgtcctcttatagttgtttttgttttaatacagtattcaaacaaagatcacacactgcttttagtttccaagtcttttttttttttttttttttttaaatcttgcatagtttccctgtgctttcactctatttttctttgggcttttataacatcgacagttctgaaaagtccaggccagttttgcagaatgatccacaatcttgatgggtctagttgttttctcattgttaaactcagggtaaacttttttttgtcaagtaaatacataggtgactttgcattcacagccactctttaatgaagattgattgaataactgacattcctgatatgttttaaagttcacagcttactctttcagcccatgcttcatccatctaaggcaagggtcagcaaactgtggcacgtgggccaaattcagctcattgcctgttctggtttgacccgtttgaacaattgacgagcttcaaacaatttttacattttttagtagttaaacaaaagaatacttcatgacatgtgaaaatcatatgaaatttaaattttggtgtccatgtataaagttttattagaacacatccacgcacatttgtttccatagtctatggatgctttgacactatacaaagttacgtacttgcaacaaaagccatatggcctgcaaaacctaaaacatttactatctggatcattacagaaagttttctgatccctggtctatgatattctaaattccgacacattttcttaggatagatttccatctgcaaattcagtgtaagacataaacacctgcaatagttgtgtttttttttctttttacttcctagattttattgcattctcaacttgtttcatattaccttgaaaaataaagtgcacttaaagattgtttcacatccacagtttgtttaaggatttaaatttagttcactattactgcctggctttgattgatttagagggttagtcaattacagactaaataattagttcaatcaaaaccatcagaaaaattgacacaaactcacttccatgcaccaataaactggaatcctttctttaaatgtttttctaaagcaatccgaggaattaaattcaggccatttcacagtcagtttttttcaaattcatttttcaactcaaaggcaaaaccatgatcaaaatattgtatatagtacaccttcagttcccaactgctgaatttaccaaggaattaagtattcaccacaaaccctggtgtggccataggtggacactctaattaaaaagaagatgttcaaaaagaatagtccttcttttcttaaattcacctttgatagcactgccacacttctgggaagggaacattcaaggaaaccgtatagccacttcttttttaaaagcagccacataccttctatataacaatggccctttagtttgagagttgccacatatttgcatttccagagtaaaataataggatgacatgggcaggtcaggcccacaatagtatggtttctttggcaaaggcattttggccaatgccgtaagaccattctggcccttgattaatgggttctcaccaaagcagaaattacgcagagcttatttgtccttgcattttgaagtaaatcattgcctgcataaagcaactcttttgtctcttttccattgcaacacacaggagttggaatgtgttcatacgtgtaagactgtcttagtctgcccagactgcttggactgtgttgtttataaacaacagaatttactgctcaaagttctggagactgggaagttcaagatcaagatgctagcagattcagtgtctgaggagggctcactttctgtttcattgatgcaccttactgcatcctcatctggtggaaggggcagtgaacaagctcccttgggccccttttacgaaagcactaattccattcatgaagacttcacaacttaatcacctcccaaaggctccatctcttaatacgatcacattggggattaggtttcaacataccaattttgggggtacacaaatattgaggtgatagacacttccaggcttttgccaaacattagtaaacaatttccagtgaatactctgccccattctctcctactcaagcagagtatcttaaggcagcagattggagtgacgttactttaagggtaactttgaagccaatctaattcatactcaaaaaagtattccaaaattttggtactctattatgggttacaaaccccttgtgacaccatatttaagagccactgctattgaggcttgcactctcttgcttgaaatgaggtgctcccaaacctgggagatggctcccaaagaacaagagaatcaaccccatcgtgcatttatgtgctgccccagataatccacaggcacaaagaacttgagcttcctggtgtgttcttcagaaaaaaaggaattcaaaaagcaaatgtaaaatgcaacagaacttggcctcaaagtgatgttggaaaaatagccagtcctgatgacttggtcgaggtaacttgctttgcccactgttaactacagagccatatgataatggaacatcaaggttttccagataaacccaaagccttttgtgtctataccttgtaacctgtcatgttcatcaacgttttagactgtaccattgctctttctcccttctttattcattttatatggggacgtttgactaggatcaccagatgtagatttggtaatttttccataccattaagatgtatgataatggattttattaatttaacacaaatgcataaaaatatgatgtaataagaaacaatcctgaaattattaaaacatttctttgtccttacttaaacctaacctgccattttaaaagacacctaactctataaacaaatgggccattacagacgtaaaacaaatattattcagtgaaatttattcaaggacttaaaatgattgaaggcattaggaacataaaaatgcataagatcctcttttaaatcccaatattccctaaccactggtttataaaaaatactctaaggtttatagaattagtttggttccgttagttgatcaagttacttacactaagtcagcaattcaaaacaaataattccctctgtgtgtgtttgtttgcttgcaaatatgtttcattttaaagtgtctttttatatagaaagccaagttggtggaatttatcttgtcattaaaatgatgtgaaaatcaaatcattcttcatatttgtgctcttatccctgccgatctcaaataactaatgatgcttacggcaaggttttataaagtgaaaacgccttaacttttcaggaaacaattctatttttacatatgtaccatttgcctctttcctaaacacttctatcagtgttctaagttccatatattcttttgtaatttaccagtgacatcttcccatgcaaactatatttaaaaatattttttagtaagttaaatcactaatcatttacaggttgaggcattttctttttttttttttttttttttttttgagacggagtctcgctgtcgcccaggttggagtgcagtggcgcgatctcggctcactgcaggctccgcctcccgggttcccgccattctcctgcctcagccttttgagtagctgggactacaggcgcccgccacctcgcccggctaattttctgtatttttagtagagatggggtttcaccgtgttagccaggatggtctcgatctcctgacctcgtgatccgcccacctcggcctcccaaagtgctgggattacaggcgtgagccaccgcgcccagccgaggcattttctataggaatgaaataatgctctagtgggtaaaactttttttaaaaagacaaaacagattctgtttgattcagaatgattggacaacagactattcttatcaaccttagggtgtgattatttaactcatttgtgacttactggcaactcaaacagttttaaacaaaacttaatccttgacggttcagcttcaccatatgattaccaattattgtttagtgttgtagatgagtaaattataggaaatcaggctaaataagtaaacatactctggatattattttttaaatcaatctaataaatcattatcccttgagtgcttgctatatgccaggcactgtgctaagcactttacatactcaatttaatcttcacaatactctgtgattggtgctatccattctatataataaggaaattatctcatttgcaatcgagataaataaggatttgcagtagtcctcccttacccagtctctttttgcatgcagtttcagttacctgcagtcccaaaatattaaatgggaaattccagaaataaacaatttagacattttaaattgcatacagttctgagttgcttaatgacatctcctgcagtccctccttgtcccgtctggaggcgaatcctctctctgtccggtgtcttcactctgtaggtgctgcccatcattagtcacccagtagcatcttggttatcagagcgactgtcttgatatcacagtgcttgagttgaagcaacccttgaacctaaagtgcaagagtagtgatgctggcaattcggatatgccaaagagaagctgtcaagtgcttcctttaaatgaaaagatgaaagttctcaataaggaaagataacaaatagtatgcctaggttgctgcaatctatggtaagagcaaatcttctatccatgaaattgtgaaggaagaaaaagaaatcccagctagttttgctgttacaaactgtaaaagttacagccacagtgtataataacttttgttgcagtatagtgttgtaattgttctatttaattgttgttgttaatttctgtgcctaatttacaaattaaaccttatcataggtatgtatgtgtagggaaaaacatggttgagctataggatttcatactatcccagatttcaggcatccattgggggtcttggaacgtatccttcgaagataagggaggattactatagtgaatggtgctcatttaatatccacatataccttgctaaatttcctgcctatattaaatgcttattaaatatataattcatgccaaaactgaagaaaggactttcattttaaaaaggatttcttataaaaattctataggagaagtgatagctaaattagcgcttgaaaaaggccaaagaaaattgtatactgtatataattatgcctcattatgacctctgcacattttccagaaaagttaggcattaaaaacacacacaacaggaacaccttaaaggtcagagcctgatgaaagaaaaatgcaatacttcattatgaagaatgagattaatgttctagtacgaacatacatttttatcattacattttgctcaagaaatactttaaaacatgcaacttctcattgtgtattttgtttaatatctgaggtggtggagagagagaattctatgaagtataaatttcaatttagtgaaataaaaatgtgggttttgctgtattcctaccaccctttatgtgactcttctttacatgagacttcacccctctccttccaaagacattctggctttaagagtaaatactaaagtctcggtgcacaaaaagtttaattcaaaatttctcattattttcaagagctgctttcctaagatagcacagtttgtgcatcatatttgctacattcaccactggcaggacacctgctataaacatttaaaataacaaatgacaactgtttttttactttttaaaaattattttaggtttataaaatattgtaaaaccaaaaatagtacactttaaccacactcaccttttgttaatatttcaccccatttgctttatcatttatgaactctatctacctgtctgtctatgtatctgtctctctatcagtctatgtatttatctgttttttacttttctgaaccatttgaaggtaagttgcacacatcatggccttttatccctgaatgtttcattgtatatttcctaatgcgtatgtacttatattctcttaaataaccatagtacagttatcaactttataaatttccattgatgcattatttctatcgaatcctttcacattccaattttgtgagttttcctaataatatcttttatagcatttcccccccttcagtacatgatttgggtattaaatttaggtgtcgtatctctttagcctcctttaatctggagccatttttccagcttttctttgtcttgttatgacattgacaattttgaagaatagacccccccgcccccacccccccccacacacacactttttgacaagatttttcttcagtttttgtttgccctttccttgggatgagattgaatttacgcattctcagcagaaatgttgcatgggtggtggtctctcctcagagtatcatatctggagaaatgcaatgtccatctgtcccccgtaggttatgttaattttgatcattttgtggagagatgctttaaaaccatgcaaatatcctgccctcttcaagttttctcctatatttagcatcaatgggtaattcttgtctaatcagtctttaccaagatggttgtgaaattgtttttccaactctagtactctgtccacatttatcacttggccctttgtattacccagtaaaatcccttccttcactcctacttatttacctctttatcatagacagaaacttatgaattccttttccccaattatttataatttattacttaaattattttgggctcaaattgtcccaggtttggccagtgggagcctcttcaatctgggtcttgtatccttgtgacctcttttaaacaatttcttaatttcttacaaagtgctctggtcttgcacctaagtgtcccaactcttgaatcagccatgtctctgaggatccctggttctttttaatagggattggcattagaggccaagattttagtgttaggtgtgtttattgctactagggtatctttgcttcttgatgctttcagccaacaaggttaggaaatacgtgaacttctatacacattaatgtaaacatatatacaattttatatgcacaaaggcatattcatacacacatataaatgtgtatacacacatattttagaaatcaagagctcacatcaatgtctccaattttagtccattctcacaggattctttctttacttccctgattccatatttgtatttcccttctttcactataagaaccatggataacaacatcaacatatatacccatttgctaaatagcataatacatttaaaatagtgtcagaattgcttaaaaaccattataatcaacctacttaaaagagttcaggattcatttacaattatcccatctcctaccctccccttcccaaataccaagtgctattcaatactaagggtgtgtggttaaatactgtgttccaaagttcataagctacatggattggtttctttctccccttcccttccctcccctcccctcccctccctcccctccccctcccctccccctcccctcccctccctcctgtcctcttcctctcctctcctcccctcccccctcctcccctcccctcccctcccttcccttcccttccttctctcttcctttcttccctcatttctttattcccttcaatataattatggcattcatttaaaataattaaagttaagtccatttgttccagtttcctttcagtttaggttatttttttcttccctcccattcttattgttctaattttattttttgaacctgtagaatgctgatatggattgaatatttgtcccctccaaatcttacgttgaaatgtgacctccaacattggaggtgggccggggtgtatccctcatgaacggcttggtgctctcccagcagtaatcccactctgatagttcacatgatatctagttgttaaaaagagcagtggttcatgcttgtaatcctggcacttttggaggccaaagtgggaggattgctggagcccaggagttcaagaccagcacgggtaatgcagtgagaccttgtctctacaaaaaattaaaaaataaaaaattagacactgggtgtggtggcacatgcctgtggtcctagctatttgggaggctgaagggggaggattgcttcagcctaggtggtcaaggctgcagtgatcactctactgtactccagcctgggcaacagattgagatcctgttgaaagaaagaaaaaaaagaaaaataaaagaaagaaagaaagaaagaaagaaagaaagaaagaaagaagaaagagaaagagagacaaaaggaaggaaggaaggaaggggaagggaaatgaagggaagggaaggaaggaaggagaaaaagagaaagaaagagagagagggagggagggaagaaggaaggaaggaaggaaaaaaggaaggaaggaagacagcctggcatctcccttgcctcctctttcaccatgggacacacctgcttctgctttgcctactgccatgagtgaaagcttcctgaagcctccactggaagtggatgctggagtcatgcttcttgtgcagccagcagaacggtgagtcaaataaacctcttttctttataaattacccagcctcagggtaattccttcatagcaacacaaatggactaacacatgtgctttccaacttaaaactatacaaaaagctgcactcaaacaaccatcactgccttccctatctcttccatcccatttcctcccagcccttgtaaatacacaaattcattgtcttctggctgattcttcttcggtttctttctgtaataataaggagatatatgtatatttttgtattttccttctttctagcctcaaaagtatcatactaaatgtattttttgtctttgagtttaaaatttaatatcctttagaaatcactccacattagttcatagatatctttctcagtcttttataattatgtgacacacactgatatcacaacctttttgaggtccttaaaaaatatgaaaggagattggatttcattacatgcctgtattatgtgaaaggattaatgacatgagaaaaactt

SEQ ID NO: 309 - DNA, 10818 bp, Homo sapiens
catcatgcagcaggtcaaacaaggcatctcctagtattgcatcctacagatgtgctgtaaacatcaaaagaagacggtgggatcaggagatgctgttttggaaagaagtgaggtttagacttctccatgttaaccatgagcgtgacactttcccccctgaggtcacaggacctggatcccatggctactgatgcttcacccatggccatcaacatgacacccactgtggagcagggtgagggagaagaggcaatgaaggacatggactctgaccagcagtatgaaaagccacccccactacacacaggggctgactggaagattgtcctccacttacctgaaattgagacctggctccggatgacctcagagagggtccgagacctaacctattcagtccagcaggattcggacagcaagcatgtggatgtacatctagttcaactaaaggacatttgtgaagatatttctgatcatgttgagcaaatccatgccctccttgaaacagagttctccctaaagctgctgtcttactctgtcaacgtgatagtggacatccacgcagtgcagctcctctggcaccagcttcgagtctcagtgctggttctgcgggagcgcattctgcaaggtctgcaggacgccaatggcaactacactaggcagacggacattctgcaagctttctctgaagagacaaaagagggccggcttgattctctaacagaagtggatgactcaggacaattaaccatcaaatgttctcaaaattacttgtctctggattgtggcattactgcattcgaactgtctgactacagtccaagtgaggatttgctcagtgggctaggtgacatgacctctagccaagtcaaaaccaaaccctttgactcttggagctacagtgagatggaaaaggagtttcctgagcttatccgaagtgttggtttacttacggtagctgctgactctatctctaccaatggcagtgaagcagttactgaggaggtatctcaagtatctctctcagtagacgacaaaggtggatgtgaggaagacaatgcttctgcagtcgaagagcaaccaggcttaacactgggggtgtcatcatcttcaggagaagctctgacaaatgctgctcaaccctcctctgagactgtgcagcaagaatccagttcctcctcccatcatgatgcaaagaatcagcagcctgttccttgtgaaaatgcaacccccaaacgaaccatcagagattgctttaattataacgaggactctcccacacagcctacattgccaaaaagaggactttttcttaaagaggaaacttttaagaatgatctgaaaggcaatggtggaaagaggcaaatggttgatctaaagcctgagatgagcagaagcaccccttcgctagtagatcctcctgacagatccaaactttgcctggtattgcagtcttcttaccccaacagcccttctgctgccagccagtcttatgagtgtttacacaaggtggggaatgggaaccttgaaaacacagtcaaatttcacattaaagaaatttcttccagcctgggaaggcttaacgactgctataaagagaaatctcgacttaaaaagccacacaagacctcagaagaggtgcctccatgccgaacacctaaacgggggactggttcaggcaaacaagctaaaaatacaaagagctcagcagtgccaaatggagagctttcttatacttccaaggccatagaggggccacaaacaaattctgcttccacatcctcacttgagccttgtaatcagagaagttggaatgccaaattgcaattgcagtcagaaacatccagttcaccagcttttactcagagcagtgaatcctctgttggctcagacaacatcatgtctccggtgccacttctttcaaaacacaaaagcaaaaaaggtcaagcctcctctccaagtcacgtcactaggaatggtgaggttgtggaggcctggtatggctctgatgaatacctagcactgccctctcaccttaagcagacagaagtattggctttgaagttggaaaacctaacaaagcttctgcctcagaaacccagaggagaaaccatccagaatattgatgactgggaactgtctgaaatgaattcagattctgaaatctatccaacctatcatgtcaaaaagaagcatacaaggctaggcagggtgtctccaagctcatctagtgacatagcctcttcactaggggagagcattgaatctgggcccctgagtgacattctttctgatgaggagtccagtatgcctctcgctggcatgaaaaagtatgctgatgagaagtcagaaagagcttcatcctctgagaaaaatgagagccattctgccactaaatcagctttaattcagaaactgatgcaagatattcagcaccaagacaactatgaagccatatgggaaaaaatagaggggtttgtaaacaaactggatgaattcattcaatggttaaatgaagccatggaaactacagagaattggactccccctaaagcagagatggatgaccttaaactgtatctggagacacacttgagttttaagttgaatgtagacagtcattgtgctctcaaggaagctgtggaggaggaaggacaccaacttcttgagcttattgcatctcacaaagcagaaggactgaaggacatgctgcggatgattgcaagtcaatggaaggagctgcagaggcaaatcaaacggcagcacagctggattctcagggctctggataccatcaaagccgagatactggctactgatgtgtctgtggaggatgaggaagggactggaagccccaaggctgaggttcaactatgctacctggaagcacaaagagatgctgttgagcagatgtccctcaagctgtacagcgagcagtataccagcagcagcaagcgaaaggaagagtttgctgatatgtcaaaagttcattcagtgggaagcaatgggcttctggactttgattcagaatatcaggagctctgggattggctgattgacatggagtcccttgtgatggacagccacgacctgatgatgtcagaggagcagcagcagcatctttacaagcgatacagtgtggaaatgtccatcagacacctgaaaaagacggagctgcttagtaaggttgaagctttgaagaaaggtggcgttttactaccaaatgatctccttgaaaaagtggattcaattaatgaaaaatgggaactgcttgggaaaaccctaggagagaagatccaggacacaatggcagggcacagtgggtcgagtccacgtgacctgctctctcctgaaagtggaagcctggtaaggcagctggaggtcaggatcaaagaactgaaaggatggctaagagatacagagcttttcatcttcaattcctgtctgagacaagaaaaggaaggaacaatgaatactgagaaacaactgcaatactttaagtccctctgtcgtgaaatcaagcaacgacgtcgaggagttgcctccattctgcgactatgccagcatcttttggatgaccgggagacttgcaatctgaatgcagaccaccagcccatgcagctgatcattgtaaatcttgaaagaaggtgggaagccattgtcatgcaagccgtccagtggcaaacacgtctacaaaagaagatgggaaaggaatctgagactttgaatgtgattgatcctggcttgatggacctaaatgggatgagtgaggatgccctggaatgggatgaaatggacataagtaacaagttaattagtttgaatgaggaatcaaatgaccttgatcaagaactccaacctgttatcccttccttgaagcttggagagacaagtaatgaggaccctggttatgacgaggaggctgataaccatgggggatctcagtatgcctcaaatattactgccccctctagtccacacatttaccaggtgtacagcctccacaatgttgaactctatgaggacaaccacatgccatttctgaaaaacaatccaaaggtcactggcatgacacagcctaatgttttaactaagagtctcagtaaagactcttcattttcatctaccaaatctttgccagatcttctaggtggttccaatttggtaaagccctgcgcatgtcatggaggagacatgagccagaattcaggcagtgagagtggaattgtcagtgaaggagacacagaaaccactaccaactctgaaatgtgcttgctcaatgcagtggatgggtccccaagtaaccttgaaactgaacatctggacccacaaatgggagatgcagttaacgtgttaaagcaaaaatttacagatgagggggaaagcattaagcttccaaatagctctcagtcgtccatttcaccagtgggttgtgtaaatggaaaagttggagatttaaacagtattaccaaacatacccctgactgtttgggagaagaattacaaggaaaacatgatgtgtttacattttatgattactcatacctccaaggctcaaaactcaaattaccaatgataatgaaacagtcacaaagcgaaaaagcgcatgtggaggatcccctgcttcgtggtttttattttgataaaaaatcatgcaaatctaaacatcagactacagagttacaaccagatgtacctccccatgaaaggattttggcaagtgcatctcatgaaatggatcgcatttcatataaaagtggcaatatagaaaagacattcactggcatgcagaatgccaaacagctctcccttttatctcatagttcatctattgagtccctttctccagggggtgatttatttggattgggcatctttaaaaatggcagtgacagcctccagcgaagcacttctttagaaagttggttgacttcctataaaagcaatgaagatctctttagctgtcacagctctggggatataagcgtgagcagtggctcagttggtgaactaagtaaaagaacattagatctcctgaatcgtttggagaatatccagagcccctcagagcaaaagataaaacgaagtgtttctgatatcactcttcaaagcagttcccaaaagatgtcctttactggccagatgtcattggacatagcatcttctatcaatgaagactcagcggcatctctaacagaacttagcagcagtgacgagctctctctttgctcagaggatattgtgttacacaagaacaagatcccggaatcgaatgcatcgttcaggaagcgtctgactcgttcagtggctgatgaaagcgatgtcaatgtcagcatgattgttaatgtctcttgcacctctgcttgcactgatgatgaagatgacagcgacctgctctccagctctacccttaccttgactgaagaagagctgtgcatcaaagatgaggatgacgactccagtattgcaacagatgatgaaatttatgaagactgcaccttgatgtcagggctagactacataaagaatgaattacagacctggattaggccaaaattgtctttgacaagagataagaaaaggtgcaatgtcagtgatgagatgaagggcagtaaagatataagtagcagtgagatgaccaatccctctgatactctgaatattgagacccttctaaatggctctgtaaaacgtgtctctgaaaataatggaaatggtaagaattcatctcatacccatgagttagggacaaagcgtgaaaataagaaaactattttcaaagttaataaagatccatatgtggctgacatggaaaatggcaatattgaaggtattccagaaaggcaaaagggaaaaccgaatgtgacttcaaaggtatcagaaaatcttggttcacatgggaaagagatttcagagagtgagcattgtaagtgtaaagcacttatggatagtttagatgattcaaatactgctggcaaggaatttgtttcccaagatgttagacatcttccaaagaaatgtccaaatcaccaccattttgaaaatcaaagcactgcctctactcccactgagaagtctttctcagaactggctttagaaaccaggtttaacaacagacaagactctgatgcactgaaatcatctgatgatgcaccgagtatggctggaaaatctgctggttgttgcctagcacttgaacaaaacggaacagaggaaaatgcttctatcagcaacatttcctgttgcaactgtgagccagatgttttccatcaaaaagatgccgaagattgttcagtacacaactttgttaaggaaatcattgacatggcttcgacagccctaaaaagtaaatctcaacctgaaaacgaggtggctgctcctacttcattaactcaaatcaaggagaaagtgttggagcattctcaccggcccatccagctgagaaaaggggacttttattcgtacttatctctctcatctcatgacagtgattgtggggaggtcaccaattacatagaagagaaaagcagcactccattgccactagacaccactgactcgggcttagatgacaaggaagatattgaatgcttttttgaggcctgtgttgagggtgactctgatggagaggagccttgtttctctagtgctcctccaaatgaatctgcagttcccagcgaagctgcaatgccactacaagcaacagcatgttcttctgagttcagtgatagttctctttcagctgatgatgcagatacagtggctctttcaagtccttcctctcaggaaagagctgaggttggaaaggaagtgaatggtttgccccaaacttccagtggctgtgcagaaaacttagagtttactccttcaaagcttgacagtgaaaaggaaagttccggaaaaccaggtgaatctggaatgccagaagaacataatgctgcttcagccaaatctaaagttcaagacctctccttgaaggcaaatcagccaacagacaaggccgcattgcatcccagccccaaaactttaacctgtgaagaaaatcttctaaaccttcatgaaaaacgacatagaaatatgcataggtagaatgtaccccctccccaagcatgaaaatcatctcactgaaagatacgcctggctgcaactcaggggtggcctcatcctcccgccctgggctggcctctggttccatcacgtttgtcactgccgtttattacattgacttctcccaagatgaatcttccttccaaatgtgttttctccacacaagccttgtgatctgaatgtgtgcgctggttctctttaggtgatcgtctttgaagttcagcaaagctgcttgttctcccatggattcctgtcccaagctacctctaccaaccctctctctccagctagacttttctctttgcctcctcccttcccttccactctttaaagttctgcagttcaccaactggtagtccattaaattctcctgtctagaatgacccccccaccagtacttgaccaatttcatgtatcaatctggatttttttttaacggtataatgactgtgtttattgaaagagttttacctaaaaagccaacatttgaattggttgcagcatagagaagaaacactggtccttctttcaaaattaagcaactattaaaagcgccattttatttatttcatttaaaaaataatctatgcagcatttcaagaaacaaccatatggtgttgtatattataaactggtgacattctactattgaattatgtacaacattttcattttttatgcttcttgaggtggtaatgagaaaaaagttttttaaaaaagtgtgccttgctgtatttcttataccatttattaaaaagctgctttcacggtaaaattatgttggtttgaaaggaggaaatagcaaggttaagatgtgtgaataatttctgtatatatgtataaccaagtacaaacattgatgtataatgacagtataaaatgctttcatgtttgtgatgtctagtgatgtggaaaatataagccttaaatccattagattgcatggtaattaaaattggcataataaacacagattattgggggaaaaggaaaattagtgatctcttctactatgttctttaccaaattgttgcatctggttctgaaaaagtatagcatgtagcagcttccaaacatattcatattgcttaagaggcttaacattacctaaactagagactagacgtaaagccttcagttttcaaaatctttctggtcactataaagatcttggaacagcaaatgattaaatgtcagttcccctaaaccaataaacatttatactagattttttatttccacttatcattaatgatttaatgttggatttcaggtaccttgtatgtcttaatttattttaaatatttattttgaatgagtttgatagaaagctagtagaaaagtacagaaaatttgactattatttatagatttcaggtatatttatatgtgtaaaagaaattgacaaagaaatatttcatctggcctttactgactcctgttaaatgcagttttaaatttatatcgtaacacctacttaagtgcctgacacagtaggtattcaataaaaatttactgaattaaaggattaaattaggtgacatggtgacatctatccctttattttgacactaaaacatggacacaactagaaagaggtacaatgcaatataaagtcacaatagataatatatatcaaatttctaaaaggtaaagaatgttgtgggttcatgcagtcacaggaatgacaatcattcaacagatagttcagaaacactttttatctgcaaggcactattctagatccagaagatgcaatgttgaacaaacagacaaagccctgccctcagaaggctgtcctgcattaggaacaagtgaacacgcaaatgacatgaagtatttgttgcagagctgaggaacagagcaaatgtagtgatagaagcgcaatgagagaagcagcagtgggtacaaggaggaagaaaaagggcttgcagagagtggaaagttagtggaatattcatgaaacttcattgcaggggtaatagaagaaaaagtaaattgggaggacttaatggaaggtcttttaaaaagttaacttggagcttctgtatgtaaaatgctaggtaataaggacactttgtacaggctgttttgcacctgattttatttatcattagtgccacgccaagatcatttagacgatgcttatctgtaattctaccactttaataactatttgtatttttatgccccttctgatcttttccatatgtatttctaaatggataaattattctaggcttcttaataggtagtaatttgttcaaaagcggttttagccagacatctagttgcagtgttcaagaggattatgggggaaagagattagagataattgtctagttagggggcagctggagaaaataagctaagtttgcaataacagagtacacaagtatagtggcccaggatgtagtgaaagaacaaatcctagagtctttgaaatttctaagggcattctagacctctgttgggatatggtattattttacatactgacacaacctaaattttctttgggtagtaactaatgtcaagtctacatcgactggtaaaacattcaaagaacaaactgacaatgatgttctacctacttgttacatgctcatggaagaccgtgcagtattgaaagtatttgttaattatctgcttagtattaacactaaatttgtagaatgactttcaggtttgttgaacaatgccttttcaggttggaagaagaaaaatagcctcaatctcccaccccatgtaggcactacctccccaattacccttagaaaatgatcacaccaactctgcctacacacttccagtgatagtggctcattgtctgttaaggcaaactgttccactgttgggcatatctctttgttagaaagttctttcttaggttgctaaaatctgcctagtaccccgctaccctgttctgtcttatggagcagcccagattatctttactccctctttctcatggcaaccctgaagataatcaaggccagttactcatcatctcccaaccactgtttcctcaactgcccttcatatgtcatggttttcagatccattccaacctgactgaatgttaacagacagaattcttcacattaaggaactgtcttcatcatcatacatgtagaaaagaatctgaacatttaagtgcgaagttttctctagaaatatattcaagatatgtttattctattattgtaaatttcaaacaataaataaataagaatccatgacttccttcagtggcccagtccagtgcctaagtcatctggaatcttctccttacatcgaatacaaacctaacctgtttccaagtagggcactccctccgcttatttattcatttattcagccattcagcaaacatttattaaatggctacctatgtgaggcactatatttggcattaggtatataaaggcaactaacacatggtatctgtctccaaaggtttacagcttttcttctgaaagtgccttttgtgtccttgaatagagtgattatgacttttgtctcaattaaatgatgacctcatttagtttctgatgaagtttctctacatttaagaaaatctagtgagcaaaacggtatacaaaaaatcatctggatctgactaccagaaaaagtaaagtggttttaattacagaaagaaaaatatttgttagatttctggtcactgaataaatatgcatcttatacaac

SEQ ID NO: 310 - protein, 2304 aa, Homo sapiens
MLTMSVTLSPLRSQDLDPMATDDMAINMTPTVEQGEGEEAMKDMDSDQQYEKPPPLHTGADWKIVLHLPEIETWLRMTSVRDLTYSVQQDSDSKHVDVHLVQLKDICEDISDHVEQIHALLETEFSLKLLSYSVNVIVDIHAVQLLWHQLRVSVLVLRERILQGLQDANGNYTRQTDILQAFSEETKEGRLDSLTEVDDSGQLTIKCSQNYLSLDCGITAFELSDYSPSEDLLSGLGDMTSSQVKTKPFDSWSYSEMEKEFPELIRSVGLLTVAADSISTNGSEAVTEEVSQVSLSVDDKGGCEEDNASAVEEQPGLTLGVSSSSGEALTNAAQPSSETVQQESSSSSHHDAKNQQPVPCENATPKRTIRDCFNYNEDSPTQPTLPKRGLFLKEETFKNDLKGNGGKRQMVDLKPEMSRSTPSLVDPPDRSKLCLVLQSSYPNSPSAASQSYECLHKVGNGNLENTVKFHIKEISSSLGRLNDCYKEKSRLKKPHKTSEEVPPCRTPKRGTGSGKQAKNTKSSAVPNGELSYTSKAIEGPQTNSASTSSLEPCNQRSWNAKLQLQSETSSSPAFTQSSESSVGSDNIMSPVPLLSKHKSKKGQASSPSHVTRNGEVVEAWYGSDEYLALPSHLKQTEVLALKLENLTKLLPQKPRGETIQNIDDWELSEMNSDSEIYPTYHVKKKHTRLGRVSPSSSSDIASSLGESIESGPLSDILSDEESSMPLAGMKKYADEKSASSSEKNESHSATKSALIQKLMQDIQHQDNYEAIWEKIEGFVNKLDEFIQWLNEAMTENWTPPKAEMDDLKLYLETHLSFKLNVDSHCALKEAVEEEGHQLLELIASHKAEGLKDMLRMIASQWKELQRQIKRQHSWILRALDTIKAEILATDVSVEDEEGTGSPKAEVQLCYLEAQRDAVEQMSLKKEQYTSSSKRKEEFADMSKVHSVGSNGLLDFDSEYQELWDWLIDMESLVMDSHDLMMSEEQQQHLYKRYSVEMSIRHLKKTELLSKVEALKKGGVLLPNDLLEKVDSINEKWELLGKTLGEKIQDTMAGHSGSSPRDLLSPESGSLVRQLEVRIKELKGWLRDTELFIFNSCLRQEKEGTMNTEKQLQYFKSLCREIKQRRRGVASILRLCQHLLDDRETCNLNADHQPMQLIIVNLERRWEAIVMQAVQWQTRLQKKMGKESETLNVIDPGLMDLNGMSEDALEWDEMDISNKLISLNEESNDLDQELQPVIPSLKLGETSNEDPGYDEEADNHGGSQYNITAPSSPHIYQVYSLHNVELYEDNHMPFLKNNPKVTGMTQPNVLTKSLSKDSSFSSTKSLPDLLGGSNLVKPCACHGGDMSQNSGSESGIVSEGDTETTTNSEMCLLNAVDGSPSNLETEHLDPQMGDAVNVLKQKFTDEGESIKLPNSSQSSISPVGCVNGKVGDLNSITKHTPDCLGEELQGKHDVFTFYDYSYLQGSKLKLPMIMKQSQSEKAHVEDPLLRGFYFDKKSCKSKHQTTELQPDVPFRILASASHEMDRISYKSGNIEKTFTGMQNAKQLSLLSHSSSIESLSPGGDLFGLGIFKNGSDSLQRSTSLESWLTSYKSNEDLFSCHSSGDISVSSGSVGELSKRTLDLLNRLENIQSPSEQKIKRSVSDITLQSSSQKMSFTGQMSLDIASSINEDSAASLTELSSSDELSLCSEDIVLHKNKIPESNASFRKRLTRSVADESDVNVSMIVNVSCTSACTDDEDDSDLLSSSTLTLTEEELCIKDEDDDSSIATDDEIYEDCTLMSGLDYIKNELQTWIRPKLSLTRDKKRCNVSDEMKGSKDISSSEMTNPSDTLNIETLLNGSVKRVSENNGNGKNSSHTHELGTKRENKKTIFKVNKDPYVADMENGNIEGIPERQKGKPNVTSKVSENLGSHGKEISESEHCKCKALMDSLDDSNTAGKEFVSQDVRHLPKKCPNHHHFENQSTASTPTEKSFSELALETRFNNRQDSDALKSSDDAPSMAGKSAGCCLALEQNGTEENASISNISCCNCEPDVFHQKDAEDCSVHNFVKEIIDMASTALKSKSQPENEVAAPTSLTQIKEKVLEHSHRPIQLRKGDFYSYLSLSSHDSDCGEVTNYIEEKSSTPLPLDTTDSGLDDKEDIECFFEACVEGDSDGEEPCFSSAPPNESAVPSEAAMPLQATACSSEFSDSSLSADDADTVSSPSSQERAEVGKEVNGLPQTSSGCAENLEFTPSKLDSEKESSGKPGESGMPEEHNAASAKSKVQDLSLKANQPTDKAALHPSPKTLTCEENLLNLHEKRHRNMHR

SEQ ID NO: 311 - DNA, 76138 bp, Mus musculus
  misc_feature (1)...(76138): n = A,T,C or G
tctctttgtctctgtctctgtctgtctgtctctttgtctctgtctctctctgtctgtctctgtctctgtctgtctctctcccccactttagagaggcagcaaaacagctcctgacaacctcctcccatttacctatttactttggacagggacatagcccagtctggaccccatacaaggacactggcagagggaactcacttgaactgtttcccacacaccatgattattcccagaaggaagagcctccatttcttttgctcaaagatgttgtccctacgttatgtttccccaagatagcctttcttgctcgataaattaattaattaaaagctctacgggatacgggcttcccaacagtccctgcagtaaatctctaggcttgctactaacagcagaaatgtatctcccccctaccccaccccacccccacttctggaatccagaagtcccaagtcaagtgttagcagtatcatgctccctctggtggctcttggtgacttcagtcttttccctgccttctgcaggtaaatggccatctggtcacccttgacttgtgactgtcccctccaatccctgatttttgacctttcttccttctgcctgctgcccaaggccttttttttctagacaccagtcattcgattcagacaggacccatactaatgtaatattgtattgtttccaactggttcatgtttaatcatcttatttccatggtgatgtatgcctagaatttgggaagccagagtcagaaggattgcccaagtccaaggccagcttcatctacatgatgtctgaatttactaagccatgtttatataggaagaatttgccttttaaaaaaagttttccatataaaataacattctgaggttccattctgaattttggggggagacactattcagctcaatatagagaacaatgcttttcaggaaacatttgcccctgtttatgctctccccgatggactcatgcaattccatcttcctttcctcaaccagtgtcttagtcagggttccctaaagaaacgtacaagcagacagagacagagacagagacagagacagaggcagaggcagaggcagaggcacaggcacaggcacaggtacagggagacacacacatacacacacactggcaacaagataaacttaaacttgccagaaaaattgaagatgaacaggcaaaacgcaaaagcttccttcttccttttatctatctgccaccaggaggggctgcacacatttaggatgatggctctcccctcttcaaaaaaatgagatcacaactagccctcatagaagtgttttggttcctttcagatccagccacattgtcaaccaaatcaaccatcctctctagcacaatgagcatggtgctgtccctagactgtcgactatctgctcagcctgagtctagaagctggtaaaagagaatcagttgcagaaaacaaatatttggaaaggaagtcattcccctcaacagaagagcagttccaagagggaagagaactgtgtggttcactgatgtgtgctctgactcaaagacaacaaaggcaggatagcaagtgttcttcagcagacagatcaagtactctgggaacgactctgaattcaagtctttgaaatcgttagtcttggttaaaaccataaaatcaccattgttccacattctgtgctgctgagatctgatataaaacgttgccaaagctcctgcaaatactgcagtagtgtttctgtggtgtaactcctgaacgctgccattgtaatgggtaaggaaacggatgtggctgtgttccaatgaaaacccactctacaaaaccatggagcaagctggacttggaccaacgccatcttttgccaactctttctctaaacaaatgctatcccgtacaagtccttttctcttctctctttgccatcatcctttactgtccccggccaccagaacatcaggaagaatgtcactttttcttgtcaaggatgtatggagactacacctgcatctgcatggagaatacagtttggtatttgttgaccgggggggggggggattagcccacatgatctgtagagtatgtgcctctgaaaatgcatggagcctgaacaaagcaatgcagaagatatgtgaaggaagaggcagccataggaccacacactgaagactgacagggccacagtgtgcaactccttcctgagagaaatacacatatacactctactctatgaaagctacagtggggtcattacccagcaaagctgggccacccagaattctgggggcctaacttttgctccagtgtgtctagaagacaggacaataagccaaagatttaatcttgtacctgaaagtttaatgttttccttgtttagtcttgggtacaaatggtgcttatgaattattcttctttcctatgcctccctctcagaatggaaagaaggttttcctgtgcctgtccccattgttttatttgagaatcaaattgcttgacttattttacagatctacagccaaccaggaatttgccttgagattcgcttatgtttgttttccatgatatgaagacccttgaccttggctctgaggtgatgcttgagtttgggactgtcggtatggaggtccattcgtgaaaatgaaaacatggagagaactaggggtgggatgtaatggccagaatgtttgtgtctccccgagttcttatgctggaattctaactccatggcaattaagaggaagggctttggggaggttagatcatgaggaaagaacactcataaatgagattactgctcggaaaggatggccagtggagttcggttaatccttgccctgatgagaaaacagtaagaagtttgaagttcttcatcttgccgagtggggattagatactcgtagtaagtcatggttgttaattggagctttataaatcccagccttcatagagcatttagtttgcttaacatggaggaaacctgagatattttagagagaaaaattacctgtaaatatgacatagtttaaataaagtaataagcatatagcttggtaagcatacagtcaatggttcttactgtgtgacagctactaagctagatgctgggcttacaaccaccaatgagggagggatggtccgtgccctggcagagctcaggaccttatggtggaggcagacaggatgcaaatctgtagcaaaggtcagagtgatggtgtgaatacaaataagaagaggaaatgccccgacacagaaggcaagagaatatgctccctgagttgccttcaaggtattttctttagaatgtatgtaattataaattcttcattgtcttactctatatatgtgtagacatacgacctttctcgtgacctgggggacatctcttttaaatgtaatcctcaagggagatggctcccttctcttcttgtttccttggtaccaccggggcctaattactcaacggcacctctgtctccatctgccttctgtcaggaagctagcttgtttttcctttagctcaagccatttaggttaatgcaggtggttcaagcgagttaccacgagaatttaggataagctttatgctcatcctaaaggtgtgaccaaggatgcttgccaagctctctcaatcgagagccagttgtttagttttggagtatgtgagccatgaattgagtcttctcagctatacaatgtcaccctgcacttgtaatctcttacgtggcttgcctgtaagatctgtcgatgttagtacgatacttttacactaatatgacttctttcaactctgtgaaaaggattttggaggactggccagagatttttgttttctcttaaacttccccaacaagaagaatacgattccccaagtacaattttagaaaggaagtctgggacaaacattctgggaagttatcacatagtatttggtaaataaagtgtgcctgccttagcctagatgttccattcctgctatttatcccagagaaattatccttcagaaaaccattattggttgatccctgtggtggtgtttaatggaatcaagctgggaggccattattaggaatgtaacaagaacaaaaggtaacaatggctggtgtatgttatactctagaatgcagaatacagaaccagttaaatagatgtatatagtaaaacataggtgtatgtcaagatagcatgagatttgaagctctgaataagtttatatcaaaataccatgtatataaataaaaatatggacatggaacccatgtaaaagaaaaatgtttgaaactcataagaggcattcagttgtactgcatcaacttagggactttatacctcaacagcagtgtgctggcaaacccagagacctgagttcaatccccaggattctcacaatagaagaggacaactgacgcttgaaagttgtcctctgtcttccacatgcattccacacataggcatacacatgtatgcattccacatgcatgcatacatgtgataaataaatattaaaatacaacatgcagtatgagagaaaaaaatccttgccagctctgctgccaacagaggagctgtatccgtgacatgtcaagcacttaaattttgctaggcagtagtggctcacccctttaatcccagcactcaggaagagggggcaggtggacctttgggagtttgagaccagtctggtctacagagcaggtaccaggacagccagggctacacagtgaaaccttgtcttaaaaagcagaaacaagcaagcaaagaaacaaacaaagagaacttaaaatttaacaccagaagaataagtaacccagtcaacacatatgcaaatgaactaaagacatttctcaaagttcaggcagacagcagacatttgacaaaaatcttagacattttaaccatcagacaaatgcaaatcaaagctacattgacttttattttgctccagttagatagagtggctattatcaagaatgtaaagtaagtaaaggctagcgaggattcaggcgggcaggaaccctcatattaatagtagaatgtaaattggagcagcctcatggaaatcagtgggaagattccttaaagggctagaaaagatctaccgtgtgacccagctctaccagtcctgggtattaaggcaccatacaataggtctgctcagccatgtttgttaagtctctattcacagtagccagttcacagaataagcctaggtattcagtgactaaataagaaaaatatacaacacacacacacacacacacacacacacacgcacacacacacacacactgggaaactgatcattcataagggtaaaaagccattgacaggaaaatgaatggaactccatgccattatattcagtgaaataaacaggactcattcaagcaagcattgcatgttttctctcataagaaatgagaatctgtaaaatggatggggggaaaggagcaacgagcaagtatacggagggctttcgaggaaaaagggggaccagaggatgaatacaatcaaaatacgtaacgtgtgtatgaaaacatcacaggaaaacccactttctatatggttagcatgcattaacatgaataagaatccttggtttttgtcagtggctaggatgaggttaggatctaggcaatagctggggaaggaatgaaaatggagaagggctttgtgtgagctgttggtaatatgctgaggcccaagaatatgatgggggctttatgcctaagttctaagtgcagaaaagatggaggtggggttctccctcacgagaaccagctgtctctcctgtggagtaagcctccctctctggcttaaatccattgtccttgggctggtgcctagagcaaaatgcaaaccgaaagggaagggtgaagtcagctgagacagaagtccctttttctgttcattaattatgtaccagcaaatcatagccaaagcctaactcttttaggtggaaaccgtagatgtaggattatgtcgacctaattaaaattttgcccagcacagcttctaagttttaattgtatcctaatgtattcatctcctagaattggaatagtcattgctagccattaataagcgggcctttaaagatgactttgtaagaagcacataattaccccttccactgcttgagtaagttttgaattgtgttccatttgtgggtttttgtgacatgtaaaattcaagcacgaggcagtgaacttttacacacagtctaatgaaatcattagctgggaaggcgtcatctgtacaaagataaaaacatgaaattcaaattagcgcttaaagttcccagacttttcattcttccgacttgccattcttcttttcctaatgatgggtttcttggataaataaatttaatagtcaatccaaaagactttaattaatgaatggttgcatcattcaagcttttcttttcttttgatttttttctttttattgaaaatagattttttttccttgaatagcatacactgattatggttttgttctccccacctcccctcccgtctggatccaccctctttatgtgtctaaatagtaaacgaacagtcttcttaaggataacataagatgtgagctaaaacaagaactaacacatctgaatagggcaaaacaaactaacagaaggaaaagaacccaagagaaagcacagatacagatgcagagacccccactcgttcacacattaaggaatcccataaaaacactaaactacaagccataatgtggatgagaagaaccggtagagcaaaataacaacaataatagcaatagtaaaataataataataattaataatattaaaagcaaaatggggggggggaggtagaaaaggccctgacacagcattctgagacaaggaacttcccaagatgtcactgagttcattttctgttgatcatctaccgctgggcgcgcagcctaccttgaagagtagtttgtttccacagcgagactcccttgaagaaaactaaattctcactggcaaatgataactattagagattgctttggggttagagacgggaacatatgtccacttctctcagctctgctagtgagttcacttccatttacagacacataaaaaaatgtatcatctgtcaacctcaaatgatgaataatcaatgagattagtgaaagctggtcgcacctttccgctttaagcaacatctggaaaattgaaacaaacagtcttaacagattactttggacaaaggatttaatttggcaaaccaccaaaggtttttcctctgagcctgtaaaggatgctaacacaagtcctgctgccaaagtcaatgagcttttcctagagaaaaagagcactcttcccgtcatgggtgggtatgagtctccagtctgctttcttatacaatccataagggggaactgcccacaatgccctgggccctcccacatcaatcgttcataagaagatgctcaatagaaaaactgcttgctgtgcaaatgtgaggactggacttcaaggctcagaacccaaataaaaacttggttaggtcgtgagtgcttgcctgtaatcccagctggggagggaggaaagagtagatgtctgaaccccactggtcagacagacaggcagacagacagacagactaccgtaatagcaggagcactggcttcagcgagaccctgtctcaggaaacaagatggaaggctcctgaagaatcgttagagttggcctcatcgtatgcgagctctcacataatctgtttttatataaaaagtacagagtgcatattaacactacctcttgcaggggaaatcacaacagattcgtatacttcaaaactaaatagtgtattctgataacctctgtactcccatccccgaacactgcattcttcctgttctggtttgtttctaatactatgataaggatcatgaccaaaaagcaatttagatagcaaagggtttatttcatcttatgactcgatcagcaaagaagagtcaggctggaaaatcagaaaaaaaaaaaggggggggggtggagggaacctgtgggcagggcaggggctgaagcagatccatggagaaactctgtctactggctccctctccctccatggctttctgtcttcttatacaatccagaaacacctgcccaaaggtggaattaccgacagtggcctgggtcctcccacatcaattgttaataagaagatgcaatacaggcttgccttcaggccaatctgatggaggcatttgctcaattaaggtttggatcaaatcgacaaaacaagcaaacaaaaaagatgattcaaacaaaaaactaaaccagcaaaccccaaagtgagaattttaatctaactgatctatgatggaaatttctttaaagtttacaaattgaaactatcctcctatttaatctttatattctaaacaaaggcttcttcaagcataggttatcttgttcaactagattttcagcgagatagtaaaaataaaaccggaatcagatttcaaacagacagacaaaacaaaaaaacaagcaagccaaaaacaaacaaacaaacaaaaaacaaacaaacctggcatcgcttttaccataagccacaaatagtttaatcggcttacttttgatctgttgctgacaggaaggaacagtgttcagtgaaatgaaaatagagagggagaattaattcacttcttcagtgaatgtgtttacagacagcaaactcatcggatgcatccaactcttaagttattaaatagaaatatttagccgggcgtggtgacacatgcttttaatcccagcacttgggaggcagagacaggcgaatttctgagttcgaggccagcttggtctacaaagtgagttccaggacagccagggctacacagagaaactcaaaaaaacaaacaaacaaacaaacaaaaatataaacaaaaaataagaaagaaagaaaaacgaaatatttataatgtttagattttcttgagaaagcaattgaaagctaggctgagtgaagcagcagatgctagtttgcaagaggacccgaaggtcataaatactaacacatccccactgaattataaaaatgagtgcagtgctgtcaagagttttgtcaatttgatacaaaactagacacaacgacagaatctcaactgaggaactgcccctatcagattgtcctgagagcatatctttttttttttttttttttttttgattaatgactgataggagagagcccagcccactgtggacagtgcctctcctgagcaggtcgtcctggcttgtataagagagccacctgaaccccatagtatttctccactgctcctagctgggctgactcccctgctgaaggactgtgatctgatcatataaagccaaataaaccctcacctcaagttgcgtccggtcatggtgtttatttcttgcaatagacagcaaacaacgacatgcccggtccaaaataacctaatgcaagcctcccaagcaattataaattgtcctggtagccagattttcaacgtaacaaacaaaacataaccttatttaactcagtgcaccccaaaatagtttaacatgtgatcgatacaaaaatcattaacgaagtcgtttccattgcatctctgcataccaagcgtttaagttttggtctattttcctatatacgtgagttcagactaccgcttttaaagggcacatacgcggctgtggctagtggctaactctagtagacgttgtggttgatttggtttgttttataagttcattgctttctcagccagtctccccctgtcctcttaacttgtattctatcttgtaaattattgcctcctgagaattttggcaaattaagacactcgaaagcctgcctgagaactcctaaaagaccagtgggggtcgattgcttggagacgttcctgggcgcgcggtctggcgcttgcccttgggggctcaccgggctcttggtggcctcagctgcgcagcagctgggaccgaggccatcagcggcggaaggggaaccgtcttatgacctcactgctccacgccatgctggggatcaagaccagttagtactgctgacttcgaggctccaggtgtcaaaaactttaactgtgaaaatgccaggaccaggtccccaccgcctagcccacaaactgtcactgtcctcggaaggaaacaaagtgaacacccaagactaagaactaggcagcgaccggctgccaccgctccgcgggagtcttaacaaaggtgggaggggaggtcttccggaagggggcgggggagggtcttccctgcttaagttaattggttgtagtttgctaccacgtgatgcaggcaaggatgggcggctgatttccccgtcctcgccatccccttcctgacccagaggtcaagggaggcggagagagggtttcctagacaaccgcagtgggcggtcagtacacagcaggcccggggctggtgtcagctgcaggaagggatttgggaggtcggagtgcactctgacctgcctaggacagccctggaatccatcctctctctggaataaggtactgagtatcggtcttctggttgcctctaggtgtccctcccctgtaggaaggactagggagtcacatggaggaaatctcccagcagcacacaggtcaggggacctatgtgatggtgcagtgggggttatagtaatattgtgatggtagttataataataaaaaataatagtgatacttcagagaaggatcctaggaaaaaggaaaaaatgatgtgccctaggctcgggcaactactggactgaaagactcaagggatactgatcatctagaaataggagggcctttatgtgaaccaccagggagaactgttgggttctggctcctttatactcaagggagaaaacagttggaccacctagggcttctgttgggcagaaaggtgatagtttcttagattaaatgctcactcagctttgctggcagacagttctttacggaccagttagtactgtgttacaaattgccatgcagaacagtgtttacagtcatgttgggtaggatgtgtgtggtatgacagttcattggaaccatttgataagttatgtcgtgtcagccgtagttcctgtcctcggtgaacatgttaggaggaaggacctgcaagtatcacaatacaatgtgacagacagtagccatgcagaggacatgtgctaaccttacccagtcacatgaaagagaatgtttacaataagaccaaagaggatgcaagtcttcgaagaagactcaaggcactctttaaggatatatggagtatagagtcaaggacagaagatatttcaaggagaggaagaagtatgtgctgaagtacagccatgctagctatcataggactagagttgtagccggtactggaatgttgagtggctgttttggttgaccaggggcttaagagattggcatgagtctgaaaatggtgattataaacaatttccaagaggagtagcataaacaaatatacccccgcaagagtctagctgctcccatggattagagaatggggtaggtagtgagacaagaggggccacgatggcagagagtggagaggaagcataagaattgtgtgtgtgtgtgtgtgtgtgtgtgtgtgtgtgtgtgtgtgtgtgtgttgggatggagaagggatgggtggtggtgtcctttagcacaagaaggcattcattaaggggaaacaacattggttggaaatacgagctcagcttgggacaggcatactgtatttgagatgcctgtgacatgttcacgtgggcttttgagtttattgcataggaaagaggacacgaaagatgagtggcttttacaaagaaggaagctgttagtgcaaaataacaagtagaggactagggagacagtttagacggtgaagcgctttccttgcaagcaagaggacctgcgttccatcccagaacccatgtaaataaaacatggcgtgtaatccccgtgcttgggaggcaagccaattcctggagctccttggtcagcgaagctagcccaccaggtgagttcccatcaagatgagagacaccgtctcaaaaggaaatcgaggtggatggcacctgtgggatggcccctgagattatcctctgacctccacacttagattcacacagcagcgtttattcttgcatgtgcatacacagagtgggagggaaggagagggaggggtaggggatagagagaaaccaaggagaaaacttgagaataatcagtatcgctcaatgctatcagcattgctcaaagtcacatcaaggtcaagttgaggcggaaacgggtccactgtctttggcaatctggagttattgactgttgttggacttatttaaccagaagtagacgctgtgatggcttgaagggttttctttcacattacactgggttgaggactgcatggagtaaattattgttgctgatgattgtctagaaagttctttgtgaaagtgtgaaacgtagctattcagggtttttttttttttaatgcaatatagaaaggacttttctaaatagggaaacctgtgcttacacacagaggaaaggagaccctatgggaagaaagatggactggcagagcagtctctaacagaggtagacacggtggacccgtgcacagaaaagctgattcatttcagtcaaaacgaagtctttatttattcattgtatgtgatacgtgtgcacatgtgtgtgggggcatgctcactcaaggatgtatggatatatataagagactgctaatatggagtgtcttcctcaattcctctcttaccaattcagccaaattgctggacccggcaagccttccccatcttgcacacccaaacccaacaactccttgagctctttctgtctccactcgcaggcctggattgcaggtgtccagcgtttccatgggtgctgcgaacctaaactgaaatcctcactcttgcacagcaaacacaagcaagcacttcatccattaagccaactccctcagcccccaaatgaacatttctactgagccaaaagtcctaagggggtggggcgggcgatgtgtgtttaaggagaaaggaaattgaagggagtatatcctaagacagccctgttacctgtgaaggtgaggacaggacaatctgacaagagatggcggaggaggcagggagggatgataagggagaggggagaaatgagggcggaagggggcaggcttgagaacggtggtgcatgttaggataatctcatggatcccaggattttcatcttccagcctcttctcataggaaagggagcagaggagacacagaaacgcttgcctctgtagctggggaatagcttcttacagctcagatgtcgttgtgcaaatttgggggtttccattggattcttctttgtccgttaacttctgagctagaataaggttattttgcctaaatgggtcattgatgttgacagagtatcgtgaagttgagagagaagcttcatgtctctgtacccagaaatgtagtcttcttgactaaatgaagagatgtgctttgtttttacaaagtcctcagaaggtgaactcccttcctctaatactttactgtagtgcactcttcagtcggaagagtcccagctggacttttaaaattcttttttatatttaatttgcagtgtgtgtgtgtgtgtgtgtgtgtgtgtgtgtgtgtgtgtgtagtgtggatatgtgcaaggtgtacaggtacttacagacaaagaggaatgggatttgcagagcaggggtagctcttagcccactgatgtaggaactaggaatggagctccgggcctctggaagaacagcaagtgctcttaacctctgaatgaatctcaagccccacaacagagatctttaacaacaaatcttaaatatgtcataaaatgaatataaaaaactaagaaacttaaaaggaggagaaggaggaaaaggaggagaaggaagtggaaggggaggaggaagaagaggaggaagaggaagaagagggagagaaggaattgtattggcaactatagaagcacagaaggaaggctttattttgggcttgtggtcccagcgggttagaagcctatattagtcagggttctctagaagaagagaactgtgtgtgtgttgattagaatggctaccaagctgtggcagtggtctggctagttcaagaatggctgtctcctaaatggagacatgactggatgtctcagctggtttttggttggaatcctatggatatcgggttctaatacctgcaaagtagtgcctcagatgcagaataaatggcattgaccatgcgagtaaggaaaagcagacaaaaaccaaaagcttccttcttacatgcgaccagaaagtatggcctagatttagggtgggtcttcccacctcagataatccaatcaggggaaataaagccctttacaggaatgcccagatatttaggttttagttgactccaaatgtagtcatcacaaagctagtcgccaccatggtgaggaggtgtggtcataggtaggcatggtggcagagttagctaaaggataatgtggcttttgaaacatttactttatttattattattatcattattattttgaaaagcctgcccccccctccgctattcccatgacacacttcttccagccagacaacgtcacagccaccaacttggaaccaagtgttatctcagattccagagattagaggggacatttcttggaagcatggtgacacagctcctggagaagagagagggtgaagagacagatcaggaagtccaaaatcagtagtgaatgtctgtaatcattgaggaggaaaccgtgtagttctttccagaattggtatcttgggcataaattaagattaccagggtgcttatttgatgtctttggaggtcttgaggattggctctgacctttgcatctagtgggccctgctcaatagccttcctttcagttccccagacattaaagcaatggaaggccattcttctgataagtacaggggctacaaaccgttcctttacttggtctcccttctgagtcagcctagggaagggatactatggcctgtaggtacataagggccatcaatggaacatctaaatgctttcaagtgttttctagctaattctcttactgctagtgttctgctaattaagggcaaagttttccaagtagctttctgagctcccggaaaagtggcagacttcctttgtcagcagggcttctccttctctaaccttgcctagggagttcaacccccaaccccgtgtacacacacacacacacacacacacacacacaccatccatctctacctgcaaatgccacccggacttggttagattacaggttcagcttcctttctcccaataagaacccaatcagcaaggacctgagtttcctggaatgtaccccatgctaatgaggtacctcagcaccttagccttcagccaatgacctttgcccatcctggatattcctaccccattaacttcaaactatatagcccttaaatcatcccaagtaaagttgatctgtctccctgaaactggccccattatgtcattattacctagccatttgaactcacgggtcatctgaaaccctgctggtgagactctgcttcctaggtcatcatgggctggtggacaatgagcccaggcagaagggagacccccagggtaactcccatatcactgttgtattcttgttgtaaagatgccagtgggaagtagagaaggaatgagcagcagaggtctagccctacagtactgccctgactgcagatcctatctgtctgcatgttcttcagtgtggtccatcacacccttctgccttcatgtcctgcacatatcccaagcatatcctcagcctgtgttctgactgtgattccctctgcctggatgcatgtgagccagattccttcatggctcaccttatgtatttaattctttacttagatcccaccatatcaacccgggttcctttcccctccttgccgtctgctctggtacctcctaggtctttgatacataggttagtgactggggaaatggctaaactgagtcaagacatcagtgcgaataaggtaattttctgattacattttgctctgtggaattagctgggtagggttttctcctctcctccttggctcaatgccttggtccatttcatgttgctataataaaatgcccagagctgaatagaatcagtagacatttgttttctatagttctgtatgccgggagttccaagatcaaggcactgggatcaggtgtgtggtgtgatcttcatgtggcaggtggaagaggaaaagaggaaataaccccctccatcaggctgctattggacaccaggtcctattcttgggggaaggaaccttcatggcctctgagcatggtatccccaatggaggagttagagaaaggactgaaggggctgaaggggtttgcaaccccataggaagaacaacaatatcaaccaaccagagctcccagggtctaaacagccaaccaaggagtacacacagagggacccatggctccagccgcatatgtagcaaaagatggccttgttgggcatcaatgagagaagaggcccttggtcctgtgaagaaggctcgatgccccagtgtaggggaatttgagggtggggaggtgggagtgggtgggggcacaccatcactgaagcagggggaaggggattggataggggatttcgggggggggattgggannnnnnnnnnnnnnnnnnnnnnnnnnnnnnnnnnnnnnnnnnnnnnnnnnnnnnnnnnnnnnnnnnnnnnnnnnnnnnnnnnnnnnnnnnnnnnnnnnnnnnnnnnnnnnnnnnnnnnnnnnnnnnnnnnnnnnnnnnnnnnnnnnnnnnnnnnnnnnnnnnnnnnnnnnnnnnnnnnnnnnnnaggcctgagtgctaagctgaggtgtactttgctgtaagccctgaaaccgttcctttccccaaaaggtgctgctctgagtttgaaaacagcattactttttttttttttaattagcttagtaaaacttatcttttcagagtcttgaattttggcatgcccatcctccccccatcccacctttttttttttttttttttttttttttttttttttttggacatgggttttctcccaatctgatgcctggttcattttgcaagaactccatcagtctttttagaggtcaacttttccctggggcaggggtgcatttctttcttctcatctggtggtaggctgtctagctgtaatcaggggcctgtcaatgccactgttgctagcacgttaaggtgatgcaccaatcggcctgacgtgactccaggactgaactccgtcttttgtcttctttaatagatatattagtgtgaccattgtttttaatggaagatgattgaaagtgaaaacctaaatcgaggtgaaatcattaaagaactggtgagtccaagccctttgttcagtaatatttgcaagagtattgagtagagcattctgactctccctcctggagctgtgaggattgggagcattctcactctccttcctggagctgtgaggattggtgggaaggagattcctcctattggatgactggaggcacaggcatcagtagcgagatcctggtgtctgtgccaggggaagtttatagtttgtgttgtcaaaagacagtttttcaaaaactagttaaaacagataataattcaaattctttcttttcaaacagtgtctgtgcaatggcttaacttatgagatcgttggacaggaaggatcagatacttcaaaactggagatgtttttctcagggtatccccgaatagttggattatcattgtttcataatttatcaagtcttacaattgttgctcaagatataagggaaatttcagggttggagacttgcttacagcttaaagaactttggattgctgaatgctgcatagaggtaagattaaacagacaatcttacaaggtacatctaagcctgagttcttgactttggaaaaacaattcattaaaatgtatgcagtgtgtatggatcaaaactgataagtgggcaaagataaaaacttatacaaagtgaaaacagaataaggaatcaaaacataatttatttttggtaaacatatcaagttatgtcgtagccagtattgcttacagcagaactgattcactgtggcactaagtggttagacatgtcgtttagaaagaaatactacaaaatgtgtcatgggtaatagaaatgtgcatacctttgaactcagaaactcctaccctaagaatattacactcaagaagtaattcaacaacagaaaacagttaaaagttttagttgtaccactttcagaataaataaaatcatcaaatgtgaatagtctgcacgtaggggaattttaaagaaagctattatgaccttcatagagtcataattttgtctttttaatttatgtaaatattaaatgtgtaagatggtcttaagcaaaaaaaccctgcagtatccataatatcatatgcatatgattatattaatagcaattagatgtagttggttaacatttaaagaatacatacaaaattgaatatagctctatttaaatggagaaattatatgtttattttaatttagagttattttttctgggtatttatgttacaataaagtggtacttataagaaaaaaagacttagaaacttactttattgataagtcaaatattttgaaataactaacactcttcaatctccttttcaacagaaaattgaaggccttcaaggatgtagaaatttggaaaaattatatttatattacaataaaatttccaaaatagaaaatttagagaagttaataaaattggaagttctgtggctgaaccacaatatgataaaaaatattgaggtgagataatcttgataatttgcatgtaaagtcagtttactgctatggcattaaaaccacagtgtctatggtacaacatgaagggtcaaaatagttatgaatagcatcattattgtggtcaaaaagaactaccttggggctagagagatggctcagaggttaaatgcactggctgctcttccagaggacctgggttccagtccccaacacccacatagcaactcttcaactatctgtaactccagtcctaggaaatccaacaccctgttctgttctcggtggtgcacagcatgcacacaggcaaaacacacacaaacacacacacacacacacacacacacacacacacacacacacacacacgtcagagttgatgttttaaaagcacatgttgtctacgcttccagggcttgcagactttgaagaatctaaaagacctcaaccttgcaggaaacttagtcagcagcattggtatgtactgttccctttagaatttgagctaatgcatttttaaaatgtgtgcttaaatttgcctcttttagacgttatgccattgaaaagccattttacttttgcatatatttttaccttagatcatagttctttctattgagttatgaagatcttttaaaaattactggttctttgagagtttctttttttttttatcctcatagtattcatttttttcttttcttttccatttttattaggtatttagctcatttacatttccaannnnnnnnnnnnnnnnnnnnacccactccccctttcttacagtgtgttttgatcatatttatacccacccatctcttcccagatccacctccacttccctacctatttttaaatctatggttcagatgtttaactctcagacactagtcatgattgctaattatgcagtgggattgttaatcctattgaaatgcaggaataagggccatctgtaacttacaagtttgccagggtatataacaaaggtagaacaagaaatctaattatttttgtgatgctgaggattgaactcttggccttgggtatgcaagacaagccccctgccactgagctatgccctcactcctaacatgtccttaatcttgtttttaaatgaaaggtcgatgtcttgatcccaatgaacaactggaaaaactaaacctttctggaaatcaaattacttccttcaaggtatgttcaactaaatggttggtttctgtttatcaacctgagttaccaactgtatagaccagaaaatataccaaacaatcctccttcaaggagtaattgcattgagttcattactttgtgcttcctggtctagggcagtggttcccatcctgtgcattatgatcccttttggaggttacatatcagatatttacatttttcacagtagcgagatggaagttaagaagtagcaacaaaataattttatggtagggggggtcaacacaacatgaggaactgtaaagggtctcagcattaggaaggttgagaaccactgctctagggagtttgagtagcatctgttcagatagccataggacttcatccttttagaaccaaaaaataacttagctatttagctggtaggatgctccttcctctgaactttgtcctagtctttctggctacatttatcttgctgggggttcatcctcttcgagcatctgaaaagggggactgccccttctggggctcttcttcactctctctacataatcccatcctgtctttggactgtgaatgcacctgctctaattactgctcggctgggccctctgctcaccctgttgtctcttctgagctgcacacatctcttaaggaactccaaccgatgcccctcccaagccctccttccttgcaggtgtctctgactctctaaatagtcttgccactcatctagttaattaggcaaaaaatccttacagtcttttttacccctattattccttcacatcccaccttcagtctgtgagcaaatcttgttgttgcccattcagaatatgcgcagagcctggatcactctcagcctggttggcaacactatccttaccagtctgcattactgagaaagcagaaaaaataaacaaataaacagaacaacttctcagaatcctccctatttgtgtctgtgtgtatgtgtgtgtgtgtgtgtgtgtgtgtgtctgtacgtacaccatggcacgcatgtggagacagaggacactttgcaaaagtcacttcacccattccactcaggctgtcacagcaggcggcacccttacgtcaccttgctaaccctcttttccttttcactgtcttcagtctgctctctgtgcgccaaagcttgctggagccattttaaatatgctataataaatctctcttgtcaaactccctttgctctctcaccttgctcacaatatcattctgacaatgtgagactgaaggcacacagtcaagcacagcttatgaaaatatgagagaaaaaggagtaagaaataattttatatcggtcaatgtaaagacatgctctgactcagagaaaaacagaagggtatttcaaggtggtggaataaatactttaagaaaaagtttgagtaaaattttacctgattagtgcaactgcgaaggaactaatcaataggaaaggctagcagcattttaacaggcactggaagaggctcttctgggcagtggcagtggccattccaagagagagagatgagtattcatgaggacatggagatcagaagtcacaggtctattgagtaatgtcagcattacatggtgtgcccaagagcacagggagttgggactaccaggctaatcaaatcttcaatgtggcgtgtttgatagatgacacgaagctgtcactgcttttcagtaaggggctattatgatatgatcacagatgtccctcaggaacagtaacctggaattagtgtttcttggttaggagcagctgggacacgcagaacatccatagccgtgtagcctgccatttagcaaaggttggtcttctcttctggcatctcacatgtcctttccctagagagaagcacctcagccgcctaggtcactgtagcacgcgtactcaggagtgcgttagagtgtgacactggattgtgatgttaggggttaggacccttcctctcaaggcgagcgttcctaactgattgatcattgtcactcgtgtttaggaccttactaacttgaccaagctcactcacttaaaggacttgtgtctgaacgacccccagtataagtccaaccccgtgtgtcagctgtgtaactattccacccacgtgctctaccacttgccgtctctccaacgactcgacacgtttgacgtatcagcaaagcaaatcaaggagctggcggatgtaagtgcggtcgcagtcaggtatctgtgactcgagtttgcatagttaatggctttcttctggctgggtcctcatgtggctgttaagacacagtcagttcttgtctcctgtttgtcccttccgtagcaggatgcttcacctgaaaggacacagataataacattaattcaggaactcggtggtcagacaaaaacaatgggaaactggtgttggaaatagattttttgatacctgattctttaaattgtgttagaacaaattaaatgtagtattttaaaactctttccccccccccacatggaaaaaaatcctaggttaaatttgaatttcatataattaccaaagtatgtcttgatataactaaatgaatacaagcaagtttggtgaataccttgttgcttatttgaaatgtaacttagcattgtctattttgtctggcaaaataactacttactcctcaatatatgatgttgtcttagatttaagaattcatttgaaatccttttacctctcagtgtattgaattttccacttaccccaaataacaaaaacatcattttccaatgtttttctttcttttttcttcctttcatacacacacaatatatatatatatatatatatatatatatatatatatatatatatttatatttatatgatggatgtcaagtgttttgctctgatgttcttcaacctgcttttccaaaaggaatctcttcttggaccaagaactgatccttctgtgtagactggctggttggttcttttttgactaatctaattctcaggcattatttaacttgtataatccataatgggctacttaatcaatgtgttattatttgtgggttaataactgaatactattaggtttaaggttggagataattgcattagaattataatttaatgatatcatcagtctaaaaggagttcacttagagcattgtttcacagattgggggagaggacaaatttttttgtcaggcttttaaaaaatgaattatactcaatttggcatttacttttaactcttttaaatgttttccctaaattaataacgtaggaataatgtggtttcatatttgttccagtcttatgtctttttagctaagtatactattttataagttaaattgtatctgtaatttctttattggagtcttggaaatagacattcatatgccacatactcacatattaaaaataaagatgctctttgggatgttatgtcatatcataaattaaatacaaaatcctgtgggcaccgttgtgtctgctgtcagcatcagcatttctgatggagctagcaaacttccaaatgtataaagaacgtgttatgtttatacaataccactgataactatgccttagctatagttctattgctgtgatccaaaattcttagggaggaaagagtttattgctgcttactccttgagatttatctcccagaaaagtcagggcaggagcctggaggcaggagctgatgcagaggccatggaggagcactgcttgctggcttgctcctcctgctttcttatagcacccaggaccacagcccacagtgagctgggccctcccttttccatcatcaatccagaaaacactccagcagctaatatggctgaatattttctaaattgaagtgctctcttccaaaatgactctagcttgtgtcaagttgacataaaactagccaacacagctacctgtaatttgttttatctaaccctttaccttcagtccacagcaatgaaaaaaataatgtattataacatgcgaataaaaactgttcagagacatctgaatgaagaacttgaaaaactaaatgacagaaaatgcaagttacagaagctacccgaagaacggataaaattattcaactttgcaaagaaaacggtaagatttaatcatgtagaatttcagtggccacagtgtaggaaaattatccgacaaactagtaaatccttaactccactgcccgttcactcccatcctgtgtgcatgtgtgcatgcatgtgattaacactgacacttgagtcaggtttactctaaaaatactttagttccagataattaactgagttgcattctatttataattttttttaaaagatatgggtgtgagacctctgttccaatctccagtgcccatgtaaagcaggcttggtagcctgtgtttgtggtcacagtgctcttaaagtgagactgggaagcagagacaggacttaagcagcatagaacagaggctctgtcgcagacaaggcggactatgaggaccaacattgagattgtcctccacacatgtcctgtggcttgcatatagctgtgagtgcacgtgcacatacacacacacagtcacacatacatgcatacacacacacactcaaacacactcacacatacatacactcacatacacactaacccacatttacacactcacatactcaaacacacacactcatacatacacacatactcacacatacatacatacacactcacatactctctctcacacacacacatacataagcacacatatacacacacacacactcacatatatacacacacaggtatacacacatacaggtatacaatggggaacttcaaatcaaactctgttttagtagtgtgtgtgcttttttatgcagaataattagattccttttattaaaagtagatcttgaaaagttaagaatcatttacttgaaaaacagagccttgtaagtgtaaagttttctgtaacttctcaaaaacatgaagacacaatggatttaacacatggtgtttgtcttagttagggttttactactgtgaaaagacaccatgaccaaggcaagtcttataaaggacaacatttaattggggctggcttacaggttcagaggttcagtccattatcatcaaggtgggagcatggcagcatcccggcaggcgaggcacagtcagagctgagagttctatgtcttcatccaaaggctgctagtggaagactgacttccaggcaactagggtgaggatcttatgcccacagtgacacacctattccaaccaggccacaccttcagatggtgccactccctggtccaaggatatacaaaccatcacagtgttagaaacccatcaagtcatttaggagtggggaagctgggtgcttcgtttgccctttagtgcaagtggggataaaaattaaatgataaaatatcaagaataaatatgtagatggattgatttaattgatctcaacctgccacatactagacattgcaaagaaaaaagatgtaagttcaattgcaaaacaaaaaggtaagatgcttttgtactaaaagttgttattcataaaaggtaagcacacgggctaggaagatagctccgtaggtaaagtgcttcctgcacagcataaggacctggtttcagtcccaagagtccagatagaagggtagccatggtaatgtgtgcctctcatcttaaagctggggaagtcaagaccagtggaccttggtgttcactggtcagccagctgaggctacttagcagtctctaggctactgaggtaccctagctaaaaaatgatgtggacagtgcctgagggacgacacctgtgtttggcttctggcctccacatgctcacacacacaagcacatgtcctccacatacacattaagggaaaaaagtctaaagacattaaactatcctcaagaaacaggatgcatgcccaaagagattctgtccttagtacagtgcgtccatgaggaagataaggttaaaatgagatatgcaaacaggaaaatgggaggaagcatataagtcatcactttacaaatgaatacaacacagtgactaacaagcagtcctttatgaatcttcaaatgcagtgtgaaaccacctttgctgtaaacctttctaagtatagcacacaacggcattaggtggcgcagatgaccataatccactctgcctcactcctgagagtgagccgtggtcacacagcttcagagagctcctagccattagcccagcaagtctactcgtgtactttattcatcaccacctcattgacagtagcagcatgaggtgctacctaaatctttaccaagaaaacaagctggtggttttgcagtaggctacttacgaggttgtcactaggaagtaaagctggagagctgggcacatggggcggcctcttgcagaggactcaagccggctctcagcacccatacctggtgacccgcaaccacttggaactctggcttcaggagatccagtgccttccttggccttcatagggacctccattcattatgcgtaccacatatccatgtgtttaaaggtataaaaaaataaaataaaatttttaaggaattgaagtttgaaatatatttaatggccctttctacaaatgagcatatttttggtttataatcagaatgagattcttgaagtacaatgttaattacatttaaattatttgatttaaaaaatcatagaaagaccaaaatgtcaaaatccattttataatgtgtcattttcaagtatataggttgagaatctcttacctagaatgctttacaaccaaatggatttcagagtttagagtctttcacattttggaatatttatataaactctgcccttttttttccagagctgaggactgaacccaaggccttgagcttgctaggcaagtgctctaccactgagctaaatccccaaccccttacatgaactctgaatgtcttgtatctgaatatctaaaatatgtcaaaagtttcaaatttgggtgtacttcaaatttcaaccatattaccaacaagcaagtaaaggaatatatatcatataaactgcacacattgtttaaatatataatttggttatagcaaccagttaaagctatataagtgaagaaatatcactaactagtaaatttctttttataaatgctgtgcattatagtttatcttttaatcctacaagagattttccctggcctcagactttaaaggagtgacccaaaggctaagtaatcaagataaataatatttaaagcaatattttaaatgccaattaatgccaaaagtctaatatagacagcaaaccccaaaacattaaaatctgatgcagtgtatagtttttgagctggtcagatactgaagcaaaaggaaaaagttgtctcccctttatgtgttttctgtggttgtatctctccacacatagttcttaaaaatagttattatgctaaaaattgcattatctgaagtataaggttttattcacatgcagcccaccattggtggtaatttcactttggctttaataagcacactcaacatttcatgacctgtttcttcaatgtgtttgttttctgtgaagagacggccatgcttgctgtttctaacctgtcgctcattcaatagacactagctgaatttgcaccaaggtcaaagccgcctatttggcttttataaagcttgagctacctggatgtctactttgaccatttaaaccaactaaaatgaatatctgaggctttgccttaggtgtgttttatttttaatttgctctttggtgcattgatttccacagttagaacgggaactggctgaactcaagatctctagcaaagggcagagcgatacaacgccggaggccgagaaaccccggaatagtgaggttgtcacacaggaatcagttctgcagcagaagatactgaccaagctgagcgctctggatgacagagttacattctggaacaagaaactgcatgagtatgtttgccgaactatctggtcattcagattgataacgggatcaaataaaatcagcatgttggaggccgagagttgagctcagttcctttgataaatgggagaaagcagaacatgaaccatgttggcacacccggttcctagggcccccacccactcaaagctgggctccggctgaagccattttcagttaagcacagtgggcttcctctgatcagcatggcgtcacatctcagcctctggctgcaaactaaaagcaattgagtgctccttagttcagaaatgcagcacgcagaccagaccagcaagcacactacagtccttgcttgttggggacactgggtaaatgggttactagggtctttgtaatgatcttaacaggattgtaatgtccatgccagatgaccctcccactcgctagctctttagatggaagtactagtagtactggtgtggtgctgagaatacgtgggtgtaagaagacaaaacgacctgtctaggatttggcatccgtgctcttagatccggaaaagtctcagcttttcatactctgcatgagggtaacaaaatcagagcttttcactgctagaaacagaatatcttgttctggatctaactgctaacactcacgttactccgccactgaaagcaagaggtaactgattctcaaatccatgctacgtgcatgttctacggcacatgaacgaacagctgtgtgccaatgctgtgagtctcacatccgatgaacccctgcatgtgtgttttgtctctggtaggattgaagcgatttatcggactgaagtaaaacagaagaagaagactcacggcttactgaccccgtttctgctaactgagctggagactgtgggcaatatccattttgaagaaggcactcaggctgatgactggtaaacctgagctttgagtagggctccaaaagtagttgtatatttgatcctgagccaggtgatcaacttgcaaagtgtctcattttcaaaatagtttttagcaaaatatccatctgttgaaaatttgctgtcatacatcttctacctgtacctttgtctcattgccttatcgacatgagacaagccctggacacctcaacggggtcactcaacacccattctttttcttagccagtcagcagaaaaagtatatggggagtttgtaaatattttaagaaaaaagtttatgtcccactgctgtcctcgcgatgtttatacagttgctgggcagatagtcctggattctgaacactggctgaaagccagaacagagcagaaaccaactgcacaactggccacagcaggttgccaccgtggaggcctcctggccatcctgctggcctgtagtcaaaggggaagccgtgtgggagctaagccgtcagtgggaacaaggccattgggtggtgggagaaggggcacaaagccagacttcaggctgccgggttccctgtatcacagccagtgggaaacgatctggacaagatgagaatgaaactcggttcattccaactttgttagccagacctgttctaactcctgagtctgacaccaggtggtttactgtcagcatctttaaacagaaccgtttgttactgtttccttgtgtaatacaagctcagatccacaaggaggcacaattacatcaacctactccaatgtgcatgtcatttcttgcaagaaagtgggttctgaagagagactgcatgtattagactaagggcctacggaaggagctgccaagatctgggtcatacatatgacatagaggtcatttgggctatctgtcacctcctgcactgataaagcctttggtggtaagtcaggtgctctaagctaggagttcagatagtgggctcagaaatcacccgtcacagaagccctcacacctatgttacataaatggtcacagggtaaatgaatctcataaagaatcatttgcttccttgttaaatggtctctctttcggtcttaatctccattctgtgcaattttaagacaagactgtaattttattagaacagccagatgagggcagcagagagcagaccagtcatcgaaaggacccgtgatctagagtttctcaaagctgccacatcctcctctggttctcagatcacttttctccctggaagatctctgaggcttcaagaaggtgccctctgcactccttacccaaggcttctctgctaagtctttattctttagcatttgtcatatttatggctttacatattattgaatatctaccccctttggaatataagccttaggagagagagggtggacaccacccttctcactatgtgccctaacttaggtagttcttgggatagagtcagagacaatgatattcccaaagaggacagggccagtgctgatgatgagccagggtatgattcagcatgcatttgagatgtggtacaggcgtgctagcgggtgaagaggagtggagacagccactcctgccatttttaactactggttggggccaggtgctgagtacttagctttgaaagtccctttgcatatttactcgagtgttttagaaaccagtggatattcaaactgggtactacagctacatttgggtagaaatgattatttgtgtatgaatacatacatgcatatatatatatatactatatatatatacatacatgcatgcgtacatacatatatcatgcatggatacaaacatacatacatacatatgtacatgatagataaaatcacctagggacagtggaaataagagagctataattctggttcctggtgaaaagcaagctttccaagtctattggagactggggaatagttcagtgacaaaggacttctctgattgcagaaggttcttggttcaatccttaacaccataaaaaaaagtaaaataaatgaaaatttaaaaagaaattatttcaaggaaccggagggggggctggacagaaagaaaagaaaagttgaagtcatagcctgaaggaaagtggccaggaatatgtggtcacactgaagctaatcaaatattcttaagaaggaaggactattcagtcaacatcgtttttaggtagaagaggtagataatagataataaaaagaacattttactgtgtttcaaattttagcatcttctgttgatcaaatatgcccagtggaacaaaaacacagctactgtgatctgatgaagtatgtttagccaaaaatatcacaaactaggatcttcaaggtctatttcatacccttcagcgtgttgaaggcaatccactgttctgctttttgtgtgtgtgtcctgtctccccacgtaggtttaactcctgctgtgaactaatcctgtcgcgtttctgcacctgggacttcagagcgtacggcatcacgggggtgaaggtgaagcgggtcattaaagtcaacaaccgtattctgaggctgaagtttgaagagaaattccaaaagtgtttggatcttgaagacacacaagatccggagtaagagtcagttctgttacaagtaacggcaaaggctgcctttgtttcgttctgagtggggagagagagtatgaacattcctgttttcaaagttcgccatatgaaagatgcaccctgctagtaaatgtttcctggtcctgcgtctcccatggccgagatgacttcatgatttgtctagggtgagcctctttctgagcgtggggtgggggccctggaggtcctaatgacactggaaacaggagactctcaccagggtgcacagttaacgtattgatggttaagcttttgtggcattacctctcaccctctttctgccgctcttcttcctgaggagttaccggaagatgctggagtgccttttctacgtctttgatcccgaagtgactgtaaagaagaagcatctgctacagatacttgaaaggggattcaaagacagcgacacaagcaaggtagctcgcgctctcacccagaatccagcgtgcctccccgtccctgcaccactgtttaccacaaacttctgttcctggttcccaggaagcatggtggcatggtggccgacagacagagtcttaggcgtgaaaaggacagcacaggcagtcctccacggctctgtctgcctgccttgacttgattcttcttcttggagtcttttattggtgactttgaaatttccttctttaattggctccaaactcaacatgaacctccagcactcctataaagaacgagttgaaagcaccccattcccgcgctttggccgtgctttctagctgccgtccagcttcctatttccgttttctgccaccatttctttcctctctgcttctccgccctcaccttactgctaattctgtgtcattgctgggaccctgagctccaacacatctagcccactttcctgcagcctcctgatgtagaccagtgctggagagtactgcttcccaggccacgtcacacagtgacccacataaatgagaacactgctgtgttcgaacctgacgctgctctaccccaatcacttcccctcggcctgcttgctttctctgtgttttgccgatgactttgaactcctgacccttccacttcgacttcccaccaacagtggaggagggttcctctttctccacatcctcgccagcatctgctgtcacctgagtttttgatctttgccattctgactggtgtgaggtggaatctcaaggttgttttgatttgcatttccctgatgactaaggatattgaacatttctttaggtacttctcggccattcgagtttcctcaggtgagaattctttgtttagctctatcccccatttttaatagggttattggttctctggagtctaacttcttgagttctttgtatatattggatattagccctctattggatataggattgataaagatcttttctcagactgtggcttgccgttgtgtcctgatgacagtgtcctttgccttacagaagcttttcaattttatgaggtcccatttgtctatagttgatcttagagcataagccattcgtgttctgttcaggaaatctttctttgtcgacatattcaaggctctttcccactttgtcttctactagattgagtgtagctggctaaatgtggaggttcttgacccacttggacttgagctttgtacaagaagataaaaatggatcaatttgcatccttctacatgctgactgccgcttgagccagccccatttgttgactatgctcttttttccactggatggttttaacttctttgtcaaagatcaggtgacgataggtgtatgggtttaattctgggtcttcaattctattctactgatctacctgcctgtctctgtgccaatatcatgtagttttcatcactattgctctgtagtagagcttgaggtcaggaatggtgattttccccagaagttctcttgttgttgagaatagtttttactatcctgagtttgttgttgttgttgttccaaatgaatttgagaatttccctttctatctctgtgaagaattgaagggggcatcttattcttgaactgtctctatactgcgggtttaagagcaagggtggacaaccctggctaatcttccaaagtgttaagcattggcttcagtaaatagcaagcacttgagaatcattattacaaaactcttgtgttgaaatgcagccatttgtaaacctttctctactgtgcttaagggcaaagactacatttacagactaggttctcaacaaaaattaggtgaatgagtagacagtggccataaccattatctatgtctatgccttagtgtattttctcatcttaaaatagttttcctttacacttctatttggattccctcctatcctagagcctgagccaccatcccattaccaccttctgctcatttcagttaaggaggatatcttttggacatagcttgagatgtcttatggctttaattattgttcatagttctgacctctctctgtcccccaagtgcggtgcacagagactgtaactaagcaagcaaccttgaccactgcacggtggaaaggtcatttgctgaagtgtggacttggtagtcacaggatccagttttccttttttaagaagaatttctttgggtaactttaggtttcgattaggaaataatttcctaattgaatttcagaaaagacataattctaaataatatggctgttaatcaaaaactagtgatcaatttaaaactctgaggctgtgacaaggacaaaaagatctgagctcagattgtgacattgcccatctctccccccgtccttggaacatctcataatctctcatagctctgggctccttacgaggaacagtgattctgtctgctctttgtatgacactgatgcagtttggaagaagtgaagttagtcacaacaaaactaagatgtctgtgcacaattggaaatgttttcttcctggaaaataatgttgactgcatagcatacacccaaaatgagtgggaccctcttctgatgtggacctcaccccaacagggccttcctttggagttagcgagagatcccccagtccttgttggaagctgttgaacccggcaccgcactgatgttgcttatgactttggctggttttccctgaagagcaaattttgttccttatcacttttgtatagacacattcgcatgtgacttttgaatatttaaatgactttgcataatgaagctgcacccggagagtatctctttgcagattacattggccaacacagaaacgtaaaataataagctacctgcatccaagtagaaatgctgtctattttacatgaaaaaaagtagccctaagatttttttttctcctttgcagccctctctcaaaaaggaagccgtcactcttgtgaacagcctcagtatgtgtgagtgtccccggatagagttcctccagcagaaatacaaggaggagaagaaaggcccctcagagagtgaactctacagacatggtaacagacagtgcttctgacgttgtgaggccctcggctcctccatctcttctggatcgttttccttcttggttttatcaatccaagagacactgtctgaattgttgtgtgacatactcaccaatagagtggcacgcctctgtcggttcagctgcactgtcagttggactctgtatttcttgtctaccaaccctaggaagaagagaacctatgttgttccgatagttcacccaacttgcacatgcgtttcagagtctgcttctgtctttatgttacatcataagagtaaactcagaagtacacttgtgtatttctttacacacactagcttcatgagaaagagaaaagaattggcttgtatgtgaaataatcaatagaacagtcaggaagattggctgtatttgttctgagtcaccacaatctaaggtgatgaggaaacctggcaggagtgggaaagcatgtggattagacattggtctgtagaaggcaaactgtgtggtaatttattcagttagtaaataccattcttgcaacttaaatacatggcagtccaagaaccaacctgtaaaacaggctgggagaaaaggccagctcctgtgccttctcttgcctcccctcctactcttcattcttcggaatgtactcattaacaatgtgctaattaaatgcttattgtgtcttaggcactgtctggttttgcataaaccagtttccctaacatagtgcctacaaatatcaataatcacaaaattaaatataaagttatagttactatgataagtataaatatgaatgaagtatcgatgcatacaataaagagaacaaccaatcaggctagggattaagagagcttattctatgatctctcagtcaccaaattaactgaacatcagctaggcagagctttggtttgtcctcagccaggaacacctgctgcggtaggaggtgcagcatggtggcagagtgcctggcaggcctggtgcctccggctagcagcactcaagcacttactggttctttgagaatagcatgccaggatccaggccacagttctgctgggatggttcatggcaagctgtcaactgtgcatggcttcaggtagtgaaatatcagaaacacgatctggttgctaaatcaaggcctctttacttgaaaataactgatacttttcagatcattcttttccatcccagttattagaaaaacctcatatttaccatctacttagtccttctaaaatgcatttctaaaacaggctagcctgactcacattttatatcttgcatagagtgaaaataaagtatcaggcctggagagatggcttatgtgtgtaagagcactcactggcagctcttgcagaggaccagagtcagttccagcacccacactgggtggttcataactaccttgtaactccagtttcaagggatccaataaactcttttaaactccacaggcaatgctttcctgtgcataaacccatgcgtgtgcacacgcacgtgtgtgcgcgcgcacactcacacacaaataaaacattgaaaattcatttatttatatataatgtatatgtaatgataagaatttttccaactttattgactcataggaatctttagtattcaggagattacaaagacctcaagaatctgtgagagaagaactgtctgtccttctgttccatagatttatatttagtacctgttagatctcaggtgaaagaaacagaaaatgtctcagccggtacctgagttcaattcctggaacctacataataagagagtacatgcacacagagacacatacagagagacacacagacacacagagtcacacacactcactcacagagacacaaacacacacacagagagagagagagagagagagagagagagagagagagagagagagagagagagagagaccagacacacacacagcagaggcattgctaaattattgtgttcttttctagtgtctttatagctttgtttatgtttctttttccattctatagcccagtgatgtgcagttcagtatgtaaacttgggctaaatcatgtaaggatcctgcctctggctcttaagcgctgggattataagtgtcattacagagcattaggattaataaacgttacattggaaatttgttaaggtcatatttattaaaattatcttttttcatatttaggcaccatcctcattgcgaaggtttttcttggccagagtattcaggctcgtgaccaggagcccatcaataaagccaactatcccatggttaactcggtgtttgttcctcagagacatgtgctaagtatgtctgccaaagagaaagacgggcgacttcatcactctcagtacaaaccattcctacctaatacaacagtctataacttatagcatggtctaatctgaacctaacaaggcctataaacttttctctgaaaacctacttctggatattaataattttctgttattcatattaataatatgtgttgaaatttatttcaataatttatgtgtgataggtatgtgtgtatgtgtgtgtatactcacctatacattaaaatctcagtatctgttctagagtacatacaatacacacacacagagtgggaggggggacagacacacgtatagataaaaaaaaacttcttgcattcttaagtcctttatgtcaaatggcatgatgtctgcatgccacctacacagccttcctgggtacatgacacaatctccataatacctaacacagtatagatgaaatgcagcaaaccatggctacccttattgttccaggaatcctgacaaatgtacagctcactacaaatacttttctaaatccaaatacttctgccctgcagtttttgaatcagtggttgcagaagtcatggggatgggggatttcatgtgtgagtgtgtgcaaacgattagttttcaaaggattaaaaatgaacctctaataaagatcttaagagtgctgagtttatcaaaattccacggtcacttagtccttggtaaaatgaagctttcagaggagaaggataagctaaacatcgatcctgctctgtggggaaagggcgggagcgaggacttcataacagccgcaatttggtaattgtggggagttgttgggaaggatttgttgtcacttcttcatctacactggagcttaaacgtttactgtattttgagtgtttgtcgtgccagactttgctttttaactctagattctatcataggacaaagaacttgcgactgtggctaccggcagtacaaatggtttgtcttcgaccatgacctcgttttgccagagtacatcgttgaatttgagtacactacagtggtatgcattttttttgtttacaatttttaaaaatatgaattccttagcctggagtagaataatttgaaacccaggattgttaagcagagtttgtattacgtatgcttatcaattctttgtgtgcatgtgtgtgtacacacaatggctgttctgtgaaggactgaattttcaaaccttgtcatcatgacatctgcatgtttttattacgtgagcacattataggtttcttctatagctgtagtctcactgggaaacatccgatacctatggatgcctatagaaataagcctaggaagctacctccccttagcctcccgccccttccgattaccaatgaaccccctaacagttatgtgggtttgctttcagtccttttctattgacacacacacaccgtcttagctaggagaagccagctctatgtatcgcttttcataatacattgttaacatatctcatttcattgcacatagatgtataatttttttctttctgaggctgtatactattcagaaaaactaatttaggttctcctgtgctgatagcatttataggttgtatgtagttttaactattgaaatcgtgtttgaacgttattatacatgtgtctttatgtggctgtagatgctcctatgcaagagagagctacagagaacacctgtgtgtccacagatgcacacagtttaagtttcagctctgccccttacccttcacagagctttggccattttacacatttccagcagagtgggacatggggtttttgttgttagttagttagcttgtttgttttgttttgttttgtttcgttttgtttgcatccttgcctgtatgatacactatcaaactttttctgttctcttaagcaaaaaaaaagcagaatatttgagatatccctaaaactcttcagagcattacaaatcacgtgttggattcaggagtaacttcttttttaaaaaaaattatttattcattttacatgagtatactgtagctgtcttcagaaacacacgccagaagagggcatcagatcccattagatggttgttagtcatcatgtggttgctgggaattgaactcaggacctttggaagagcagttggtgctcttaaccactgagccacctctccagccctcatgggtagcttctacaagatggttattttcatgctgatttttaaaattatatattgtgaatattagtactttattttgtattgcaaattttctgttgtctttttattttaattgtaacaaaagttgccatttaatgtgtgatttataaactttgtctttctcaatctttcccagtgtggactctgaattttatatcttttttttcaaaagtcttataataaatattttggggtttttttctcagtgcttatttagcttatgttaaaacttttggctttttaagtatatgtacaaattagtttacattatgtgaattaatccatttgtttcttaaatatgaatggatactacctaatcattgtattttgaaggactatcttactcattaaattattttaacatttaaaaaaatctatgtataaataaataactgttctgctccactgattgacttaacttcagaatctatttcgttttggttaaatacaaccttgataatgtgttttaatatgtgagaggataaattctcttgctccaccttttaaaaacttttttaaaaattcttgaacatttttattcctaaaaaaaaaaacattatgatcagctcatcagtttctagtaagaacacttttttttttaattcttgaatattttttctcaaactctaaaatcagtttatcagttctgtttttcaaattcctactaagatgtgattgaaattgtatggaatctgaagcttcatttggaatggattagtggggtgtgtgtgtgtgtgtgtgtgtgtgtgtgtgtgtgtttgtgtgtttgtgtgatatgtgtgtttagtttatgcacgtgaatgtgtgtacatgtgtaggctaacacaggacatcgttgggtgtcttcttcttgtccatcttattgttctgagacagtatctctcactggaccagaaacacacttgccactaggctaggctggctagcttaagctcctgggacacccctgcccagcctcccagtgctgggtttgctggcacaggaagccatgctcagcttttcacacaggtgcgagggactctacctcaggttcttgtgcttatgcagcaagtgctcttaccaatgaactatttctctacccctgatttaaatattttgaatcatttgtcttcttgtctagaaacatgatggcccatttcattcatttgaatatgtgtctagactctaccatgcagaggtctttaatactttgtattaaatataattctaggcatatttttttaactgttctcatgagcttcttcctgcaagtacacagaaactcagacaaatggtaagcagacgttcatttagcttccgtgacagagcagcctagaggagggcggtctggacaggttactgacgccagccagacgtcatgcttgccgcttgccacttcatgagtgatggtgcttcaaatctgatgctttagttttgtctttacttctgggaagctttcttctcttagttcctttgataatttcttcttttcagttctctgctgagtcttctgaaacccactctggagaagtagctctgaaataataactaaaagatgtgaaaatgactttctccttttttctcatgttcacctcttaattctttgctatgggatagttcctcagtactggcttccaggatgatagtttaatcatcctgctgctatattcatttggcttcttaatacttattaaatattttattttagtatttgtttttacattatagtatttattcttttctataatgtcttgttatagattctgtattctcctagatttaaaaaatattcactggttaattattttcttttcttctagggttagctctgtttgctcatgtagctcttagtcactcacacattcaaagttcttgctataatcacatgtgaacccagggcctatcaggagtggcctcttcttctgtttatttactctaaacatcacatttctctgggtcagttcttaaaacgtttcacctgcatgtgtttttcctaaaagccacagttctgctcttacattccacacatcaatgccttctgctttatgtctgataatttcttaacccttgtttctgttctatgccctaaattagtttaaatgtattccttgccagttttaagaaaccttcataggtgagaatagacacatgcatgcctagctcacagtcttaatctatgcttatatattgattaaagtaattttactattctagatattattgtataactacaaaactcaattgttttctatacaacctatttggttttatgtaacaaataatcaactgaattttcaacatttgaaatatttttaggtcaaagttcactctttattttctacatcaaacaacgttattctagaggaaggcaaaaagtattctgaaggattagtattctcacaggatttgaaatttgatgatgaagttctgaagatggaacccaggattaagccccgcccaaaactcattagtttggatgagaagactataatttcccttgctaagactaatatttacagccatattgtggtgagtattataagaaaaaatttggaaggcaatcctgaatttggaatttgaatctagtatgtggagtctaaagttattacacaatgttgttaggaatcatataatttgattgcaaagtctccagtcctcttgttgtatgaagactggaccagtgttctctagtagtaatcaataaagtacgtaaattaaattttcttaagttacttctttgttgttttatttaacccaaatatgtaaaatatttcaacatgcagtcttaattttgaagtgtattttctaccaatatcatgtattaattcagtctagcattgtgttgggagttcagtagctccttgaagtgaagtggctttccagtaagcaagtgattttattctgaatgataagtaatctctctttaaatgatataggtaaaagcaaaaagtttgaatcagtttctaggattaagcaacgagtatatgacaggtttatctttacagatgtatcagcagaatgtgagttaccaattaaagtgatatcgtacactaaatcaactctacgtgaaatagtaacctctctgcatgtctgactttgagacttatcatgttcaagtgcgttgctaccatgatttccagactaccatcacctctgacctactgtactgtcatagctccctaaccaggacttctgtactctgcagtagcagttctgaaaactccagaaagtgtgcactttgtagcctgctccagaaagtgtagcacatttacaaggaacagaatcttacttctcaaaaccttaacttgggtatcttgtaggagaacttagtggcagtcaggctggcagtgtgaagatccagcaagagctgttgcagtggaccacagaggagttagtcagttcgaggcactggtgtgaatgaaggattgcacagcgggcatgggaaatatttctagaaccaaatatatatggaaagaaggaaagggatgttcaacaaaataatggatctcttaagccacagacttaaggagaagatgatgagttccattcagatctattaaatatgatgcatttgtacaatctatcagtgaattttggaatagtgtgcacaacctagcctttcatggcagtttcagccaattttgaatacaattagaaacttagttggttctccttgtgaggagcccagttgcatgcacaccattaagatgattgtagtgtgtgactatggttgacagtagatagctgaaatcattgcacagtaccacttgtgaggactgtcatcagctaggtgtactgttttcttgtaccattatttacttcatagtctacccacagatacatcttgtctttcacttgatacaaatcaaaacagtgagctttgcagtcggagaaccatgtaggcatcacgagcagttctaagtacaaaactgaaatgtttgtcttgtgtgtttgaggatgagatgaacaggaacatctgggccgatgtgagatgtaggtatgaccttagatgcccactcaccttcctctttgacattctgttaccgctgcctcccaccccccgtttcaagacccgcagatattcttccttggtccaatggctcagtcaaggggcacacgttcacctctttcccatgtggttttctgcctctgttgttcgctggctaaccagagaagcagatcctcccagtaaacaccctaaccaatgtatttattcactaaataagaatttcttgctaattattaacaaatttagaccaaataggaagttatattaatcacataccaagcccagctatgttactacaaactattattaactttcaacatctcatagcatatttacttactgtattagcattctctgaatgttattcataacaatcatgttctcacttttgcgttattgtagatgatttaattattctacccttgatcttagccaaaaggctaagaagcattgataattttttttaaatatgttggctactaacgcctacaccatgtcacaaaaagcaatgaatgtattttgtttttcaattcacactttatttcgcttccagaatctgaatctacacgggaatagcttgagtaaactgagagatcttgccaagctaactgggcttcggaagctgaacattagcttcaatgagtttacttgcttagatgatgtgtaccacttggtaagagctgctcttttgaaatgtaaatgccaagtcaaaagcatagaagcaggatggcagcctgggccttggggggatagagaggaaatgttggtcaaaggaaagaaatgttcaactatgagatgaatgtgtcctgggggtctcatgtacagcacagagtagtcactgtgtcagttagaaggccttacttattatctattttattatttactataaaacaacattaagatgcactaaaataagcaatgcaaatgtatgagttggggaaatcttaggagagtgtgcttacaaggcagcctatgctactgagagccaaagccccttgtgcagcctcctctgccctttccccagctcctctccctgcactctcccctggtcctgctctcagtcaagtgcacacactaacatagtcgcttggctttgccattttaagaaaggtgcactttattgctagcagcaatcatgggcctataccaggaggcctactagctttagaaaactttgcatctcttaaaaagaaaaagaaaagaaaattatagaataaaattcaatttttgtagctaaggatataatctgtaattgaagccatttcaacaatataactaggtattaggcataaagacatgtatttttgtggataattgcaagttgtcttgcaagtctgtttgcctgccctcttgtgcaaacaagtccctgcagctctgtgttcagagagatgaggaaacctgtgctatagtctctgtagtctctaaggattggctttgtgtgtgtgtgtgtgacagtgctcctccattatcaaagccataatctaattgcataactcatctagaatccttgtgttcccctaagtttacaagagccaagcctgacctgagaattgctgccatgacccagtgtgttacccttagggcagtgggattcttgtgtaggttttctgtatatgttataagaaagcatgtgacatatttagagaagtgggggaaagcacttggtatgcacaaaccctgagttagcattgcgcctgtttgtatgcaccacagtacaaccttgagtatttggacgccagccataaccatgtgataaccctagagggattcagaggcctgatgaaactgaagcatttggacttgagctggaaccagctgaagaagactggggaagagatcaatgtgctgtgcaaacacaccaccagccttctcacccttgacattcagcacaacccctggcagaaggtatgcagcagacagcactagaaaagcagacactctgtgcagaaccagtctctgcctcgctggtcagtccaagccagaaagaggcaaaccacacctgttccttgtgcttccttcaaaatcctggataagtgggtttagactggtgatctagtgacacaaatgtcactataagaaaagctgtgctgtcatgtttgtatgataccttgtaacctgtgacagtctgaatgcattactgctctaagaacgattaaagtcattgtcatttgcaaacttccagagaattcatgtcagtggctagaatgcttttataatgacacacaggagccaaaaataatctgatttaataagggaaacacactgttaagaagggaacagcattctacaatgtgctctaaactctggataataacatataggctcactttgcaatttctattatttattctcttaaaaatgtagaaatcatgtctcttcataaacctaaattataaaattatttccttctgttatagaaagaaatttgaatgttatttttattattgttcatgttatacctttaaggctatctcccagtattttaaatgagcccaaatttatcattttaagactcttctttcattgcttctaaaatgtacatagagccaggcactgcactggagaggcagaagcagaagggtcatgagttcaaggccagcataggttctgtagtaagaccacatcacaagaataaataactgacatttgtgagattatgtttagtattttaaagaatgagtaaatgactggatctattaagtgggccatattactaaatttataacactgaatttaagataggtaaagcaatattgttctgttctgtttgttttgttgccaaagcagatttttctaatggtcaccctctccctgtcaagttggacttcaatgtcaggagatccatgcggagtccaggacggagctccctggcttactgcccactcaacaagcatgagtctccctgtggctcccatcatcctttcaccagccactttccaagagcagtgggcttgcatcctgaaaatggaacagatttatccttacataatttaattccaactattatttaaagaattaaatcaagtccttagttttagaagctaagtagttttcaaagagagatagacagctttcaattatatggaaaagaaggaagtgttactttcccgtgccgtaatacatgtgatgtctaatgaaaattaactttttgatattttttcccaagccagccacattgaggctgagtgttattggcagactaaagactcttacacacttagacggcctcgtcatttctgaagaagaaaccagagcagctctgaaattcattagtggaacgaagattactcaggttggcatcactaggttactattcctgagttaggtgcacatacaaatgatacttttctggtttattttcttttattaagcttgatactctctcctagcatattaattttcctataccaatgtgcctcccataccctacccccataaacgagagtgggctttatggactatcttggaacaggcccaaatgccagcctttccccctaatatctctagggtaattactttctaatcccatgaacttcctgagtcctttctagaggctgcatggtgataaatagtatttgtgtatgcagtaaccttaggaggctttgagagagcatttagtacactgtgcagtatcagtattatgtgtaacctgttagcctgcagggacagaaatacctgcgttatacagatagagaatcctgcactttgggtgctggggtgtaggttattacaagcactgtatcagcttgggttggccctggttttgatccccaacattcagctctatctcgatctaatttctttccattttttcctttattctcctctcttacatatgacagcagcttcccctccctctccttcctccagttcccctaaccccagctcccctcagccccagatcctaggatacttgaatgttccttaaacaacataacagttggttttggatctaatcaaaatgaagggaagaatacttttttttgataaaaatacaattaatgtattgaggaagacttagagatttgccccaatagaaatcaaagactactaaaagttttaagacacttagcatctcagaacaaagacccagcagaggcccagacctctgggaaagcttgatagacaatggaaccacctttgcagtccgaagcagctactcagtacaaagcactggggccaatgcgttaaaacttcactgcagcgaactggacagatggctcagtggttaagagtacagactgctcctccacaggatctgggttcaagtcccagcaccaacatggcagctcacaaatgtctgtaactccagttcagcaccgcaacacacacacacacacacacacacacacacacacacacacacacacacgtgtatgcaagaaaaacaccaatgcacataaaaagaaataaatcttaaaaaaaaacttcacttcaaaagacaaaaaccaagaatgttttagaacaaaatatccatgtgatttatccttgtgactatggatttagcaattcttcataaggaatcagaccacaggcatatcatgaaagctggggtttgtccatataaaattggcgcagcctttccttcaaggatacgataaggaaagaaaaaggaaaggtaagtagcgagccagggaagaaaatctacaacacaaatgtcaaactatagtctctctcaatatcccagatgtgtacagaaaaagacaacggagggaaaacaaacaaaacaaaacatggaaggagtttgaaaagcatttcactgaaaaggatttcggaacagccaactaatttataaaacaatgctttatcatattaacattcaaaaaacaaagttccaaacacaataatctgccaattaatacagactgacaaaaagtttaagttacagccagaacataaaacagtaattataattattacaattgctttggaaattttatttgacttcctacctctctcttcactccctcctcctcctcccttccctgacccaacaaactcctgtaaatttatattctctgaagaagccctgtgtatacacaggagccgtgcacacgggcccaagggtttccacagtggcggtgttcaatagccttggactcaacaacagtgttcatgctcagcagagtcattaagaggatactatacaaggcttagggatgtagctcagttagtacccaagtgtttgtgcatcatgcaaaagaccttgagttcagttctcagcaccccacaaaccaggcatggtgtgcacgtctgtatcgccagcatttgggaggtgacagcagttgactcagaagtttgtcatcctaaactacatagaaagttcaaggacagtctgctacatgagaccttgtctagaaaagggaaggaggcgggagagagaaaatgtcacacagagggaatgtgtacaccactgactacaaatgaactccagctcagtgctgcagcatagatgaattttatagtgctgagaaggagcaagtaactgcaatacagtttggtttccaaaaagtccaaacaacgtcgagcttaatgatgcattgtgtatgagcacaagcaggactagagagaagaaaggagtggatggtagacagacatgtaagagggatcccatctaaggggagggtgggaagacgctcgggatgggaccataggagcttgtaggactgttctagatcataaggtggtctcatgggagcattagatggatgtttagagtataagcatccttgaaattgtgtgtaggaaaacaagacaaactgaaaattaaaatttagctggatatggaggatattttaagagaaagaaaatgtttgaaaatcatttattgggctattcatcttccatggggaacaagccttcttagtcgtgtataaataaacatcgttatgctatcccttttattcatcgtattttttaattgtattttattagctaactctcttacagcattccagttctaaagaggaaaggcctcggatgctcagtacatggccctctgccaaaatcctgacccagatttccaagctgggaccccactttcacctgaccgggaactggtactcaaaggtaatgacgcgttcattacaactgacgccaggttacattgaccgctctagtcatcatgggtgtgacacggagagagaaaacggaaaagggagactaaagatgtcctttcccagcaaaggccaagtgtaccatacagtgtttctaactgtagccataataatatactctagcccctcagcactcattgttcctgagaagttaaaaccttgtgccctttgaccctatttccctgccctcccatctccatccccagaaactaccagtcgtccctctgcctctgtgagtttagctgcttagattccatatctaattgaaatcacagtgtttaatttatgatgcatagctatcaaataatatactctaaatagctgtcattttaaatggtaaattatgcttcaacaaagttgggaaaacatacaaagcaatttatcatttttaaagtaacataccattttcttttttaaaaaacatgaaatgataagacagtttctagatgttctagaaagatgttacagggactcctcttcaactatagttattatggaattggagatttagaataaaggtctatacgttggagatgtagagtaaaggatacaaactgaagggtaaactttatactgagtttagtcaactctgctgagagccagagatcaagccagcaccctgatggcaagggagtagaaatttttgcaagagaatctgggaattatccaggcctcagccagaaacaggtcacagccccaacagctccttgctatataaggtcacctgaccacatcagagtcctttcaagtgcaggcttgaaagataccaacaaagctaatagaaccctcaaaaatgggaaatagtggtgacatttttcttgcataataggctgttactgggctgcagtgcaggctcaatagtagtgccaagtcatagaatcagtgctgctttaaagctgttccaagtggggctgagatggccagattttcatatccaccactaacaatgagacaggctaggaatgagtgttccctgaagcagagtggctctgcagctgaggctgtccccaaagggatagacagctttttaccaggagctgtcccagtaattgcagtgacacccaactggcccaccattgtgcccacagcatcacaaatgcccctgttagagtcttgtcacgctttaactttgttgtaatctaagacttttttatatcattagttcctgaaggaagtctagcatttgcgtatcacatttgattgttttgttagctttttaaatctaataattttgaatttgtttgcaagattcagaagtaacatgtaatataaattattgtatagataactgccttaaatttagatggacaacatctctttgaaatcacaaatctagaaaaattggagaatttgaaatgggcatcgttcagcaataataacctctccaaaatggaaggccttgagtcctgtgtcaacctggaggagctcacattagacggcaactgcatctcaaagatagaaggtaagatgccatagctcccatggctcaagcaaccaaaggggaagatgtccagcgatgccctgggagggagccttctgcatacctacggatcagactgatgatgcgctgctaagcacaatgagccccagcagctgtcaaccccgcaggcctctctcctttctcatgccggggattaccatcaatcactataccccgtgtgtagtaatgtagaaatgagattgtcattagcatttgtagcactgaagaagtgtatggatgaggctttctttgggaaagagccaacaatctgcttcatttagcaagatgtggagttaaggtgatatttagaaatgtgaagaccttaacagaagtgaaaattatactcactggaaattagaaaattaaaaaaaatctaattttgttgaatataggctttttatagtaggatctgattttttttaatttcctcagtttctgttgttatatctccctattcatttctgattttgttaatttggatactgtctctgtgtcctctggttagtctggctaagggtttctctgtcttgttgattttctcaaagaaccagctcctggttttgttgattctttgtatagttctttttgtttctgcttggttgatttcagccctgagtttgattatttcctgccatctactcttcttgggtgaatttgctttcttttgttctagagctttcaggtgtgctgtcaagctgctagtgtaagctctctcctgtttctctttggaggcactcagagctatgagtttttctcttagcactgctttcattgtgtcccataaatttggttatgttgtaccttctttttcattaaattctaaagtttttaacttctttctatatttcttccttgaccatgttatcattgcgtggggtgttgttcagcttccatgtgtatgtgggctttctgttgtttttgttgctattgaagaccagccttactccatagtgatctgatagagtgagtgggattatttcagacttctgttgaggccagttttgtgaccaattatacggtcaattttggagaaggtaccatgaggtcctgagaagaaggtatattctactacaaacgcctatattcaacaaaactggaaaatctgggtgaaatggacaattttctatacagataccaaataccaaagttaaatcaggatcagataaaccatctaaacagtttcgtaacacctaaagaaatagaagcagtcattaaaagtctcccaacccccgtcccccaaaaaataattaattaaaataaataaataaaagccaaggatgagatgggtttggtgcagaattccattcaaagaagacctaataccaatactcttcaaactattccacaaaatagaaacagaagggacactacccccaattcattctatgaagccacagttacgctgcatattctcccttggagatggaatggtttgtgtctaatcaggaacttgtcacaatttcctttcatagagggcttcataagagattttttttctacttctattatgtttaatgttccaaataaatttttaaaaactggttgagtgcatattacttttagcttcagatgttatcatgtatgtttaagaggcatttaactactataaattattttgatgactttaaaaatgtcaatactgagatgtatattttaaaataaattttattagtttaattttttaaaaagtacaatgttcatcattttataaaattttgcccttaacaaatggtaaaattttatgtataccaaaaaaaaaaaaaaaaagaaagaaaagaaaagaaaggaaaggaaagaaagtgaaaatgaaaaaatcctgtagacatcttctatgtctccacttccaaaccaaccaatcttctttactaaggtctcagtcataacaacatgagtgcattttgactgtttaaagtttaacatcagaacattgattctatgccagagaatgaagtgaagtctcctcccctcagcagctatcctagattcttcagacagcatggggttctgcttactgcatctaaaagcccagcctttacacagcaatgctctgaaacacactaaattacatgttctacagctgtcctggattctgtcccaactcttacttggtgcctttaatggaaagaaattgaaagaaaccttctctagcctgtctcatagtctcccttcctagaaacaattatacttaattctgtagcctcttcgaggtgggctttcacacgtccctgttatggatgaggaaatggagttgttgtaccacttacctgtggctctgggtcacacatttgatgataactaattccaaagttctttgagccatctgtgtggtgactcagtaaccctggcactcagctgtctgagacagctttaaaaagaaaaagacaaatgccccctctttcacctgctctctcatgcctgaacgcttccccactgtaaacaaacattagggctagattctgctgggaatagccagcttttgaacttcattctaaaaacaactttaggcatatattgtgacaaatgggggaaaatggttgtcattactacggctgattccataatttacagtgtggtatactctggtttctaatctttagtgttttaaagtgagatctagtagctattatattttttatttttatttttgaaggagaaattgttacctataaaatgcctttctttatacctgggttccaggtataaatgaaggttggtattgtattccctctgaactcttggggtttggttgagtcatcaaagttgaagctctccagacataactattgaggatgttgctttgggtgaccacctgcttctgaccccatgtttattaaatgaatgagtacaaaggtaaaaaaaaatgcctttctttaacacctaagaaaaaatgaatctacttagaaatccaaaatcaaaatttgacgcatgagtggaacttgctccacatgactctgtccttctgaagcacacacacacaaaaatgatttacacaaggagcatcggtacagtggctagcttattctgtttgaaattaacctgccgtctggtctgagtctctccttggctttgctgattttctaggcatcaccaggctgacaaagttaagccgcctcagcatgaacaacaaccttctcacgggcctggagaagcacacgtttgataacctgcttcaccttcactccctctctctggagaacaacaggatcacatctctgagcgcgttacagaagaccttcactctgatcgagttgtacataagcaacaactacatagctgtgaaccaggagatctacaacttaaaggtgaccgcctgggctgtggtgttctgcgtgcaatagcatttactgtgcttgctatgggagccttgctcactgcacagagtgtgttgaaactataaggaagaaaatcaaataacaaggtttattgaaatatatttgcattcatttatgtaaatgtacaaatgacagccatctgatacaagtatgggataactttttatcagcatacttaatggtgcaaagtaatttgtttcattatgacatttacacggcacatacagttgctttgatcatatccctacccctttactgccccagcctcctgttcctcctcctcctcctcttcccacccacaatattccccttctaccttcatggcctttctctccactagctccgtgtatgagtgaaattctctccactggctccaagcctgagcgaaagcacatagtatttgtttttctgagactaccttattttccacgaacactcattctatgatagatataattatatatatgatataattgaaatattaaaattcaaggttgtctaacctctgggaatataacttgatggggtatgatttgcatatgtacataagttgaatgtattctcattgtctagggtttatgcaacttggtcattctagacatgtatggaaacattattatatggaaccaagaaaactaccggttctttgtaatatttcatcttccagaactgaaagccttggatggagtctcaattgtaagttgtttttatgaatcataacatttgatccacagtgcatatatttgtataatccaggtcataagcattttgaatattgatttttctctagtattatactgaaccccaccatgcttattaaaatctacttctccaaagctcttttttgttctggattttacaactcttttacctagccaattcttaatggtcttaacttgaggcagagaggaaagatggtgtttaccttttcatacgaggaggagaaggatttggtgtctccagactgaggagtgagctcagcaggtcaggagcccatagcacaatcgcgaggcactgagctttgcatcttatccctagatactatgtgagatgggaagcagaaacaaaagaatcctcagaggctttgggcaggtagcctgctatacttagctctgaacaacaagataaaaaggcaagaccagtgcctaagatcattccctgacctccatatacacacacctgtaccacagacactcaaaacaaaaaagagccttttcagtaaagagcagcaactggaggcgaagcttagtgttgagtcatttcctggtgtgtgaaggtctgggttgaatctctaataaacgctgcagctgacaaggcacaattccatgaggcagagtagaaggccacaccagagcaccgtcatcctcttaggcttcagaactgtttctaagttcctggggaaatacagtgttggcaattatggaagatatttgaacccacaaagatagtatagcaagattacttttaaaattgtaaatagaaaacccaaggtgttcatgagggactcccaggctccgtgtaacaggataagtgcccaaaaatcctatgcagggtgcagtttcccagtgtaatattatctagctctcatcaaataaaaatgtacatcaaattttctagaaaatggaaagacaactcctggtggtttaatactctgagacactctggagagattactaatcgcacgcttttcaataaaacctcccattccaataaatgcaaattcttcagaagtgtgcattttgcgctcattcagtcactaagggtggatttcttcttctttttttattagatattgtctttatttacatttcgaatgttatcccctttcctagtttcccctccgaaaatctcctatccctttcccattccccctgctccccaacccacccattcctgctttctggccctggcattcccctatactgggaaatagaaccttcacaggaccaagggcctctcctcccattgatgactgactaggccatcctctgctacatatgcagctagagccacaagtctcaccatatgttttctttgattggcggtttagtcccagggaactctgaaggtactggttagttcatattgttgttcctcctatggggctgcaaaccccttcagctccttgggtactttttctagctccttcactggggaccctgtgcttgtccaatggatgactgtgagcatccacttctgtatttgtcaggcattggcagaacctctcaggagacagctatgtcaggctcctgtcagcaaaatcttgttggcatctgcaatagtgtctggatctggtggtaaaggtggattcttgtgcatagtcttacataactcgtattgcatgcattctatatatgttgaagctcttgtccttcttattaactgccctcatttgaaaggtgtcatgagaaaatacatttagaaaatacataaatgtagggggaaaaggtcttgttctgttcactaactgtaaatattatgtatttcctttttcattttagcatcgcaaaagctcagggccaattttatgatacaataatagaaattctataggacattacattctccctgtctctaaccctagtttttaatctgttctaatttatgttgttcttgttgagtttgtttgtctgtctgtctgtttgtttgtttgtctgtctgtttgcttttgagacagggtttctccatgttctctgtgtaacccccctgactatcctggaactccttctatagactaggcttacatctaactcacagttctgcctgcctctgcctgctgaatgctggaattaaaggtgtgtgccaccactgcctggcttaacttaccttgtccttagtcttgatcttcttcatcatgtattatttgtgcttttattgttttcttacatgcttcctgtaagctgctctaagttctttgtggaatggggttacaaatctgtgaattaataatggggtatgaagaccaggctgaagaattagacttcaaattaaagagaacaagaatatgtcgaatagttttcaggagtgtaattacatatctagaactgtgtattaagaattctcatctaatagcagtatttatggcagcaaagaagattactaaaatataccaggaacaaataatgagaaactggaccagaaggaggtgactttaaaaatagaaagatggctgggcagtgatgatgcatgcctttaatcctagcactccagcagatcctagcagaggcaggcagatctctgtgagtttgaggccagcctagtctatatagtaagttccaagacagccagggctatgtagagcagccccatatcaaaaaacaaacataaaaacaaaacaaatgaataaataaataaaagcagaaaactgagacttatgaaaagcaatggggcctcttcagtcacaccacccaaaatgtgtctgtgctcatctaagcttgtaagctaagcagggttcggccgagttggtattgcacaggagaaattctgggagaaactgacagaatttatcagccatacacagcaaacatgaaaagatacctactgctggggtccaggaatccccccacaaaccactcagaccctggtctcagtcaaacaagaacattgaacacccacaccaagactgatctatcagggcatagcatagactcaggagctaagactgagaccttgaatgtttctcagggccagtttataaaggcaaacactgcaatgagctcatacgtagcttcagggtggcgcaagctattttggctagctaaacaaaatagttgtaactgaccttgaatttgattggtcctaagtggagcctgtgattgtgaaattgcccaaaaaaatagcaaagctgagaacataacaggatatgtggtcagtctgaccttccagaaagaattttctatgtcagcattacaacaacaatatgaaatggctggcaggcatgaaacgaaaatgactacagttatgctagggagtcaggtgttaatgtctacagagtttgcaactacaatacaagtgttaaagaggggcttgggcttactacctctttggattcttggccttcataaacgaaactcactaggaagcttaaggtcaattttactaatgtttaagaggaaacagcagggcaagcaagttatagatcttggcagccattgggaaaggtatatgaaaggaaggaagagagaaagtcttgccttgagttgggtcagcagcctgtcacatggcagcaagtaggtacaagacaaaggaagtagcttcagagggtagtaagaagacccatgatgctagagaaaacatgtttaggctttggtaaaagaaaaagagaaagttatactgttctggtggctagaccttaaaagatcagcacagtgatggatccatgggtgaccacactgggggagataggctgaagaaaaagcacattatctcactaaggggaaaattattcctcccagtgcttcagcacagctttgaatgaataaaccttcctgagaggtgaggccttgagaaggtaattgacaggttctggtgaattagcccttttccgccccttcattctttttaattggtattttatttatttacatttcaaatgtcctctcctttcccggtttctcctctgcaaaccccttatctcatccccacctcctgcttctatgagggagctcacccacccactcccaccgaggaaacaatagtatgtcaggtctctacattcaagccagaggctgagtccatgcttttgactaggaggaaatagatttcccttaatgagcaccaacagatccctgatagttatagtcaccaagactactgtaacaataaacaggccccaataaaatagaagagaggcaacttccagggaggagactttcagacgaattacatctcatgacacatttgattatctgactggaaatatcaagcaggcggttgaaatcatagactaaatttggatatagaaatttaatccacattctttttaagagtcagaaacagcttgaaaagagctgacagttaaactgaaagcatttgtaaggctgtctaaaaaaaaagagagagagagagagtacagaatgcaaggaagtctgggtaaggctttggggtgaggggttatcccagcacccagtttcctgaggaaggcagtgaagtgatatggagtcagccatcagggctaaagatgcctctgcctgtgagttatatggccaaaagccactggcttctgggtactaactcctgtatagcagcagagaaaaagaaacttaattactttggttcttttctgtttgactcagatccctcactggctaggtgagaggcttggagttccttaactcttagtgagccagaaagaagagaaaagaaaaaagaaaagaaaagaaaaaaaaaagaaaagaaaagaaaagaaaagaagaggaaaggaaaggaaaggaaaggaaaaaggaaaggaaaggaaaaaggaaaaaggaaaggaaaaaggaaaaaggaaaggaggaagggaagggaagggaagggaagggaagggaagagggaagggaannnnnnnnnnnnnnnnnnnnnnnnnnnnnnnnnnnnnnnnnnnnnnnnnnnnnnnnnnnnnnnnnnnnnnnnnnnnnnnnnnnnnnnnnnnnnnnnnnnnnnnnnnnnnnnnnnnnagggagaaggggagaagggaaaaagggaaaaaggaaaagggaaaaaggaaaagggaaaaaggaaaagggaaaaaggaaaaagggaaaaaggaaaaagggaaaaaggaaaaagggaaaaagggaaaaagggaaaagggaaaagggaaaaagggaaaagggaaaaggaaaaagggaaaagggaaaagggaaaaggaaaaagggaaaaggaaaaaggaaaaggaaaaaggaaaaggaaaaaggaaaaggaaaaggaaaaaggaaaaggaaaaggaaaaggaaaaaggaaaaggaaaaaggaaaaggaaaaaggaaaggaaaggaaaggaagaaagaatggaaaggaaggaagaaagaatggaaagaaagaaaaaggcacacttagagacacatgcatactagatgaagctaaagaaggctgcaccaccattttcttgttgttcttagtttttatcttttgccaggataattggtcacgtgattttctaagaatttttacattctatgagttcatactaagtttaaggcaatattttgtatcatagataagatttaaggaattacagcagagttgtttacatgcctttccattaaaactattacctgactaaatattcactatctgttactagatccataagttcattataagtttaaagcaatgtttttatgtcatacgttagcagggttttgtcaagagataaattatctgccttgtatctcattattttgaagtcttgtatggataaactagtccatcatttattttctgtccttgcacctataataaattgcccattttcagtttattactttagttaccagataatggtctcatacctaacctagaaagaatgttttccttcatcataaatttgctccaagcctgctttcttttcctaatgcaattagcctgtgacacatgagggtttatgtagctctatttgcagcttttattctgtgtggggcttgaaagtgtttgtatgaatttaggaattctataaaatcattaggaattatgacaccactttgcctatacagcattactacatgaaagtacatcttcatattaactctgcaggaaatctgcccaatagtgcgagctaatgcccaggaaacattagcttatgtaatagctaatggcaggacacgcatctcagcaataagacgcaatcctggaaggaagtctctaaggaccctgcaatctcagagctcgcccatctcagcgatgcaaaatggtggccgtctccagaaaagtcacttgcttgccatagcctttcctagatggcttctgacaggctttaatgctttgcctaggaaacctaaaatgagaaagggaaggaagaaaagcagtgaggagtgggagcagagggaagtcaagggcagcacttgcccggagtcttcctagctgcgaatagaccaggaatggcacaggccaaagcactgtgcacacaaggactgagagatggcgcaggactagtttcaagtgggacagttctttattcttacattgttagctaagtgaagatcaagcctgtgaagagctaaagagctctctaggcaggtgcgacttcattttattccatcttcctacatagttttaaaaatgtaaaaatgcaaaactcattttgcatgaagagtatatatcttcatttcaaatatgaagtctttatgagtttagaaatataagaagggagggttagtaagtgttgatcaaatgacttaccagttttatctaacacaaactgaaaaattactgcccttggaataactacctggctatattatttttcaagattaaaatcctttcataacatatatctcttccttgctggtagttgatatttttgtttgatccaagtacattcataattgctaaagtgtttttgtgagacctgattgtcagtaattactcatgtctgtgccatttcagaggatctatttattgtctcttcacactgaactttttcttggttttcaacatgatgagaaagacttttctacttctccctggacagttttgggtctgccgcagagcagaggctacctgtctcagcagccctcctgcaaccccaaacaaccctccctgaccatgcgctgtcaactctctccaacctatgtggctctgtgtcttcgagacctggcatctgaggagctgaaagagtggggcagactgcagtctgatgttatacacagcctgacttcagcgtcagtgtgcttttatacacgaatgtaacataggaagcagtgatccaaggaagagcatttgagttcagaagcacgtgatcagaaaaccatgtaactaagcatcagtaagcacataccaagtactaacagagcagccctttcccagaacttcctcaagacagtttaaacacaattgcctggcacatactatagagtatatcttagaaagcatgaaagcaaggcagaaggccgtattcagatccgggatatactgaccagattgggttctatagctatgttctgacatccaacaagaatagacatgtcttataaagcgaatgcaaatatttatcacaggaggcaagaattcatgttcaaaaacaacccagggaacaaaatgcacttaaggtaaaaggccctctgccattttcccctggggcctctctcacagttccccaaggcattgctcacatgcgccattctgctgactgtgctccagtatgcaccagtgagaaaacactgggccccagtttgctgctgccagcctcaagtgtctgtagtctcttaaggccaaggccagggtaggagctgatgctttctaacacgcctccattgattgtgtgtggctaggacagacatcttgttatgtcaccgtgggcctccacagatccctcgttgtgctacagataagtggcaacacccccactcccaccaccaccaccaccattgatctccaggaacaaacactttatgagagttggtttggtttgggattgttactttccagggaagccctgaaaataatggaaataatggaaggaatgtaagttcagtctctccttcaacaggaaaacgctaagaaaagtcttgctgtaggctggcgatacggaatagcccattctgcacttggtggtggggccaaagtttgtttctgttgcttagatagaacagtcctattattatctcaaaggttaacagttattgtctagctaggtttcctctttgcttctccgctgactggagacagttggatcatggtgagctttttgtttctggttcccagcacccagtctgacttaaatgatgcaaaaataaaatcaagagtatcagccctcaggtcacaaagtccttaaagcccggggactgtcttgtgttgtttgacctatccaacgtgcaaggggctgggaatagctgtttctacaggaaagaataaagagaagtgtgtctgtttaatctgcatctataacgggaggtgtggtcatttgccagagaggtcatccctttcatatgtcctcacaggagacatcagagacagagactgcaaaagatttgtttggtggacggcttacctctgacatgattgccgaacgacaaggacactcaaactttatccaaatgcaagagctaaactggacttcatcagccatcaggtacatctgcttccttgtgtgcatgtgccactgtgaccacatgtggagttgtgtgcacgtgtcactgtaaccacacatacagttattgccaagttttctgatttccttccctaacatacccaataattgtgctagtctatttctgaaactccttgaaatgatgcagtaattcttattatcgggaactgtggttaaaaactactgcgagcttttgtttttcacctggttttgtttctcccgtttcttttacagctagtcatattaggtttacatttggtgtggtgttgttcttttacggaacagcaaaagtgtagttacatcttaagaaaatcataaatgtcaaagttagaaaagaaagaaagaaagaaagagagagagagagaaagaaaggaagaagcaaagaaaaaggaaaaagaaagaaagggaaagaaagaagaaaagaaaggaaaagaaaagggaaaggaaagaaaagaaaagaaacaaacgaaacgaaatggaacgaagaggtgtttacacctttaattgcaccgcattcattgtaatgggcttctcagatgcatgctaggatgtaagtgtggagttatcatgtccaggctccagagttgtctggctcatcaatgtccagagcctctctgatgatcccacaggccaataccattcccaactgagtgttgagatcagtgctgtgaagggttttcccagagcccaaaaagtctggtgtcaagccgggcgtggtgggcgtggtggcacacgcctttaatcccagcactcactcgggaggcagaggcaggcagatttctgagttcgaggccagcctggtctacagagtgagtttcaggacagccagggctatacagagaaaccctgtctcaaaaaaacaaaaacaacaacaaaaaaaatccagtgtcaaagccctccccattccctgctcctgcccactcctttcattccttgtcgctttgggaacagcctgcttcacgtgtgccatggaagcttatgacctgcttgttttatgacttactgtatcaagttttctgtgagttcatgaacttgtatgttcattggtaaataaattggagatgtttattgtataagtgtcatctacagtaattgtttgatggttatagatatgggttttttttttaaagcaatcagatcctatatcattttcttcatgcctgtacaaaaaacaaatgttttagctaaacattcgtctcctgtatttgacattgcatataatttgtctagtgagactttttaacggctttgggagtcctgtgtagaggaactctgttccattgaaataatgactgtatttgcatctaatttgcatctaatttgcatctaattcaggaccgtggatctgattcctgtcgaccacttcaggaatgtgagcaacgtgaatctccagaacaacaacctcacctcgttcagcggcctcatctacctgcccaacgtgaaggcacgtggctgcagagccatatttgccctcaaagacatcagcacaagttttaatcttcacttacattaaaatgtatttccttattaaggtgtcgaaattattccctaaattatattttattttgcttttcactaatcgagaaaatcttagtcttgcctgccaaatttttttagtcagtgaatcttacgtcctttgctgacatgcagatcttactcttcaggaggagacagggtgagaggcactgtctctagtgagcagataggaagtgaaattgagaatgaggtggctctcaaagcagtctctttgccttggctcaccaatgaaaggcatctaaacacagaaacaaacaacttgctaagtccttatttcctctctatgaggcctagacaaattaggactgcagattgagaacactggatagctgactaatgacttggatgttttatttgcagtgattctccaagatgtaagatcattaaaacacgtttgaagctaaatttaaatactttggaataattttatctttcacagtagcatattattactaattatgttctctatcccaagtatcagtcacaccatttgaagagttcctaggacgtttgattaatgagatgttctttctgtaggtcttatgcctcaactacaatcacattgaatcaattatgcctagactaaagcctcagacccacttaagcagcagacagctgctctaccagaaagtgccctcaagtggctacggacagcaaggaacctcaaaactaaataggtactttaaaaaaaaaatcttttatttttcacacttaaaaacaaccagagaagtaacacataatagcacacatatttggctgataataagaattatttaacgaacagtatgccaaaaataaatttcgcaaataaaaatctgaactatgtctttgtcattgttccccacccaattcttatattaatggaaaagatataatttgtgaagaagacatatctatcctgccttcctataaatttatgaaagaaagaatggctagatggatagacagacagacagagaaagatgtgtgtgtgcatcactaagtcaaaatattttcatgttcatgttctcaatgaagagcacttctgttatctttattgagggacagtttgcatatagcaaggttaccagtttcagtgtagtatttaatgatttctgaccatcgtatccagtcctataactcggtgctatgcctcatctaaagccacagtgtgaagtgactggccccttgagccacccccacttttctttgcaatcccttttccctacatccaggtctttggcaattgcccctgatctgctttcttcccttcagttttgcctctttctagacttgtgtaagattggaattacatagtaagtactctttccatttctattagcatttattaactgtacaaaataatgggtttcatcatggcattttacatgtgtatgtgacatgctttggttatcttcagtccccttctatcataccccgctgcccctcccacagtgctctccctccacctccaagctcctactttcattctgtgtctggcttctttcacttagcttactttctgagacccaatcccttgttgttgcaagggccagtaattaatttcactgcactgttgtgactgtgtcaatatatagaatgtgaaaacatactttggatattcagagttctttgaattctttgtaaattttatggcagtttattttctcctaatgagcttttgattgaggttgtattgaatctatccattgatttgaaagaattgacatcttaatattcagacacaaacacaaaataatttttcacttgctgacacccccccattggtttcgttaaattatgtgtagctaactatatattttgtgcgtttttggaatgtattttaaagtattctgaaattatattctcttacactgatataaaaaaggtagaagaattgctttcttaattttatttttgtgtttttattaatggcattgaaatttcagaccacatttattattttatcttgtgacttagatgaattaatttatcagtaaaattatttttttagtagatcagtcagaatttaatacattcaggcatacatccccttagaataaagataactccaattatctccttctaatgcaatacaagttttctttttcttgctgattcacttttcattgtgactctctgtactttattctcttccatataagcatttttaagagataaaaattattatcattattattataaaagcactactcagctatcataaatcaaaagctcatataattttttatcttattttactttatactaaatatacctctgactgccttttatgataaaattgcttttaaatcaagattatgacttcaaacttacctgtgtgtttcagagattcagtaggcagtgagaacttgcctccaataatgcaaagtttagaggttctgcatttgggatacaatggaatttgtaacttagtccagctacaacttaacagactgagaaacttaaagttcctctttctccagggtgagtagacatgctgcttgtaagtcctgtaaactggctgggttgtcatcttgctttgacaagcatgtgcaaacatcgttgattgttggcaacaaaaatttaatagtcacaattttttctttcattgtaaattattaaataacatcttaaggagtaattgattatatatactcattgtacctggtattattatgtaaggacattttcatacacatgtattatgttgtgtgtattctctatctcccttgtctcctccttctgtccccataagtcagtccctttgctgtctttgtttcacttataggaactctgttttcctgagactaccttagtttgcttaatgttattatctccagtagcatgtgtttcttgcaaagaatataatcttgttcttctttatgactgagaaatccattgcatgtttacccatcacattttcttagccatttctctgctgttgggcactttgggggtagtgaagaaaaagtaattgaggctcagtgtggctaaataataacccaaatttgcactggtgtgtaatggtaatcaggtaatctaaagcatatgtatttttgatccaaaataatatatattaatcacatattaatatacattatatactattatataatatatatattgttatattatgtgtcaatataagaatatattaatatatactaataatggcctggtccacagtggtagtaatagggaggtgtaaaggaaggaactattaggacacaggaacaagttagacagagcaaagggaaaggaaaggtagtccaagattagtaactggattaacagattgacaagagtggttgctaaggctacgtaaagttgtttgggaaaaggctgctcactagaggttagggaaagatcagtttgtgctacggttgagacataaaagtaaatgtcatttttagctttaaaaatcattaaatgaaggtgggtagataaacttaaattctggaagttggggctcacgcatcatgtcgtaactttaggaaatgagatcagtcaggtggaagggctggacaacctgatcgtcctccaggagctggtcgtcgaccataaccgcatccgggcctttaatgacaccgcgttttccaagccaagttccctgctgatgcttcatctagaggaaaacaggctgcgagaactaagcaaactgcagtctttggtcaaactggagaaactcttcctaggatataacaaaatccaggtaacattatttgagggtgctgtcgtttttgaggtctatgtatttgaaatcctctgatctcaacataaagcccccaaataaaccaattagaatgttatgtttatagctctttatcggcatgtcacaggcatgcactctattagggtactggatagagcctctctctacaggtatgagagttgatacagcctgttagagcttgtgtttggatcagcatcttggctaatgttgcttctgctctctgtacttctaaggcagtttcaaaggcagactaaactgtacactcccctagcccctgcaagaacaagtcctatgttcatctcgtctatgtttatattagcatagcccaaggtacatggtagacactagatgcttgacaaatattcgtctgaggtgctatttgagatacagttcataaagccttttctggaataatatgagatttctttccaaggttagaaggaaatcatgaataatgtctcttttaacggagcaagtaggaaaaatcttattgtaaaaaatagtgtacacctgattaatccagattcaaacaccaaacaccaatctaaggaaagccagaccacattggcagtgatcttaccaaaactttattcagaagaaatacaagtttggaaaaattggtattctatgggaaatatttctggcaacagcaggtgaccttaacaaatgagattcagagctgggggcagcaggtctgtggtagagcacgtgcctagtatgcccaaagaccaagcttaaacaagctcgtaaaaacaaatgagacctccacacagccatccatgacctcagctggtatcaggttttgcttatcagtccagtaattaatacttgaggccttggacattctattggtttcttagttatttcttcccataccacagaagctatctagctcagaataagagatgtggtctccaaaaataggttttatagagtggtctcagagtaggggagtgtttcatgaaacattctcatttacgcatagcttctgtaccatcttattagaagccttgtcattccgtagattccaggttaatttgactgtaaacagtttttgtccagagatctgttaagagaatgtcatgggtaaggaccctcctggaaatggcattgctttctgccaggatacccagttagcagcatacttaaaggagctaaccacaggtaaccagcttttcctctggatgcccttgctcacctgttgacacatattcctcataagggatggaggagctagtatctcagcttagtatgccagccccctcctcagcaacttgaacagaaccatgcttagtgtggtttactaccaaaatttaatacagctatctagtaaactgtgtgacaaatcagaagattatgcacacatcattgaaggaatggctgaggtttcttggttgttgaattattttagccttctatttttatcattgaaatggtattctccattgagtttaggtggattgtttcagatctgaacttacacttatgactgatgatattgtatgttagtgtgaccatatacagttaactggagggaaaatcaactctggggagtgagcatgggttggaaatttagttgaattcttctaaaaaaaacattttctttctaaacctggctgtccgtccaaagtttctttgagggagagatttttgttctctggattcataccgacttgggcaatctgatatcagtattatttctacaagtgagcactaaaaatacaatctctgggttagctaagaatgatagaacaagagaaagccctattaaaagcagtagtccttcagataaaggtagatgcggtccctcactgacctgcaggccatgctgcagagctttcaacttccccaatgtgcccgtaatgtcaactgagaagaatgtgacctattgccttgtttctaagaatcatcacaacacaaaagaagaccagcttcctggtcccgtttgagccctgtggctaggtgatccttctgcctgacatccagattctctgtgtacatttaaacatccgaacatacaatgaaggcaaaacacatacccactaaataaaaataaatctttttgaaatttgcaaaaactacaacattgcaaacttacactgatgttaagtgggtagtgataaatagtcctatgcagtatgacggacaaacatttaaccagagaaatcgttttttatctgtctgtctttcacagatagtgtatcagagtatagccaataatgcattcttctgttattagggttactaagccctaggaagacttaaacctcttccagaaaaagtttgcagttaccttgcaagttctgctcatttcccatgttgcagtgtgatctttgcgagtcagatattaggagtctagtccttattcacattcacatcagaggatccaagtataacctacctgaaacctaaaacctgcataaaacaacttcagaatagttaattttaggaggcgtcagctaaccaaatataattcattaccttttatataggatatcacagaactggaaaaacttgatgttattccttctctcagagagcttactgtctatggcaatccagtgagtatttatttacctttataacttactaatttcctaataatcatatgcaatttatcttaaatgatattagaaagtgatttgatctatttcaacatacatagctagctgaccaagcataaattgggcttagtgttgtctccacataactgtactgcagaccagctctgcctaatgtatgtgtgcatatcccattctgtgctgcagccctttggcttacctgctgttgctgtgctagtaatatcacagcatgttaatgtataaggttttacattgtcttaattcttattagagtgagtgtttctccttacccccctcttgcatctcttgcatccttttctttcttcactgtcttttccattcttggcaccttatacttttcctgggagctttaggaagcaaattaagttggagaagaatcttgttgatgctttaattaaaatgtacttatcttaagttaccttgggagacatctccacttttctcattggagtcttgcccatttaacatgtaagcaaactgggaaacatggcaaagaagagatggccctctggtcagtgtgctgagtgctcagggaagcccagcctaagaactgacagcaggagatgtaagactgaaaaggccacaaggtaggcaggtccgggatccccgagagcatgccaagggtcttgctccttatctaagctctcaatgcattgctgtcacagaaagctcgggctattctttccaacctccactgaatcgattgtgtcgcccctctgtggctgggatcaagttttgcttttgcattttactcctgataaatcttgctcacgccttgttcacagtgtgtcttcagggcaccatacatttctttaccagggatgttgtctgcgttctctttcaccaatacctactctttatcactttcttctcctagtttaatgaaatttttcaaagaaattcttcacttcatatctcttaatcttaattatttaaccttaatattacttttcaatgcatttctggatcagcaagttctaggttacattgtactgcgctaacaatgtcctgaaagcttttataggctgtgcctttactggtcttcatatctgaaagccttgtactctccagaagagtaaatttgtaaatagctgaggactgcacacgtttgtattctttttaaatctatggtgtgtttccagctataccctcatcgttttcctccagtgttggagcctttcaatcagaggaagcaagctctctgctctttggtatttatgaaaagtattttgtaacttagaatgtggccagcaatttgtttggctgctacgtgtgttagaggtctttctcagtcaatgaacatggccctaccacattcacttcaagaggtttgtttatttcctttgtctcttcctttcttcctttcttcctttccttctttttttctttgtttttgtttttatttttaatttcagcttgctctgtaactcactttataaaccaggttggcctataattcacagaaagcttcctgctttaacctctagagtaccagaattctaggcatgagccagcaggcccagcttacccattcatctccaagagtttgttgttgtttgccgttacagatggtgctgtatactttctatattaggagtcctcaagatgaccactacttcagagatttgggagagagattcagtcagcatgctttccttgtggctaagatagtaaggacacacagctaagatcaatggtaacgccatagtaagaacacaaactcacagtctatgagggaaagaaaggtagaggctgaaggaatctgcatgtatatttccttattcattcttcccatggcgtgaacacagcacactcttcatttagacacaaaaatggcatgccttgcgtgttgtttttattcaagggagccccttagagacttagcatttaacgattgaaagttcattatataggcaccctttccgaccaagaactgaaactttccagatggaaaagaggttgaatacaaatcctactgttttatcaattatcaagacatagctaactacgcttatcaagcaaggaatgataagaacaaccccaagtccaagtaccgaacagcaggaaagagccagccttgtgagcagaactctctaaaagtaaacaccctgcggccgctctactcaagtctgcctgcccttttatggacatgcacaattttttagagcaggttaacactatgaagagatggatcatacagacagaagatgttgaattaagtgaaatgggaccttttggaaaacctcacattaaaccaattacatagaaatgaagttgcatataattaattctgcccgtgagttgaggttgtgctagctagtgatcagtgctaaggactttacaggggtgacagtctgagtgtggtggtggcgtgcatctgtgttactacaacactgaggaggctgagacaagaggattatttttttcaaaccagactgggatacatggagatcagggaaagacaaggggagggaagggaaggagatgagaaggagacaggaaaggagaaagactaatgccagccttaattttaaaatgttttctatttttatctggtattacagaagattgagaaatctttaaggaagaagcgcctgcctgtagcagttagcactgtaaagaagccattctccatcatctttgtggccattcccaagctgccttcttttgaagtctttttctttgggggaataaacgattgtttttacctttctttagatttgtaggaaaatggttcatcgacatgtgctcatattccgcctgcctaatttacagatgttggatggaattcctataaattctgatgatagggcaaaagctgagtttcatttctctgaactacaagcaaaaaaaagttcggtaagtatacagtgtacacttttctttttactgtagactattgtaaatgagcattacatcatgggcattttgacttaactttattaagcacacgtgattctgtaaattatagtatttacttaatgactactatcaatagaaactttttcctagtaagacattgatataaggcaaatgatttaatatttcactgttcagtacttcaaatgacattagaaggtaaaaaactgggacatgccatgtttatagaaactaactgtaaaactgcttcaatttaagcatagagcaaggaaggaattatcactcaactctctggactgcagagttcatgtaacagaggcatgtgctgctattctagatgttcaggatcactgggctctttacccatgagccctaaaatatacctgaccatagaggaaacagcagaaataggattttagggattttatcattagtcttttatttgttctgatcaatctctaaataatgtatttaacacggaaagatggtggtttttcttttttctttttttaacagaaatgtagaattattagagttgagcttttgcaagtttgaagaagagacaggagtagagagggaagccagctgaaacttttaaagtcatccaaaaaaatggcacaatgaccttgagcaggtgcggaggggatgtgcaattgaacctttcactagaagcaaaaatccagggacattagagtcaaggatccaaggttacattaagaacaggatcttcactcggaagcagaggcaggcagaatgctgagtgtgaggctggcctggtctagagagtgacaaccagggtcacacagagaaaccctgtcttgaaacaataaaggacaaaaggctctagaagaagaactggtgaggtgaggtcatgaggtcactccagatggacgccctcccatgaggctttcactccatcccaggattaacacacgctgatggacggctcccctccacccttcagtacaaaaatggtgcttctgttcctatgagcgcttctagcttacttctcccttcagcaagagtcacatactcatagagagatggttttgtgtcacatactctagaaagatggctttcaaaaaaaaaaacctgctgtgtggtgttatactaagtcaacagatgaaatgtaagttcaaattttaagttaggagttctatgttaatatgaaaaccaaattcaatactttgagaaatctggagaaagaataaccatagacacacaatgccaaactggatgagggatttaaaaaataactataaaatgcaggagagaagacacagatttagagagaactaacttttaagcctagacaatttattgtctctaaattttcttcatatctttaaaagtgtatgctgttttaaagaaaccagcagaagaagtgatgtgcaaaatcttaaagaacaaagacccttgcttagataatggccttgaccaggcatggtggcacatacctgtaaccaccacacctgggagacaggaagatcaggagtttaaagtcatccttgccagggcctacctgagaacttgcctcaaaaaggcaggagatttcttcttcatcaaacatatgcaatttgaaaaatgttgtcaaaagataaatatgtattatatgtgtgctttg

SEQ ID NO: 312 - DNA, 3689 bp, Mus musculus
gaaggggaaccgtcttatgacctcactgctccacgccatgctggggatcaagaccagttagtactgctgacttcgaggctccaggtgtcaaaaactttaactgtgaaaatgccaggaccaggtccccaccgcctagcccacaaactgtcactgtcctcggaaggaaacaaagtgaacacccaagactaagaactaggcagcgaccggctgccaccgctccgcgggagtcttaacaaagatatattagtgtgaccattgtttttaatggaagatgattgaaagtgaaaacctaaatcgaggtgaaatcattaaagaactgtgtctgtgcaatggcttaacttatgagatcgttggacaggaaggatcagatacttcaaaactggagatgtttttctcagggtatccccgaatagttggattatcattgtttcataatttatcaagtcttacaattgttgctcaagatataagggaaatttcagggttggagacttgcttacagcttaaagaactttggattgctgaatgctgcatagagggcttgcagactttgaagaatctaaaagacctcaaccttgcaggaaacttagtcagcagcattggtcgatgtcttgatcccaatgaacaactggaaaaactaaacctttctggaaatcaaattacttccttcaaggaccttactaacttgaccaagctcactcacttaaaggacttgtgtctgaacgacccccagtataagtccaaccccgtgtgtcagctgtgtaactattccacccacgtgctctaccacttgccgtctctccaacgactcgacacgtttgacgtatcagcaaagcaaatcaaggagctggcggattccacagcaatgaaaaaaataatgtattataacatgcgaataaaaactgttcagagacatctgaatgaagaacttgaaaaactaaatgacagaaaatgcaagttacagaagctacccgaagaacggataaaattattcaactttgcaaagaaaacgttagaacgggaactggctgaactcaagatctctagcaaagggcagagcgatacaacgccggaggccgagaaaccccggaatagtgaggttgtcacacaggaatcagttctgcagcagaagatactgaccaagctgagcgctctggatgacagagttacattctggaacaagaaactgcatgagattgaagcgatttatcggactgaagtaaaacagaagaagaagactcacggcttactgaccccgtttctgctaactgagctggagactgtgggcaatatccattttgaagaaggcactcaggctgatgactggtttaactcctgctgtgaactaatcctgtcgcgtttctgcacctgggacttcagagcgtacggcatcacgggggtgaaggtgaagcgggtcattaaagtcaacaaccgtattctgaggctgaagtttgaagagaaattccaaaagtgtttggatcttgaagacacacaagatccggagagttaccggaagatgctggagtgccttttctacgtctttgatcccgaagtgactgtaaagaagaagcatctgctacagatacttgaaaggggattcaaagacagcgacacaagcaagccctctctcaaaaaggaagccgtcactcttgtgaacagcctcagtatgtgtgagtgtccccggatagagttcctccagcagaaatacaaggaggagaagaaaggcccctcagagagtgaactctacagacatggcaccatcctcattgcgaaggtttttcttggccagagtattcaggctcgtgaccaggagcccatcaataaagccaactatcccatggttaactcggtgtttgttcctcagagacatgtgctaaattctatcataggacaaagaacttgcgactgtggctaccggcagtacaaatggtttgtcttcgaccatgacctcgttttgccagagtacatcgttgaatttgagtacactacagtggtcaaagttcactctttattttctacatcaaacaacgttattctagaggaaggcaaaaagtattctgaaggattagtattctcacaggatttgaaatttgatgatgaagttctgaagatggaacccaggattaagccccgcccaaaactcattagtttggatgagaagactataatttcccttgctaagactaatatttacagccatattgtgaatctgaatctacacgggaatagcttgagtaaactgagagatcttgccaagctaactgggcttcggaagctgaacattagcttcaatgagtttacttgcttagatgatgtgtaccacttgtacaaccttgagtatttggacgccagccataaccatgtgataaccctagagggattcagaggcctgatgaaactgaagcatttggacttgagctggaaccagctgaagaagactggggaagagatcaatgtgctgtgcaaacacaccaccagccttctcacccttgacattcagcacaacccctggcagaagcattccagttctaaagaggaaaggcctcggatgctcagtacatggccctctgccaaaatcctgacccagatttccaagctgggaccccactttcacctgaccgggaactggtactcaaagataactgccttaaatttagatggacaacatctctttgaaatcacaaatctagaaaaattggagaatttgaaatgggcatcgttcagcaataataacctctccaaaatggaaggccttgagtcctgtgtcaacctggaggagctcacattagacggcaactgcatctcaaagatagaaggcatcaccaggctgacaaagttaagccgcctcagcatgaacaacaaccttctcacgggcctggagaagcacacgtttgataacctgcttcaccttcactccctctctctggagaacaacaggatcacatctctgagcgcgttacagaagaccttcactctgatcgagttgtacataagcaacaactacatagctgtgaaccaggagatctacaacttaaagggtttatgcaacttggtcattctagacatgtatggaaacattattatatggaaccaagaaaactaccggttctttgtaatatttcatcttccagaactgaaagccttggatggagtctcaattgagacatcagagacagagactgcaaaagatttgtttggtggacggcttacctctgacatgattgccgaacgacaaggacactcaaactttatccaaatgcaagagctaaactggacttcatcagccatcaggaccgtggatctgattcctgtcgaccacttcaggaatgtgagcaacgtgaatctccagaacaacaacctcacctcgttcagcggcctcatctacctgcccaacgtgaaggcacgtcttatgcctcaactacaatcacattgaatcaattatgcctagactaaagcctcagacccacttaagcagcagacagctgctctaccagaaagtgccctcaagtggctacggacagcaaggaacctcaaaactaaataggtactttaaaaaaaaaatcttttatttttcacacttaaaaacaaccagagaagtaacacataatagcacacatatttggctgataataagaattatttaacgaacagtatgccaaaaataaatttcgcaaataaaaatctgaact

SEQ ID NO: 313 - protein, 1051 aa, Mus musculus
WKMIESENLNRGEIIKELCLCNGLTYEIVGQEGSDTSKLEMFFSGYPRIVGLSLFHNLSSLTIVAQDIREISGLETCLQLKELWIAECCIEGLQTLKNLKDLNLAGNLVSSIGRCLDPNEQLEKLNLSGNQITSFKDLTNLTKLTHLKDLCLNDPQYKSNPVCQLCNYSTHVLYHLPSLQRLDTFDVSAKQIKELADSTAMKKIMYYNMRIKTVQRHLNEELEKLNDRKCKLQKLPEERIKLFNFAKKTLERELAELKISSKGQSDTTPEAEKPRNSEVVTQESVLQQKILTKLSALDDRVTFWNKKLHEIEAIYRTEVKQKKKTHGLLTPFLLTELETVGNIHFEEGTQADDWFNSCCELILSRFCTWDFRAYGITGVKVKRVIKVNNRILRLKFEEKFQKCLDLEDTQDPESYRKMLECLFYVFDPEVTVKKKHLLQIRGFKDSDTSKPSLKKEAVTLVNSLSMCECPRIEFLQQKYKEEKKGPSESELYRHGTILIAKVFLGQSIQARDQEPINKANYPMVNSVFVPQRHVLNSIIGQRTCDCGYRQYKWFVFDHDLVLPEYIVEFEYTTVVKVHSLFSTSNNVIEGKKYSEGLVFSQDLKFDDEVLKMEPRIKPRPKLISLDEKTIISLAKTNIYSHIVNLNLHGNSLSKLRDLAKLTGLRKLNISFNEFTCLDDVYHLYNLEYLDASHNHVITLEGFRGLMKLKHLDLSWNQLKKTGEEINVLCKHTTSLLTLDIQHNPWQKHSSSKEERPRMLSTWPSAKILTQISKLGPHFHLTGNWYSKITALNLDGQHLFEITNLEKLENLKWASFSNNNLSKMEGLESCVNLEELTLDGNCISKIEGITRLTKLSRLSMNNNLLTGLEKHTFDNLLHLHSLSLENNRITSLSALQKTFTLIELYISNNYIAVNQEIYNLKGLCNLVILDMYGNIIIWNQENYRFFVIFHLPELKALDGVSIETSETETAKDLFGGRLTSDMIAERQGHSNFIQMQELNWTSSAIRTVDLIPVDHFRNVSNVNLQNNNLTSFSGLIYLPNVKARLMPQLQSH

SEQ ID NO: 314 - DNA, 110469 bp, Homo sapiens
ttagctctctcctagtctttcactggtcaggaaaatcccaatagattcctaaaaatatactttgataatgtttatactttcatcccagagctggacccctcaaattaagaaacttagtgtagataattcgctgaactggtttctgttcaaatttctatgtctagaagtgtagaaatctcaactattatgttctaattcatctttatactctatgaagaaaacttccccaaagacaggtcaccttgttcaactacatttcagagaagataatagtaaaagtaaaaactatgaatctgacttttctggcattagtttgaaacccctaagccacaaataactttaattagcttatttcgaattatctattaatgacagatagaaacaattttctgtgaaataagaatgtagagggaaaaccagttaatttttgtttatgtatctttacaaacggtctatattacagataaagttaattgaataaaggcaaatatgctgaaattgttgacaattgttaaatgagaatattcctaaaatctgaactttttcttgggaaagcagttcaaaactatagtctatttaatgaggtggccatctggtgacagaaagaagcactacagacaatattttgcattaacatcacaactattctacacaaaccgactgaaccacataaaagagagcacagtccaaaagaaacataattcaagtcatacatgcaatttaaaatttatctaacagccgcattttcaaaatagaaacaataattttaacaatattttttatttaacccaatgtatcaaaaatattatttcaacatttaatcaatatgaagattaataacgaaagagtttatttttttcatactaagccttcaaaatacaatgcgtaccttacagcacatgtcaatttggacaagccacatttcaagcgatcatgggccctgcgagtctgtgggtagcggctcaccctgctggactgcgcagatccagagaacgacacgagacctgcggttgctttggtttgccttttactaagttcatttctcagcctctctgcccactctgaaaagtctcccctttccccccttttaattctactctattttgtaaattactgttgtctcctgaaaattttggaatgcttaaaaggcactcaaaagcctgtccgagatcgactagaagaccctcggaaggtccctctcttctctggacctcactgggcgttcgtttgcccgcgccgtccttccattcggcttgccgggcgcgcagcggcttgcggctgtggtcagccaccttcccgggaggcggtggtcgctggccgcgggaaggatgccgcgctgggggtcggggttcgtcccggctgtcacgccaccttgtgacatcacagggccatgccctcggggctcaaggccagagaggctccgcgcttccaggacccgagagctaaagataatgaatgggagagagcgagactggaggaggtaacgaataagtccccaccaccttgcccataacgcgttgctttcagtcacgttccgcgaactggcgaaggtaagtgaaaagataagcgcaggtacagaaaaacctgccagcgagaagctcccgccgtttcccaggagccccaggtggggtcttccggttggacccctgcttccgctgattggttggaggtcgccaccacgtgatgcaaacccgggtcggcctccgcttcccccccacccttttatccccctccccgccccttttctcctcctccccacccggaggtcgccggaggcggagatcaggttacctaggcaaccgccacaggcagtctgtacacaccaggcctggggcgggagagggtttcctaccttctgctgcaagacagggattgggaaatcggagtggactcggacttgaatcggattgccccggaatccaccctctctctgtgataaggtcagaatccgtcacctggtggccttcgggcgtacatcaccgggagtctttgatcccctctttttccttccaagccataccaaggggaagacgccagtgaagcaaagttgaggtcaagggaactccgtaatggtgcaatggtgatgataatgatgaaagacagtgaggtggctttactgaggcagtcagggtaccagaacaaagttcaagagaaggaaagggagggtggcctacagccaactatgcagattttactgcaccaattaagattctgggctggaaaaaccaagtgctccctaaccaaacctgacactgctcatctagagagtgtagggggtttatttggactatcagtggtaactgatggattctgatccttttatacccaaaggaggaaataatttgacccatacaggacttctactgggcagagaaaaaaaaagttttctcagaatgacatcctaaccaactctcacggcagacagaaaccatggtcctttttactctatcattatactctggtcatggagaacgattatgtctttaaattataccatatgcctgtggcatgacaattaacccattaaacaatttttttaacaactagcatgtgccagacagtgaacctgtgataggttcacagtttctgccttcaatgaacatgtaacctagtagggaagaaaggcccgtaaacattgttttacagtgtgacaagtgctatacaaagagtatgtgcaagccctaaccagaatcacaagaaagagaatgcttataatactaccagagagaatgaaagtcttcaaagagaagatctttgatttaaatctttagggaagtatggagtatgccatacagccaagggaaaaggacattttagggagaggaaacagcccatgccaaagtacagaaacatccattcagttccagagaactatagttgtggcctgaacctagggtcctctgtggaggttgtggctgatgagcatgtgaggtaggcaggagtcagagcatggaaaccattaataccttccaaaggggtaaagcatgagcagatttacctttcaggaggctgtcacagtagtgtagaggatgaacttgagggaagacagactacagggaggacatcaagttaaggggaggtgatgagggcctgaaccaaggcagaggcaattggaatgaggaggaggaaaaaaaatgtggtaagacctttaagaggtatatgcagaaggatttaatgagtgaatgaaaatagggggatagagtcaaagattggttgaggataatagctcaaccaatagaagaatggtggtgttacttttcaagagaaggcatacattaggagaaggaggctggttggaaaatataatgagttcaattttgaacacactgaatttgagatgcctgtggcacattcagatggagctttttcatgtgggcagttggatttttttttttttttttttttgcacagaaaagaagataaggatttttcaccatgaagaaaacaattggtttgaaaagcacaaagtaggccaggcacggtggctcatgcctgtaatcccagcactttgggaagccgaggcgggtggatcacaaggtcaggagttcgagattagcctggccaatatggtgaaaccctgtctctactaaaaatacaaaaattagccgggtgtgatggcacgcgcctgtagtgccagctacttgggaggctgaggcagaagaattacttgaacctgggaggcagaggttggagtgagcccagattgtgccactgcagtcaagcctgggcagcaaagtgagattctgtctcaaaaaaaaaataaataaataaataagaaagaaaaaagaaaagaagaaaagcacaaagtaagtttgaaataacaagtagagagaagccaaggagaaaagttgaaccaaagaagaaaacgtgaagaagagagtcgtcagcattgtcaaatgccatgtcaaggtcaagttgagaatcaaaacatgtccgctgtctttggccattagaaggttatttttgaccttgtagtggcttgaggtgttctcagtccagatggcagtgaatccaggactgaaagcaggtagtgatgtgttgctaatgattatctaaaaggtgtaccataaaggtatctaaaaacagctattcatagaagaatataggagagactttttaagataggaaagacttaatatttatatacagaaataaaggagaccgttgacaaggaaatttggcaataaatgaaagaggaaaatttgacagcagtattctgaaagagacagataaggataggatcaatacataggaaaagggatttgttttggacaaaaggaagaacacctactaagacaggagtcagaagggaaagaaaaatacgtctttgagaggagggaaataagaaacatacatttgatggcaccactgttctctgtgaaaatggggtcaagatcatctactgagagagagaccttgaaaagagtggtgaaagtttagaatagtaatgtcatgaatctcgagtctctagtcccactctcctaggagaggaaattgaggaaaatataaaacatttgttgctgaagatctaactgaagttagaggcaatgcatttgtagtgacttcagctccatgctggttaggtgaaattttccagtagcaatccaaagtggaaagattaatcctatgcagtttgaggtgtaaaagctatagaagttcctggtggcttctggttttgtgggggaactagagatgacctttagcctcttaaatgggccagccctgaaagagcttcgaagagcaggagagtagttacaagctggccaacaggacattcacctcttgatgaattcagtaacttcatctggaacccttgagtccatttgtgactggagaaaacatacaagacttgtaagtaccaggaaggcctagcatccttgtgattcagaaatagttatacaacttatagaatttggggtttttaaattaaattgtatttttctaattagctgttgaattagaataagattttctgctaaataagtgcattgatgaagagaaaataagttgaagtgagaggtaagatttgtatcccaaataggcatatttttcttccaaggaaaagtagtctcaagtaaatggagagctatcccttgttcttgaggatgactcaaaactgtaatatggaagttctccctaaattaatctttacaatgcaacctcaaccaaaatcccaactgcattttttaaaactaaatacaaaataatcctaaattttatttggaaaaataaatatggaagaatatccaggaaactgccaaaaaagaacatgaggtgggaatttaaaatataaatcacagtaattaaaacagatacagtcaggcgaggtggctcacgcctgtaggctcacgcctcccagcactctgggaagctgaggtgggtggatcacgaggtctggagatcaagaccatcctggctaacacggtgaaaccccgtctctactaaaaatacaaaaaaattagccgggcgtggtggcaggcgcctatagttccagcgactccgaaggctgaggcaggagtatggcgtgaacccgggaggtggagcttgcagtgagctgagatcgcgccactgcactgtactccagcctgggagacagagcaagactccgtcttaaaacaacaataacaacaacaaaaaacagatactcgtgcaggaatagtcagagctaatgaaaaacacagactagaaagtccaaaattaggccccagtgtatgtgatcatttagaatataacaaagagaatgatttaattccttctacaatagttatcttggacaaaggcaagataacttagaacaccatttggtgaatttggagctttgaagggaagcgtttgtcctttgtgtggtggtgggcagctaggctatcctttggtaatcacagactttaatccagtatataagggtttctctttccacgagtagaggtgctgcaaaacactttttaagcttggtgcactattcaaataaacctggagaggtaagactatggcctgcatctatgtatgggcctttgatggagcttccaaattctttcaggttgctttcttgactggcttctcttgcagcctatgctgtaatatcctgaggttgtccaagaatggagtaaagatgaaattgccaatgggaagcagggaaggaatgcgcggcatttccttcaatatagacccatcatctaaccactgtctccactgcctctaccaccaccctactccaatcaccatcctctcccacttacattattacaactgcccattaactagtctccctgcttttgctccaaaccctacaatctattttaaatacagcaaccagagtgatctttttcaatacttatgacagttcttgttactcttcaactcaaatcctcatatagcttttcatcttaccataataaaatacaaaatcctcacagagttctacaagatagcacatgatttggccctgaaatacctctctgacctcacatcctaccattatttatttctctcagtgtactccaggcacataattttccttgctattctgcaaacataccaagtatactctcactgccccccatcccagcttttttttttttttccatttgctgtttcctttgcctgtatgcattttctccagattcccgcatggctcacactcacactcccttatgtccttcatttctttgcccagattccaccttatcatctgataaggtcctgatcttctctttcctcccaccgctgtcattctctgtctggggttctgtcttatgccttcaatatgaatattaacaaagagtcaatgaatgaacaaagagtccaatgtattaggataatttgctggctgtatttttctttgtggtgctagcttgggtcccatccctccttcttgactcagtgtcttcgtccattttgtgctgctataataaaatacctgaaaatgggcaatttaaaaacaacagaaatgtatttctcacaggtctagaggctaggaagtctaagatcaaggcatcagcatctggtgtctgcttccacgatgatgccttgaagtctgcctcctctggagagaaggaacagtatgtactcacatggccaagtcagaagggcaaaaaagggatgaactttctccatcaagccctttaaatgcacagctaatgggcagctaatgccatttggaaggggaggagccctcataaccaaattacctcttaaaggcccacctcttaatactatcatattggcaacacctgaagtttgaaggggacacattcaaaccgtagcattcagcatggtagggcaatgtcctcaatttacaaagcatgagtacaaatacagactgtgtgcaattttctggtgcatttctcaaactcctttgatttggtcccttatatataatacacagctaccccttcccaaccactgcttctctcaatttgaagattttttagaattgtttggtgaaacttctttccctggtaccttgaattttggtctgtaatatggtttggctgtgcccccacccaaaatttcatcttgaattgtaataatccccacatttcaagggcgagactaggtggacataattgaatcatgggggcagtttcccccatgtgttcttgtgatagtgaattctcacaagatctgatgattctacaaggggcttcccccttcactcagctctcattctgtctcttgctgccatgtgaagaaggttggtttgcttccccttctgctgtaattataagtttcctgaggccttcccagccatatgaaactgtgagtcaattaaacctctttcctttataaattatccagtctcgggcatgtgtttattagcaatgtgagaacagactctggtttgtgttaatgggcttttttctcaatctgatgttgtctgtgtcatatttaaagacttctctcaatatttctggcaatcattgctctttttgtagcactgctatattcttttcttgttttcatatttctgtagtcattctagtgagatttggggagggaagataggtaaatacatggactcaaatcatcatcttttttcttaacattttaatttatgtatatgccagcacatgtacataatttagcataaatgaataaaaatgagcatataaatgcctttaaaataaaaatttaagtagaatttcattgaagtatagcatacatccagaaatcacacacatcataggtatctaattttattttcaaattgaacataaccagcacctagatcaaataatacattgttatgaacactctataagcccctctttttgcctcctcttagttgctcttccctgaaaggtaaccaatatcctaacttctaacactacagtttgttttaaaatcttacatgaattgagtcatactcattatgagtattactcattgtgtgtctcttcttttgttcaacatttgtttacgtgaaactcacttatgttgcaaataacagtagttgtttctttctcattccacttttaggtagaaaccccaaagaaatttgtagctatgacctgtatgacaaaatgttcagagaagcactatttaacccccaactggaaacagtcaaaatgtgtacccatagtagaaataataaataaatgtctatacattcatactaggcaattctaaacatgcttttttaaaagtatcattttttcttttccatttttgcctagatctctcccatccagctttacatttgtattctggccacaaaggctttcacctgcatctaaggaaactcatattaacaacttagtatatatctttccatattttctcctgacaataattatacatatacatgcatttacatatatacacatgtatacacacatgcctatgggggagttgttattgtaaagaaagggattatactgtataccattttctaaatctcgctttgtcagttcattatattaaaggcaggattcttatattttttagatagtatgtatctggaataatatacagaaaatattacaaattatgaaagttggattaagtttcatccaactgaagtattagttggttcatattctctagaatgaaggagaagttggagtatttattttaataaacacttattactatgccaaaaatgttgctaagccctaaggattcttctctttgcagtctaggtatacttagagaactgtgttcacgtttagacaccgcagtgtaatacaaaggacaactagagcctgttcaaaggagagaaacatgagtatatagtgagagaactaacaacttgaactgggagtaagataagagtgtagatgagagatgaccattttcttcaagtattgaaggctcatcgtgtggaaaaaaagttataccgaggaggtatactgacaacaaaagggaaggaattatggagagagagatttaaaattaaaataaaaaataacctcctaacagaaaactccctcagagtttatacagatacttggtaatatactatgtgaagatttcaaactacagttgggtggttcaacctcagtagctttaaggtctatttcaacttggaatgacaatgactttaatatttatttcattttttcattttccttaaaagttataatattatgatcactgtttttaatggaagatgattgaaagtgaaaacctaaaccaagaagaaataattaaagaactggtgagtcaaagtcaaatttcttttaaataacatttgcagtaatataaaatggaaagtttttatgctcctttctagagctggaagggttacttagtcatttcctctacctagtgactttgggaagcagagaataatcatatatgtgatataactttctctcttgtgagattataaaaatggcatcagtgcagttgacaatttataatttctaatggtaaaagtcatcttttaattatttaaaataggtaatgaccaaatttctttcctttaaaacagtgtttgtgcaatggcttatcttatgagatggttggacaagaaggatcagatacatcaaagttggagatgtttttcttagggtatcctcgtatagttggattatcattatttcctaatttaacgagtcttaccattgttgctcaagatataaaagaaatttcagggttagagccttgtttacaacttaaagaactttggattgctgagtgctgcatagaggtaagtgtaaacataaaacctcacatggagtattttattctgaattatttggctttagaaaaataattcattgaaatatatgcataaggcatgggttaagacagataaatgaacaaaggctagaaattgatttgtacaaaggaaaaaataaaaataaggaattagaacataaacatattctactttttagtaatcaaagcaaatcaaatcaaaacagcatgttactgttacaaaacagacacatagaccaatggaacagaataaagaacccagaaataaggccacacacctacaactatctgatcttcgacaaagatgacaaaaacgagcaatggggaaaggaccatctattcaatatatggtgctgggataactggaccgccatatacagaagattgaaactgtacctcttccttataccatatacaaaattaaactcaaaaataattaaggacttaaatgtaaaacccaatataaaaaccctggaacaccacctatgcaatatcattctggacataagaacaggcaaatatttcatgacgaaaacaccaaaagctattgcaacaaaagcaaaaatggacaaatgggatctaattaaactaaagagcttctgcaggagcaaaagaaactatcaacagggtaaacagacaatatacagaatgggagaaaatttttgcaaaatatgctttgacaaaggtataaatacccagcatctataaggaacctaaacaaatttacaagaaaaaaacaaacaaccccattaaaaagtgggcaaaggacatgaacagacactttgcaaaagaagacatacatgtggctaacaagcataagaaaaaaagtttaaaataactgatcattagagaaatgcaaatcaaaatcacactgagatactatctcacactaagacagaatggctattattaaaaagtcaaaaaaaaaaataacagatgctggcaaagttgtggagaaaaaggaatgtttatacactgttggtggaagtgtgaattagttcaacattgtggagaacagtgtaatgattcctcaaagacctaaaaacagaaataccattcaacccagcaattccattactgggtatatacccaaagtaatataaaccattctatcataaacacacatgcacgtgtatgttcattacagcagtattcactagcaaagacatggaatcaacctaaatgcccatcagtagtagactggataaagaaactgtggtacatatacaccatggaataccatgcagccataaaaaagaacaagataatgtcctttgcaggaacatggatggagctggaggccattgtccttagcaaactaacccaggaacagaaaagcaaataccacctgttctcatttagaagtgggagctaaatgatgataacacatggacacatagaggggaacgacagactctggggcctactgaaggtggagggtgggagaaggatcaggaaaaataactaatgggtactatgcttaatacgtgggtgataaagtaatctgtacaacaaacccccatgacagaaatttacctaaataacaaacctgcacatgcacccctgaacttaaaataaaagttcaataaataaataaattgatttgtgcaaaggaaaaacagaaataagggattaaaacataaacatattctactttttagtaatcaaatcataaccagtactacgtagtaataaaattggtccacttagacactattggctgtgttgaaattataacatctattttgaaaagaaatattgcaaaacatcaagagccatcacagaaatgcacagggcatacgttttgtcttagaagtccctacactaagattttatcctagaaaagttaactcaatagcagaaaacaaccatatgcacgaagctacttgttgcagcattatttataactaaaaatttgaaacataaatatgccatacatcaggtaatttttcagaaaattattataaacttgaaatatttcataattattaaatataatttgaaggattatgaaaacattttagtcttaatttaaagagtcccacaaaattgtgtgtgcattaggattataaagtgcttacattgttataatcataaccatatgatcataatcatttctatatgattataatcataaccatatagaaatatgatatgtgatatatatgattacaattataaccatatataaatagatatagggttgatcaaaatttaaagagaacatgcaaaattgaaaatagttgtatttaaatggaaaacatggaatatatttttttcttttaaaacagttcattttgctggatattgattttgcaataaaatatgatatttaaaagaaaatatacttagaaacctacttcattggaaggattaatagcaaaacataaactaacattattcagtctccttttcttttacagaaaattgaaggtcttcaagaatgtagaaatttggaaaaactatatttatattttaataaaatttccaaaatagaaaatttagagaaattaatcaaattgaaggttctttggctgaaccacaatacaattaaaaatattgaggtaagataataatttcaattatctatatgtaaagccagttactactgtagagtttaaaccacaatgttcaagatcatattgtggttaaaggccaaactattcttgactagtacaattattgttgtcaaaaagaactaacatgtatatagcattttataaggtacagagggcattgtgtacattactttctttactctttacaaggctaagaggtagggcattgttattctttctttgaaggtttaaaaataaaaagaggtttagataagttacataacttgcctaagattataaatatactctgtgtgatgtattctttttcctcctactcctccttttttcctctctactccgcttcctgttccctcctccaataattctgagttccagtatagagaacaaaggtggcttcttggaggcactcatttccttctgtgcttgtggagtacaaagtaccctgtgctcagagcacctgcagaactaaccagattaatcagagatgatttgtaaatgttaattttaattatctgttctaaataatatgttgtctaaatttttagggtttgcaaactttgaagaatttaaaagatctcaaccttgctggaaatctaataaatagcattggtatgtactatttcatttggaatctgagataatgctataatcattttttatcaatataaaaagtacatgcttagattttttttcttttaggcttttttctgtgacatatttgcaaagcatattgaaacctgtgaaaatattactcattaatcagtggttactaattatacaatggtaccattagtctatttatatgcaagaaacgatggctacatacaactcagaagtatgacagaatatgaacagaaggtaaaataattgaattcttttcgtctattttttaaaggtcgatgtcttgactccaatgaacaactggaaagattaaacctttctggtaaccaaatatgttctttcaaggtatgtttaagtggaataattaatttttatttatcatcctgaatcatgaaccattgtgttgcagaaactgtactaaaaagtcccccattaaggaataagttcattattttgggctgatgctccaggaaatttgaaagtcatctgactacattggccttaatgatctgacactattaaaaccaaacaaataactatttacctggctcttaggataccattttctcttagttttcttccaatctttctggctacatctcttcagtttctgttctttcatcctctcctagcatctaagatatggactgcccttggtcagtactgacatcttttctcatttctgtctgcattcattctctaaataatctcatcatgccttaagactttaaataccgtttatctaccctttaaactagtacctttactttccttaacaactctccagaactgtacacatatcttaatgcaaactaatttttcctctaccaggccttctcctgcagtcttcctcacctctctaaatggagtctccattcttgcagtaacttaagccaaaatccttacagtcatttgtgactcttcttattccttcataccctcatccaatccatcagcaagtacaactgggtgcaccttcagaatatgtccagagtctgatcacttcttaccatctgcatcactaccaagctgattcaagacactatcatctctaacctgcattaatgaaaaatatcttcctaacaatttttcctgtgtttgtcctttccctactatagatctgttctccacacagaagcctgatggaacctttaaaaatctgtcagataaaaatcacccttctgcttaaaaccctccgtcgccttctcatctatttcagagtagaagacatttcatataatggggccataagactacctaatctagccaccccaccacccctacctatctctttgactacagtttctaccactctctcctttgtccagtttcagccacactggtctgaatacacctagcacacagtaatcttatggcctttgcacttgctggaattttctttcctcatatacctgcatggctcatttcatcgtttatttcaagtctttttcaaaatattgtgttgtaagtgacacctttccctcccaatttaggtgtaataggaaaaccgtcacaacctccccaacctgcagcactccctatcacagtgccactgtttcatttttccttttggcacatcccttactagaataccagctctctgagtacaggaactttgcctgttctcttcattgctgtatccacaatccttaacacagtgttggacatgtagtaaatctcaataaacatttgtcaagaacatgaatgaaagagaaacaaccaaataaagggacttaatgtttatcacatataatgttggttaaaaggtggcatttataattttgccagtgtaagattgaaggtgcatattcaaacacatcctctagaaaatactgaagaaagataggtaaatttactatagaaataattttgagttcataagtattaaagtaggcattcttttactcaggcaaaaatataaaaataccaaaaagctatagaatgaggcagattaagtcccttaaaaagaaatgtaaacaaaattgtattagtcaaattcaagaggaaatatttgataagaactttgaagtgtcaacagaatttgaacaagcattggtgggaggatcttctgggtagcagggcgtgggcattctaagacggggaaaacaatatgtacaaaggcagggaagtgagaaatcaaggggtatatttgaataacaccagcattgtcatttgactggagtatagagtatatatagcaatattggaagttaacactagaaaggtcaattgggtctcgaatatagactgtattttatagacaacagagagctgtaaaatttttgagcaagaaagtgatatgatcagaaatgttctttagggatagtgatctggagttagtgtttattgatttggaacagctagaagaagaaaacccagtcaggagattccaggaataatctaaatgagaaattatgagactatgaattggagtgttaacagaaaaaaaaagaaaaaaagaagaggaggaggaggaaagacgaggaagaaatagatgcaagagacattatggttgttgaatttgcagaatttcacagctagtagaatgtgaagagctagagagtccaaaatgaatccgtgattacagttcttagcaagctcaaaaaatacacaaatcagaaaaaaaatagctagtttggtgggggtgaggggaagagaatgtatctggttctggatatgttgagtttagaataccagtggggccatccaggtaaagatctgtacacacaacactgagaaatgggtaaagagcagtcataccttacaatcttggcataacaagcaagagtgtgaagcgatgcttagggccatggcaaattgtctctaccaacattgagaccatcagataagggatcagattaaacatgtggaaaagaagccatgatagaaatcagagacactgagaggatggtaacagttgtgacagggacaggcagtaagatagataacaagattgtgtgtgtgcacgcatgcacgtgcacacatgtgtatctttccccttctagttctgccagcttaagatactacactaaatctttaaatcatacttactatatggaaattctaattatcaggctggtaaacacatcataaaattaaaacaaaccaacaaaaaacctttgaaataattcttacttttaaaagagctcttttaaatcaattagaaacaaataatctaagatacccagtagaataaaggataagtgagcagataattcatagaattgaactccacatgactagtagattcataaaataattttcaatcctactaagaatgaataaaatgaaaaataaaacatgatataaggccgggcatggtggctcacgcctataatcctgtcactttgggaggccgaggcgggcggatcacttgagatcaggagtttgagaccagcctggccaacatggtgaaaccttgtttctactaaaaaaaaaaaaaaaaaaaaatagccaggcgtggtggtgggcgcctgtaatcccagcctattcaggaggctgaagcaggagaatcacttgaacctgagaggcggaggttgcagtgagctgagattgcaccactgcactacagcctgggtaacagagtgagactaggtctcaaaaaaaaaaaaagatataattgtaattgataataaattgataatattttatatagtcaacattttataaacatgttactctgtgctagaaagataaggataagatgggcatttatacgacattggtaatcattaaaatgatagaacttttctagaaagcatttagataatgtgtaccaagtcctttaaaaaggcttctatcctttgacctatcaattcctcttttaggaatctattccaagaaaataatgtgaaatgtgcataaagctttatacttaaaataggctaaaattccaaaagagatcagagagagctatgaacattaaattcagagtgctgtgggaacatataaaagggagacctagccttgtttgggatgtcaggacaagacatccttgaggagctaatgttacagctaatgatatcagacgtgagtaggagttgcccaggcaaagacccttccaggcaaaagttagagcatgtgtggaggctcaaggtggttgaaaggggtatggcagattctaggaactagaaatactgtgtgacttgatcacagcaagggaagcaattatgacataaggctgaagaagattagttcagggttctgggaaaataaggcattgccctgccaagaaactatatggaagtttaacttactctggctagccatggcacccttatggtggttataagccatggctgcatagacagaaagacctctcaggtcttgctctgcctcatactagaggcagcataatacggtggaacatgaagttttggtgaaataacaatgtaaagtacctaaatagtgaccagcacatagtaaggactcaacagatccattgtttttattattttattaccattactttaattacattgaactgctgtatttcagtatcttcattttaaaaatgatgatagcaggattattataaaaattcattgtgtgacataatatttaaaaaggctttttatggcattatgactatcataaaaacattgaacgtgattcacaggaagttttactatcttcatattaaaaatgttcctggaacactattatcttagatttttatctctaacctttcctcctaccctaagaagataactatcttatcatggtggtgattgaatcaattctgtgcccaccttccaaccataccaggcaccagagcactaattttcagtgagattttgtgcctttgtaaactccagtgtcacctgaatttggaatgtagttgggggatttctgtgtaggacttcagagtttatacccaccatctgctagctcagactaatggtcaaatgaaacatagcaacccagtaatcaagtggtttaccttcttgcccctgcagaatttgaccaaataattctctgcacagctctgtccataaatcttccttttagagcaactctgcttagtcctcctccctgcataggctcagcccaagcctcaggtcagaccagtgagccacattctcacttgtccagagagagtttggaaatacattaaccgcctcaacctgtattactcttgcttccagcaacctgacttcactattcccttttccattccatttttactgtagctttagacctaatgcttcctagttcttcctttggatttcccttaactctgattctgatttttctagctagcattgcatcctttcaagtttgaccccaccacagtaccctcctacctcaggcaccatcctggtaatgagaaaggtatgaggatatcctcgaagttggctgaaagtaataattaatttactttacatatttatttagtgcctgctgtgttctaagtgctgagtgttgagaatacaatgttaaacaagacacaaaccttgttcttcacaagtttatcacagggttagcaaatgttttctgtaaaaaaaaaaaaaaaaaaaaaaagccaaatagaaaatctttcaggctttgtgggccacatgtagcctctactgcatattcttctttgttttttttgaatacttaaaaaatgtaaataacattctttgtttgtagactggggaccaaagcccatatagacccttggcttatagacacaagcatttggcaatagggtataataaaatccataccaaaactaagctcagtggctaaaagagctcataggaggaacatctatcccaacgctgggggatgaaacaaggctcccagggaatatgacactgggttgggctctgacagattaaaaggtaaaattggggtgaagttcaggccactcaaaaggagcagcatgagtaaaggtctaaggacaagatagggcttggcacattccaaaacttcaattggttcaatatggctaaatcataaaatattagggtttaaacaggaagaggcaagactgaagagttaatcaagagccagatgacaaataaaggaaagtataaacaatgacttaaacatcaggataaaatatgttaaggagaaacattggactgagagtgcatatcaatccctcctcatccataggttgtgagaaaactgaggccctcaaaagaaagttaggctttagttgaccataataggtaaaacaggtgtttatggaaaaaacaaaacaaacaaaaaaaacaaaaatcaggaattccatggtgactgtaatgaacaggggatcccatagcctttaatgagtagagcagatctggaggcagcgaggatgaagaggagtgtttctaggtgataagtacaggaaataggggtgaagaaatcagagacctacaggtatcctgggggcaattagcaagaggggctgtgtaggggaagcaacttattaatgaataaatgtgctcacatcactggcttcaaggttccagctggaatacatgatttagtaaatatttaaaaggcatagtggtgtagcatgttgtttaattattgttgatattttcttcaggaatttagcttttcaatagagagaaacattttaggcatctaaatcactttaatgtatttaagcgcataattagaatgcattagactatggctgatcttaggtgttcaaatactgcctttagaaatgacagtcacaattaactgaacattatctttgctggcattttaggaactcacgaacttaaccaggctgccttgcttaaaggatttatgtctgaatgaccctcaatatacaaccaatccagtttgtcttctgtgtaattattccacacatgtattatatcatttgccttgccttcaaagatttgacacattggatgtgtcagcaaagcaaatcaaggaactggcagatgtaagtacatccctaatcaggcatctgtgatttcagttttattagttaacggcttctttctggccatgtccacatacggtaggtaggattatcaattcagttcttgttgccaagtctgcttttgccctagtgaactggatattacacataaaagtatataaataataatattaatactagaatcttaattttgatgacagtactggaaggtgaaataatagaataataatgtttctaatctatacaaaacaagaaggaaattgaaaaaaaatcagtgttaaaaatagactagtgccatatatatatacacacatatatacacatatatatacatatatacacatatgcatatatatacacatatatacatatacatacatatatacacacatatatacatatatacatatatacacacatatatacatatacatatatacacatatatatatacatatatacacatatatacatatatacacatatatatacgtatatacacatatatacacatatatacatatatatacacacatatatatacatatatataaattaaagcttaaataacagaaatgtaacaaccacttctcctttggaatattacatatcaaaattagaaaatatctatggtttatggtagtctaccaaggattaggtagattttaatctaattaaagatggtttgtgattctctgaaagtttaagtagctgaggacatcaggggaagagaagtaacagatgaagacaggagtggtagaggccagattatgtgagactgtagactgttgtaaggactttggtctttactttgaggaagatggggtccactggaaaattctgatcagaggagggactaagatgacttatgttttaaaaggatccttttgaataatggattaagaatagagagttagagggggaaagttgaaagcagagagaccagttaggagattattccagtaacttagatgagccatgtggatggttcgatgcatgttcatagagaaagtggtaagaagtcagattctggtagcagttacaagatggaacctatatgggtttactgatggattgaatattaagtacagaggaaagaagtagagaataattccaagatattggcaggagcaattcaaagagtaagttgctatttgacgacatgaggaagagtatgggaggtgtaggtttaggaggaagaatcatgattctagaatcatgataactttaggcatgtaaagtttgaacaattttttgaatatcctaggggacatgctcagtaagtagttggatatatgagtctactatgtaggagagtttcctagattgggggtataaattaaaatatgagaattgaaagcagaaagttggtacttaaagctgtggactggatgagtcaccgagggaatggtatagaagagaaagtgtgtcacttgggtgttaaatgttgggtagaagagaaggagcctgcagaggagactgaaaaggagaactaagagaggcaggttcattctgactgagattctcatacatttggttcagtcttgtaaacgtcaggagtagcataaagaacaaaaaaaggaattgttagacagtttctgacatcttaaattaagtcattatatttcattttcttatcgtaaaatatttatcctccctttaccttttaaggcacaaataggatatatactatagtccaacttttgattcagaccaaaatgattttcaaattcaaagtatttttaatttatggattgatatagatttataaaatgctttcttccctactatgcatgagacaaattgtggcagttctttgtgataaactcttgaacagagtgctattgattcttcagattttcacctatgactgtgaactagtttgtgtaaactacaagtgtcaggtaaagtcagaacctaccaggaggaccaccaaagagttagtgcaagacagagggaagaacatatggattcaaatcagaagacttggattcaagcccccaactgaatgtgccactactgaagagctcagttttctgaactgaaacaaagatgatgaaaatagtatctgcttttcagtacagggttgttttgggggagccaatgagttaatgtacataaaagcccattttaattgttaagtagtataaaaataagtgctatgaaactatagttgaatataattctgtttatgactttgaattcttttttggccacctaagatgcaaagggatcaaattttgtcttagtacaaacatgcaactgaatttagcattataattagtctaatttctttttcttaaaagtttgttttaacaggtgtggaattctaccaaagtctttgaacgtgactttgacattagttttttaaagtccaaatacaaaaagcaagttgcatgtggtcagcctacaaagttgatttgctatatagttacagtttataaaatagtcttccctctttccccaaaatcttactatatactctcaaacaaggacaaaaaaaaaacccttattgataactcttatttatttttatgacatactaagtgattttgaaaaagtttagaaatagtaaaatatcataatttttgtttctatatgaagatataggtacatacttaataaattagaaaaagttgaaactatggtaagatatagtagacactaaaatcagttgttttttgtggaagatggggcaactgagaagatgggaaacataagtgggaagtacacttttcattgtataaatcaaattttttggtttttgaaatgtgaatatattgcttattcaaaaaaattaaaataaaactagtatgttttaatctttttttttatcccacctagggggattccaagttaaatttaaattttagataacctattaatagatatttaataataaaatatctattaaattttagataataaagatgttttgggataattaaataagtataagtaagtttagtaagtattatgtatattaaaacattatttgttgtttatctgaaattcaaatttaatttggcatcttgtattttatctgaccaaattaactccatcccaagttctcttgttgtgttattttttcccttttatttacagttgatgcacaataattctatgtattctataggatacccaatggtgttccaatacacatttacaatgtataatgatcaaataagggtaattaccatattcatctcctcaaacatttattctttctgtcgtgaacatccaaaatcccttcttccagatttttgaaaatatacacattatagttaaccatattcaccctgcagtgctacagaacaccagaatttattcttcctatctagctgtaattttgtacccttaaccaacctttctccccattctttcctccccactaccttgcctacagcctccaatagctacaattctactctgtacttccatgagctcaaaaaatgtttttagttctcatacgtgagtgataacatgcagtctttatttttctgtgcttgacttatttcgcttaacataatgtcctccaggctcaaccatgttgccacaaatgacaggatttaattcttttttatggttaaatagtattccatcatgtgtatacacatatgtgtgtgtgtaatgtgatatatatatattacattttctttatccattcacctgttgatggcatttaggttaattctaaatcttagctattgtgaatagtgctgcagtaaacgtgggggtgcaggtatccctttgatacactgatttcctttgttttggataaatacccaggagtgagattgctgaatcctatggaagttctacttttaattttttgagaaaacgccatcctgtttttcatagtggctgtactaatttacatttctactaccagcgtatgagagttccgttttctgggcccaggtgggcggatcacttgaggtcagcagtttgtaaccagcctggccaacatggtgaaaccccatctctactaaaaatacaataaaaattagccaggcgtggtggcaggtgcctgtaataccagctactcaggaggctgaggcaggagaatcacttgaacccagaaggcagaagttgcggtgagccgatatcacaccactgcacttcagcctgggtgacagagtgagactccgtctcaaaaaaaagagttccctttgctctgcatcctcgccagcatctctctctctcttttttttttctgtctttttgataatagccattctaactaggtgagattatattgtgatttttatttgcatttccatgatggttagttagtgatgttgagcattttttcatatacctattggccatttgtatggtctgttgagaaatgtctatgcagttcctttgcccaccttttggttggattatttgtgtgtgtgtgtttcatttgtgtgtgcgtatgtgttggtttttttgtattttgttttttgctgttgagttgtttgagttcgttgtatattctggatataagacccttattggatgagtagtttgcaaatattttctcccttccataggttgtctcttcactctgttgattgtttccttttgctgtgcagaagcttttcagtttaatatagtcccatttgtctatttatgtttttgttgcccatgcttttgaagtatttgcctagatcaatgtcctgaagcattttctctcttttcttctagtagttttatggtttcaagttttacatttaagtccattttttgagttgatttttgtatatgttgagagacaggggtctagtttcattcttctgtatgtggatatcctgttgttttagttttcagaatttattagaattatttttagctgtcactgacccacagaattttgtattggatttcctattgtctccaaataggcaagaaaaaaaaacaagaaacaccatttcccatttcttaagttacggttttttcttttaactcagttgcacttcagaaattaagcttttctttatcagatatacttaatcagtttatcatgatcctaaaacaaacttttttcttaactgttctttgttataattgttttatttctggcaggggaatttggtgatttcagttgcagtacttcataatatgcatggggaaagaggattattttggcctctcatcatactatgtatttgttcctattctgtcttttatgccagataattatattaggatcttgattatccactccatactaagtaaatttcataagaaaagactgcatctgtagaaaatatatgtctaagagtgtaaaagccttccaacttattcgctttcattatttcaggtaaacaaaaccatgtcagattttttataatgcctcaaatttgtttatggtctcctcagatagttctttttaactaacataactctcaaacaccatttagctgttgcatatcttaattatggaattaatcaatttatcatgataaatttattaataactgaatgatgcattgttattaaggaacgcaagataaatggatttgatagacatttagtaatttgctcagcctaacattcttttatacatttgaaaaaaaattatattccttagccatgcttttaaaaaacgaattgagtaatgttgtatttgcttttaattcttattaatttattttattccctgagttaatcaaataggaataatgagttatatgtttgctctaattgtactacctcattacctacactagtttatacattaaattttatctgtagtctctttttgttgttatcctggaaataaatgtgaatacgcctcacactttatgcctcacaaaggaaatctttggaattttatattttgtattaagtttaaatatagaactctgtgtagccattgtcactccagctgtcatcattattagtaactaagcatgcaaatcatctaaattgttatatagaacatactgtatttatataataccactaacaattgcctataatttgttttagctaattttttgttgttttctttcttacttttagaccacagcaatgaaaaaaataatgtattataatatgcgtataaaaactcttcagaggcatcttaaagaagaccttgaaaaactgaatgatcaaaaatgcaaattacaaaagttgccagaagaacgagtaaaattattcagctttgtgaagaaaactgtaagatttaataatgtaaaatcccagtggccataccttaagaaaaccgttagataagatagcaagcaatatcttttaaattatgtatatacacacatatataatacacacacacacacactcacacacacacacacacacatatgtaattactactgaatttcaagttaagcttgcccccaaaaaagttctgattccaggtacttaactaagctacattctgtgcttagaaatctgcaattcaaaaaaggtataggcttattaaattatgaattttgtttaaaaaaactgtgtatttcaatatgatttagagtgttacaaaaattattagacttattcagctgtgtttttattagatgccagtaggctgtgctcaaaattcattttcttgtttaaagtgctaaaaaaaaaaaaaccctttcctaataacactaaggtatacaacaaagtgggaactttaaatcaagctatatgttagtagtatgtatgcatttttatttagaataaattggatttcttttactaaaagtagaccctgaaaaagtaagcattatttaactcaaaacggaatcttgtatatatagtaattcctgtatttttttcagtatgaggaaataatggattattcaacaaatggtgttacaaaaatagtcaaactatttgggagctggagagttggctccttcatttgcactttaccaaatgtaaataccagtaggaaaaaaaagaattaaatgtaaaaatgaaaacatgaaaaattgaagaataaatatatagatggatatatttatctgatctcagcctgctaaatgaaagaaatactagaaatcacaaaggaataaaatgtagaattgattttttaaaaaccagtgaaatgcttttgtatttaaaataataaatgtaaacaacaaatgaaaatctgaaaaaatgtcttcaacaaacatgatggacaaagagtcaatatccttagtataaaaaggtgctcatatgtaaaacaaaataaaaggtaaatgtctaaatagaaaaattgagcaaagtacataaactagaattttacaagagtagaaataaaaatgactaataagcatttgaaagaactcaatttgatgattaacttccaaatgttaattaagataacaagaaactgtttcacctataaactgtcaaagtatgacacatgacagtactcaggctggtgaagatggatgtgacacactagataccacttatggaagtgtaactttggtcatatgtataacagcataaaaatgctgagtttttgacccagtaaatctacttctagcactctattgtaaatatgtatataaaaggatatatataaaaatatttatatatcattgcactattaataattaaaaaattggaaactatctaaatgtttaataagagaagagttatatactcaagacagaatagtgtgtagctattaatattaaaaaccaaggttttgaaatatatttaatgcttttttaaagtgagcagttcttattataattagaaaaatattcttaaagtaaaacattaataaaatttaattaaaattaaaattaataataaaaaagattatttccataaaaatcacaagagatcaataaatggatatcattttatatccgctattttcatgtgcaaatgcatgtattaagtaaaatctgcaaatgagaaaaataatggctatagatatatacaaatatatatattttaatgaatatgcttaatctattttctttttttttgtcttttttttttttaaattatactttaagttttagggtacatgtgcacattgtgcaggttagttacatatgtatacatgtgccatgctggtgcgctgcacccactaactcgtcatctagcattaggtatatctcccagtgctatccctcccccctccccactcctcaccacagtccccagagtgtgatattccccttcctgtgtccatgtgatctcattgttcaattcccacctatgagtgagaatatgcggtgtttggttttttcttcttgcgatagtttactgagaatgatggtttccaatttcatccatgtccctacaaaggacatgaactcatcattttttatggctgcatagtattccatggtgtatatgtgccacattttcttaatccagtctatcattgttggacatttgggttggttccaagtctttgctattgtgaataatgccgcaataaacatacgtgtgcatgtgtctttatagcagcatgatttatagtcctttgggtatatatccagtaatgggatggctgggtcaaatggtatttctagttctagatccctgaggaatcgccacactgacttccacaatggttgaactagtttacagtcccaccaacagtgtaaaagtgttcttatttctccacatcctctccagcacctgttgtttcctgactttttaatgatcaccattctaactggtgtgagatgatatctcatagtggttttgatttgcatttctctgatggccagtgatgatgagcattttttcatgtgttttttggctgcataaatgtcttcttttgagaagtgtctgttcatgtccttcgcccactttttgatggggttgtttgtttttttcttgtaaatttgtttgagttcattgtagattctggatattagccctttgtcagatgagtaggttgcaaaaattttctcccatgttgtaggttgcctgttcactctgatggtagtttcttttgctgtgcagaagctctttactttaattagatcccatttgtcaattttggcttttgttgccattgcttttggtgttttggacatgaagtccttgcccacgcctatgtcctgaatggtaatgcctaggttttcttctagggttcttatggttttaggtctaacgtttaaatctttaatccatcttgaattgatttttgtataaggtgtaaggaagggatccagtttcagctttctacatatggctagccagttttcccagcaccatttattaaatagggaatcctttccccattgcttgtttttctcaggtttgtcaaagatcagatagttgtaggtaagcggcgttatttctgagggctctgttctgttccattgatctatgtctctgttttggtaccagtaccatgctgttttggttactgtagccttgtagtatagtttgaagtcaggtagtgtgatgcctccagctttgttcttttggcttcagattgacttggcgatgcaggctcttttttggttccatatgaactttaaagtagttttttccaattctgtgaagaaagtcattggtagcttgatggggatggcattgaatctgtaaattaccttgggcagtatggccattttcacgatattgattcttcctacccatgagcatggaatgttcttccatttgtttgtatcctcttttatttccttgagcagtggtttgtagttctccttgaagaggtccttcacatcccttgtaagttggattcctaggtattttattctctttgaagcaattgtgaatgggagttcactcatgatttggctctctgtttgtctgttgttggtgtataggaatgcttgtgatttttgtacattaattttgtatcctgagactttgctgaagttgcttatcagcttaaggagattttgggctgagacgatggggttttctagataaacaatcatgtcatctgcaaacagggacaatttgacttcctcttttcctaattgaataccctttatttctttctcctgcctgattgccctggccagaacttccaacactatgttgaataggagtggtgagagagggcatccctgtcttgtgccagttttcaaagggaatgcttccagtttttgcccattcagtatgatattggctgtgggtttgtcatagatagctcttattattttgaaatacgtcccatcaatacctaatttattgagagtttttagcatgaagggttgttgaattttgtcaaaggctttttctgcatctattgagataatcatgtggtttttgtctttggctctgtttatatgctggattacatttattgatttgcgtatattgaaccagccttgcatcccagggatgaagcccacttgatcatggtggataagctttttgatgtgctgctggattcggtttgccagtattttattgaggatttttgcatcaatgttcatcaaggatattggtctaaacttctcttttttggttgtgtctctgcccggctttggtatcagaatgatgctggcctcataaaatgagttagggaggattccctctttttctattgattggaatagtttcagaaggaatggtaccagttcctccttgtacctctggtagaattcggctgtgaatccatctggtcctggactctttttggttggtaaactattgattattgccacaatttcagctcctgttattggtctattcagagattcaacttcttcctggtttagtcttgagagagtgtatgtgtcgaggaatttatccatttattctagattttctagttaattgcgtagaggtgtttgtagtattctctgatggtagtttgtatttctgtgggatcggtgatgatatcccctttatcattttttattgtgtctatttgattcttctctctttttttctttattagtcttgctagcggtctatcaattttgttgatcctttcaaaaaaccagctcctggattcattgattttttgaagggttttttgtgtctctatttccttcagttctgctctgattttagttatttcttgccttctgctagcttttgaatgtgtttgctcttgcttttaattgtgatgttagggtgtcaattttggatctttcctgctttctcttgtgggcatttagtgctataaatttccctctacacactgctttgaatgcatcccagagattctggtatgttgtgtctttgttctcgttggtttcaaagaactctttatttctgccttcatttcgttatgtacccagtagtcattcaggagcaggttgttcagtttccatatagttgagcggctttgagtgagattcttaatcctgagttctagtttgattgcactgtggtctgagagatagtttgttataatttctgttcttttacatttgctgaggagagctttacttccaactatgtggtcaattttggaataggtgtggtgtggtgctgaaaaaaatgtatattctgttgatttggggtggagagttctgtagatgtctattaggtctgcttggtgcagagctgagttcaattcctgggtatccttgttgactttctgtctcgttgatctgtctaatgttgacagtggggtgttaaagtctcccattattaatgtgtgggagtctaagtctctttgtaggtcactcaggacttgctttatgaatctgggtgctcctgtattgggtgcatatatatttaggatagttagctcctcttgttgaattgatccctttaccattatgtaatggccttctttgtctcttttgatctttgttggtttaaagtctgttttatcagagactaggattgcaacccctgcctttttttgttttccatttgcttggtagatcttcctccatccttttattttgagcctatgtgtgtctctgcacgtgagatgggtttcctgaatacagcacactgatgggtcttgactctttatccaacttgccagtctgtgtcttttaattggagaatttagtccgtttacatttaaagttaatattgttatgtgtgaatttgatcctgtcattatgatgttagctggtgattttgctcattagttgatgcagtttcttcctagtctcgatggtctttacattttggcatgattttgcagcggctggtaccagttgttcctttccatgtttagcgcttccttcaggagctcttttagggcaggcctggtggtgacaaaatcggtcagcatttgcttgtctgtaaagtattttatttctccttcacttatgaagcttagtttggctggatatgaaattctgggttgaaaattcttttctttaagaatgttgaatattggcccccactctcttctggcttgtagggtttctgccgagagatctgctgttagtctgatgggcttccctttgagggtaacccgacctttctctctggctgcccttaacattttttccttcatttcaactttggtgaatctgacaattatgtgtcttggagttgctcttctcgaggagtatctttgtggcgttctctgtatttcctgaatctgaacgttggcctgccttgctagattggggaagttctcctggataatatcctgcagagtgttttccaacttggttccattctccgcatcactttcaggtacaccaatcagacgtagatttggtcttttcacatagtcccatatttcttggaggctttgctcatttctttttattcttttttctctaaacttcccttctcacttcatttcattcatttcatcttccattgctgataccctttcttccagttgatcgcatcggctcctgaggcttctgcattcttcacgtagttctcgagccttggttttcagctccatcagctcctttaagcacttctctgtattggttattctagttatacattcttctaaatttttttcaaagttttcaacttctttgactttggtttgaatgtcctcccgtagctcagagtaatttgatcgtctgaagccttcttctctcagctcgtcaaaatcattctccatccagctttgttccgttgctggtgaggaactgcgttcctttggaggatgagaggcgctctgcgttttagagtttccagtttttctgttctgttttttccccatctttgtggttttatctacttttggtctttgatgatggtgatgtacagatgggttttcggtgtggatgtcctttctgtttgttagttttccttctaacagacaggaccctcagctgcaggtctgttggaataccctgctgtgtgaggtgtcagtgtgcccctgctggggggtaggcctcccagttaggctgctcgggggtcaggggtcagggacccacttgaggaggcagtctgcccgttctcagatctccagctgcgttctgggagaaccactgctctcttcaaagctgtcagacagggacatttaagtctgcagagattactgctgtctttttgtttgtctgtgccctgcccccagaggtggagcctacagaggcaggcaggcctccttgagctgtggtgggctccacccagttcgagcttcccggctgctttgtttacctaagcaagcctgggcaatggcaggcgcccctcccccagcctcgctgccgccttgcagtttgatctcagactgctgtgctagcaatcagcgagattccgtgggcgtaggaccctccgagccaggtgtgggatatagtctcgtggtgcgccgttttttaagccggtctgaaaagcgcaatattcgggtgggagtgacccgattttccaggtgcgtccgtcacgcctttctttgactcggaaagggaactccctgaccccttgcgcttcccaggtgaggcaatgcctcgccttgcttcggctcgcgcacggtgcgcgcacccactggcctgcgcccactgtctggcactccctagtgagatgaaccgggtacctcagatggaaatgcagaaatcacccgtcttctgcgtcgctcacgctgggagctgtagaccagagctgttcctattcggccatcttggctcctccaatctattttctaacagctggatatatctattatagaggagtacagataactattaaatttccacttatatatattttcccttatagagtacaatttatctgttgttgttattgttgttgttgttgcttttattttcctttaaattctgggatacatgtgcaaacatgcaggtttgttacataggtatacatttgacatgatagtttgctgcacctatcaacctgtcatctaggttttaagccccgcatgcattaggtatttgtcctaatgctctccctccccttgccccccacctcgcaacaggacctggtgtgtgatgttcccctccctgtgtccaagtgttttcattgttcagctcccacttgtgagtgagaaaatgtggtgtttggttttctgttcctgtgttagtttgctgagagtgatggcttccagcttcatccatgtccctgcaaaggacatgagctcattctctttaatggctgcataatactccatggtgtatatgtgccacattttctttatccagtctatcactgatgggcatttgtgttggttccaagcctttgctattgtaaatagtgctgcaataaacatacatgtgcatgtgtctttatagtagaatgatttctaatcctttgggtgtatacccagtaatgggattgctgggtcaaatgttatttctggttctagatgtttgaggaaacgtcacactgtcttccacaatggttgaactaatttacactcccaccaacagtgtaaaactgttcttatttctccacatcctctccagcatctgttgtttcctgactttttaataatcaccactctaacaggtatgagatggtatctcattgtggttttgatttgcatttctctaatgaccagtgatgatgagctttttttcatatgtttgttggtggcataaatgtcttcttttgagaagtgtctgttcgtatccttcttgtaaatttgtttgcaaatttgtaaattttttcttgtaaatttgtttaaattcctttaagattctaggtattagacctctgtcagatgggtatcttgcaaaaattttctcccattctgtaggtggcctgttcaatctgatgatagttccttttgctgtgcagaagctctttagttttattagatcccatttgtcaattttgacttttgttgctgttgcttttggtgttttagtcatgaagtctttgcccatgcttatgtcctgcatggtattgcctaggttttcttctagggtttttatggttttgggttttacatttaagtctttgattcatcttgagttacattttgtataaggcttaaggaaggggtccagtttctgttttctgcatatggctagccagttttctcagcaccatttattaaatagggaatcccttccccattgcttgtttttgtcaggttagtcaaagatcagatgattgaagatatgtggtgctatttctgaggtctctcttctgttccattggtctatatatccattttggtaccagtaccatgctgttctggttactgtagccttgcagtatagtttgaagtcaggtagcatgatgccttcagctttattcttcttccttagaattgttttggctatacaggctcctttttggttccatatgaaatttaaagtagtttgtttctaattctgtgaagaaagccaatggtagcttgatgggaatagcactgaatctataaatttctttggggagtatgaccattttcacgatattgattcttcctatccatgagcatggaatgtttttccattttttttgtgtcctctcttatttccttgagcagtggtttgtagttcttgaagaggtccttcatgtctcttataagttgtattcctaggtattttattctctttctagcaattgtgaatgggagttcactcatgatttggctctctgcttatctattattggtgtataggaatgcttgtgatttttgtacattgattttatatcctgagactttgctgaagttgcttatcagcttaaggagttttgggctgagaatatgggattttctaaatatacaatcatgtcatctgcaaacagagacaatttgacttcctgtcttcctatttgaatacactttatttttttctcttgcctgatttccctgaatagaacttccaatactatgttgaataggagtggtgagagggggcatccttatcttctacaacacttccagcttttgcccattcagtatgatattggctgtgggtttgtcataaatagctcttattattttgagatatgttccagcaatacctagtttattgagagtttttaacatgaagggctgttgaattttatcaaaggccttttctgcatctattgagataatcatggtttttgtcattggttatgtttatgtgatggattatgtgtattgatttgcttatgttgaaccggccttgcatcccagggatgagctgacttgatcgtggtggataaactttttgatgtgctgctggatttggtttgccagtattttattgaggatttttgcatcaatgttcatcagggttattggcctgatattttctttttttgttgtgtctctgccaggttttggtatcaggatgatgctggcctcataaaatgagttagggaggagtccctctttttctattgtttggaatagtttcagaaggaatggtaccagttcctctttgtacctctgatagaatgtggctgtcaatccatcaggtcctggacttcttttgattggtaggatattaatgactgcctcaatttcagaacttgttattggtcttttcatggattcaacttctttctggtttagtcttgggagggtgtatgtgtccaggaatttttccatttcttctagattttctagtttagttgtgtaaaggtgtttgtagtattctctgatggtagtttgtatttctgtgggatcaatggtgatatcccctttatcatttttattgttctatttgattcttctctcttttcttctttattagtctagctagtggtctgtctatgttgttgatcttttcaaaaaaccagctctgggattcattgatttttttgaagggtttttcatgtctctacctccttcagttctgctctgatcttagttatttgccttctgctagcttttgaatttgtttgctcttgtttctatagttctcttaattgtgatgttagggtgtcgattttagatctttctagctttctgttgtgagcatttagtgctataaatttccctcttaacactgctgtagctgtgtcccagagattctggtacgttgtctctttgttctcattggtttcaaagaacttctttatttctgtcttaattttgttattttcccagtattattcaggagcaggttgtcaatttccatatttttgtgtgggttttaagtgagttacttaatcctgagttctattttaattgcactgtggtctgaggaactgtttgttatgatttccattcatttgcatttgctcaggagtattttacttccaattatgtggtcgattttagaatatgtgctgtgtgttgctgagaagaatatatattcttgatttggggtggagagttctgtaaatgcctattatgtctgcttggtacagagctaagttcaagtcctgaatatccttgttaacttcctgtcttgttgatctgtctaatgtgacagtggggtgttaaggtctcccactattattgtgtgagtgtctaagtctctttgtagatctctaagatcttattttatgaatctgggtgctcctgtattgggtgcatatatatttaggacagtttgctcttcttgttgcattgatccctttaccattatgtaatacccttctttgtcttttttgatctttgctggtgtaaagcctcttttatcagagactaggattgcaaatcctgcttcttttttactttccatttgcttggtaaatattcctccatccctttattttgagcctatgtgtgtctttgcacgtgagaggggtctcctgaatacagaacagcaatgggtctttactctttatccaatttgccagtctgtgccttttaattggggcatttagcccatttacatttaaggttaatattgttatgtgtgaatttgatcctgtcatcatgatgctagctggttattttgcacattaatttatgcagtttcttcatggtgtcattggtctttatattttgttatgtttttgctgtggatggtactggtttttcctttctctatttagtgcttcctcttgtaaggcaggcctggtggtgacaaaatccctcaacgtttgcttgtctgtaaaggattttatttctccttcgcttatgaagcttagtttggctggatacaaaattctgagttgaaaattcttttctttaagaatgttgaatattggccctcactctcttctggcttgtagggtttctgcagagagatcagctgttagtctgatgggcttccctttgtaggtaacctgacctttctctctggctgcccttaacattttttcctttgtttcaaccttggagaatctcacgatgtgtcttggggctgctcttctcgaggagtatcttaatggtgttctctgtatttcctgaatgtgaatattggcctgtcttgctagggtgaggaagttctcctggataatatcctgaagtgtgttttccaacttggttgcattctccccatcactttcagggaccccaatcaaccagagatttggtattttcacatagtcccatatttcttggaggctttgttcattccttttcattctttttgctctaatcttgtcttcatgccttatttcagtaagttgatcttcaatctctgatatcctttattctgcttgatagatttcagctatggatacttgtgtatgcttcatgaagttcttatgctgtgtttttcagctccatcaggtcatttatgttcttctctaaactggttattctagttagcagttcctgtaaccttttatcaatgttcttagcttccttgcattgggttagaacttgctcctttagctctgaggagtttgttattacccaccttctgaagcctacttctattaattcatcagtctcattctctgttcagttttgtgctgttgctggagaggagttgcgatcatttggaggagaagaggcattctggtttttggaattttcagcgtttttgtgctggtttttcctcatcttcatggatttatttacctttgatctttgaggctgatgacctttggatggggttttgtgtgggggtcctttatgttcatcttgatcttgttgctttctgtttgttagtttttcttctaacaggcccctcttctgcaggtctgctgcagtttgctggaggtcaactccagaccctgttcacttgggtatcagcagtggaggctgcagaatagcaaagattgctgcctgctccttcctctggaagcttcatcctgaaggagcactggcctgatgccaaccagagctctcctgtatgaggtgtctgtcgacccctgttggggtatgtctcccagtcaggaggcacgggggtcaggaacccacttgagcaggcagtctgtcccttagcagagctggtgcactgtgctgggcgaatccctcttgtcaggattagctgctctcttcagagctggcaggcaggaacgattaaatctgctgcagctgtgcccacagccaccccttccaccaggtgctctgtcccagggaagtggggtttttgtgtgtaaaccccttactggggctgttacctttccttgagagatgccctgcccagtgaggaggaatctagagaagcagtctgaccacagctgctttgccaccgggcccagacctcccaaactccttagcactgtcagggaaaaaccacctactaaagcctcagtaatggtggacacccctgccccaaccaagctcaatcgacccaggtcgacttcagactgctgtgctggcagcgagaatttcaagctagtggttcttagcttgctgggctctgtgggagtgggacccgctgagcaagaccacttggctccctggcttcagtccgctttgcaggggagtgaaaggttctctctcgctggggttccaggttaccctgcggtacgaaaaaatactcctgcagctagctcagtgtctgcccaaacagccacccagttttgtgcttgaaacacagagccctggtggtataggcacacgagggaatctcctgatctgcagattgcaaaaacggtgggaaaagcatagtaacccggctgggtagcacagtccctcacagcttaccttggctgggggagggaggtccctgctccttgcacttcctgggtgatgtgacaccccaccctgcttctgctcaccctctgtgggttggacccactgtctaaccagtctcactgagatgaacagggtacctcagttggaaatgcagtaatcacccaccttctgcattggtctcactggaagcttaagaccagagatgtttctattcagccatcttggcccctcctcagtacaatttatctttaaattacataaggctgagattagagttagacaaaagaggttcttgctgtgggcccagaatttaagggagtacccaaaaaccttaagtaatcaagataaataatattccatgcaacatttttaaaatatccaaattaatgcaaaaagttcattatgataaatttaaaaaccccaaaataacaaaatcttaagaccagtgctgtgctgagtcatgtaagagactaaaacaaaaggaaaaatgtgcacccctatatatatgctttcgtgtaattttaatagttatttttttccagaacaccaaagtggtgaaaaatactgaaaaattgaaaagtatgtgtgttaaaaattacattatttgaattttaaatatttgtactaaaatcagtatttattttaattttactttggctttaatagaggcgaacttattaaaaagatttgaaaatctgttgctttgcttattttcaattgggagactgccctatttgaagtggttaaggtcggcacttggtcaagagaaactggctgactgaatttgcacccaacttgaaatcacatgtttggcatgtttttatgacatctggcctgtttattacctagatttccactttgttcatttaaattagacatttgtttaatagatcccattaaaacttaacatctgaattccgactttgcctagaccatgttttatttttattttgctctctgacacattgttttccacagttggaacgagaactggctgaactcaagggctcgggcaaagggcacagtgatggatccaataacagtaaagtaactgatcctgaaacactgaagagttgtgaaactgtcactgaagaaccaagtcttcaacagaagatattggccaaactaaatgccttgaatgaaagggtaacattctggaacaaaaaactagatgagtatgtttaattaattatctagttgttctgatctgaaatggagagaatcagaatgttttgggccatcagttgaccctagttcccttcttcaggagtatgaacaattacagtatgaagtaaagcatgaaatatattcttagtactagttcctagtacatataagcatcatgggataaaagctggcttacagttttttgcagaggcagttcttaattaggaacagtaagcttccccccagtggattcctgtcctatcactgctctagtgtctgcaaactaaaaacaatagagcctctgctggtggataaactcaccaaatagatgagacctggcaaagcccaaacacagtagaaacaagttcaggctcagttatcaattagaaatgtaaagcaagaaggcttagcaaggactgtgaatttttttatttactaaggcactaagtggataaattagtgtgccctgtgataatgctaacaataatagtaacatatattgggtttttactttgtgccagactctgtgctaagatctgtacatgtattttgtatgtaactctcaaaacaaccattttaggaataaggactacgaatattgccattttactgagaaaactgaggcataaaaagtccaagtgacatgtctgagatctgaaagctgtaagtggtagagcaaggatagtcttctagccttcacatattctgagagcagcaaaattaaaggtgattttaattgccaaaaatagaatgtctttgacatggtttaactgttaacaccaagctttctttatccattgaaaggaagccttgtgttttaacatcagttaaaaaaaatctatcataagttttaatgttgcgatttttagatcattctaatagctgtatgtatttttctctccaatagaattgaagcaatttatcatattgaagtaaaacaaaagaagaaaagtcatggcttattgatcccacttttgttaattgagttagagactgtgggaaatttccattttgaagaaggcactcgatctgatgactggtaaatctgttagaaatttagtatagctttaaaaataacttaagtacttaggatcatcaaccagaatatcaacttataaaatcttaaaatgtcccatttttgaaacatttctcatgcagaatattcatctattgaaaattggcaggcatctattgaaaactgaaaattacctactttccgcctatacatttctgtttatgccattaccgtgagccaaccttgaagacatcctaatggtttatcattgctctttacccaatttttcttagcccaagagcagaatataatttagaaaaaaaaatttataatcaagttttaatttttaaaatatgtttatactgtttgtttcctgactggatatagtgcatgattctgaatattggttgagaaactggaagagagcaggaatgccaaagcaggattggcaacagcaggttgccaacatgggaggagactgtctagcaaatcttctgtaggtctgtggtcagagtggaacccactgtttagagatagctacagtcagggtgcacacgaacactacatgttagcataaagtatatgcttataccaggaattcaggtcaaaagcttgtatcaacaaaaatggagagacaccagaatcaagcagaaagcagacagccaggctttagaaccaaggcctactagtagatactaggaagtggttgtgttgcttcaattagaggggcacaatttcaaattacccttaaaaaaagtcttgaagaaaaatattgttaagtatcactttcacatttctgagtcattttttcagaactgaagagcctgtgaaacagagaaagattgctctagagccacacaataggaactgggtacatggaaatacaccaggagacatgtcaaactatagaatggacttggcacataaccctggagcatgattttacttgaagtcaatgtcaaaataaatactaatttttatagtgtagaatgtaaaacttacactaactttttagaaaaaaaaactgttattgttatgggttactttaaaccaagtcccctgatttctattagacatggcttttttctcacctctgtgagtaaaagcttctcaaaggtcttgggagaactctgatggaaaagtgtaagaagctcttcgcaagggaaaaagaggcctttgaaaatactttcctttgtattagtacatccatttgcccagcagttactactgtttgcttaaccacattttttgatttttatatacaaagatataaaaggtgttcatccagctcccatgtaaacaagtaaaggccttgatttttcaagtgcaaaaactgaatggtgtgtctctactgggtgcacatttatattcactcaacctaaacaggattttttttttttgagatagagtctcgctgtgtccccgagactggagtgcagtggcccgatctcagctcgctgcaacctctgcctcccaggttcaagcgattctcctgcctcagactcccgagtagctaagattataggtgcatgccaccacacccactaatttttgtatttttagtggagacggggttttgccatgttggccaggctggtctcaaactcctggcctcaagtgatcttcccacctcggcctcccaaagtgctgagatcacaggcatgagccactgtgcccagctccaaacaggatttttaaaaattatttgtttctttttaaattattgcagaggaaactctttgcaacaagtggattagtgaaaaaaaaaaaaatgtaaaagcaaaatgaccaaaaagccatttagataactatgtcagcctgatagtaaattagatagctttgatggattttgattagcattaacctgtttacttggttttaataagagtaactttgatttgttttaaggaatatatcaaatatatgttagcagaatttaaagtactgttttttagttttagcatactgcaagcttggctacttttcctctgatcttttatgtatgttaagaaataactactaagtgctttaaattgctatgctacatttctagttgttttatttaaacactgacttctcctattaatatttttaaggctaaggattcagtatttaaataaaaagtatttcagtagaactaggactgaaagattttctgttaaaattatctttatgtctttaacaacaacaaaacactgcatgtttctaattgtatgtcattatctcttagcttcatttcttttatgaaataaaattattatattttccagtttacaaaaatcttattttatagagacatgctagttgagtggattgttgctactatacctttattattatagatttgtattatttaccgatgtgttgccaattgagttacccattgacatcatacaacatttatcaagtagggacttcaaagcataaaagatgctgtccttgtgcctgagaagctgtcagcctggtcatagatacagtgtatttacaactaaaaaaaaaaaaacacctttaaaatacgacaaaacaatatataagtgactctgtaagttcctttggggaagatatgatgttttgtgtcttataagacataacatctagcatgggactggattaatagcccagtacatatttactagttgaagcttccatatcactttatagatacacaacagttttgctttggtgtatataatgactttcagtaattaatctgcctctttataaagatttcatgctatactatctcaaggagctacataagcagaaactttctgttttacagggctttgaaactgttgatttaagtcagtaagcctgtaaaagtatttattaaacctttatataggattataaagtatattttaatagattacattaagcttcaaacatttaaaaacgtgtgtagcctacatttgctaaatgagcacattattgtatattaacaaaatgtgtaggcatctttctgtgtaactgaatatattagtcattgatatatatcattgtgaatgtttataccttcaagtaccactgaatgaatgagggtaaggtacacagttcagctgactctaaaggatttgaacaggagttatgattagtttagagaccatacagtggagaatattgaatcctctactgtaggtgaagagtctgaatgtaatttggaaggtaacaaatggctgcaaaggcttttgttttgttttattggcagactcttcacctacagtaaaggatcagtgttctccactgtatagttttagactatcataacttctgttcaactcttttaaagtcagctgaactgtgtaccgcactgctcttgaagcaaacgcagtactccaccacataagtggttttgtttgttctgtttccttcacccagaatgcttttgcatacctcacacttacttcatcattgctcagctgctgaattcctgggcaacataaaatctccatgaaaaaatcacacttcatagctcctgccttcctggggaaccagcctaggagctaggtattgtttattcattccttccacccattcatgagacgcctcaagcccaatatcccctatatagcaaaaactttatctaaaacgcctacagccctagtttctatcagagtgcagaaagcttccaggacatgttacttaggggaaatttgacagatttaggcccagcaaatgatccctctataggaggggcagtagcttccccacctcagatgctaatgtggctgttttgtaggtactctaaactggttagcaggcatcatgcttgattgcaacactattcatatctgtctcctctaccagactgcgagctcctctgggattagtttggtttaggcagctctcctttcaactctaagggagaagtaatttataagatcctggctgcattgattaagtatttgcttgtgagaaatatagatgccctaagttaggagctcagctattaggctcaaggagagactacccatcaggaagctcacctctgtgaccttagctcacacccatttcagaccctggttgattatgtaggtgaggacctagatctttcattaaaggcaaatgtattccttataagaccatttacttccttctcaaaatgatccgtttttcaatctcatcttaatctaggttctgtgctagacaggaccggaattttatgcgtatggccaggtgagggcagcagagagcaaacaagcacttcagtgttattttcacacagctggcccctgctcctcctcctccaattttcagatcaaatatcttaacgtctctgaaaggtcgtccccaaggccctatcttaagtaggtcccctttgcattccttaccccaagcttctcttcagagcctttttcagtttagaaattttatttctggctttacttgtttaggcttcattagagcagacaatgcctctttcacatccgtattcattgtcaggaagttatttcagtagtccaatgagagatcgtggtgatttggattaggatggtaacagtggtgatgatgaaacacgatcacattcaggatggattttagatgtagagccaggcggacttgctaaagaattagatactggggccgggcgcggtggctcacgcctgtaatcccagcactgggaggccgaggtgggcggatcacgaggtcaggagattgagaccatcctggctaacacggtgaaaccccgtctgtattaaaaacacaaaaaattagccgggcgtgatggcgggcgcctgtagtcccagctactcgggaagctgaggcaggagaatggcgtgaacccgggaggcggagattgcagtgagtggagatggcgcccctgcactctagcctgggcgacagagcgagactccgcctcaaaaaaaaaaaaaaaaaaaaaaaaaaaaaaaaaaaaaagatactggtgaggaagaaaggagaggattattcctacggttttgacttaagctatcagttaaatggtggtgccatatactgagatggaaaatactcagaggagcaggtttggggtgcagtgttagttatgttaggttggagtcacctgtttaacatgcagatggacataccaagtaggtagttggatattcaagtctgggtataaccagctaagttgagtagagatcaagactagaaataaaatgttgtaatttatcaggatgtatataaagccaaggaaccacgtgaaatcatctagggagagtgttcgtggaagcaagaggaaggccaaaggctgatccctgggcagttcaacatctaaaagtctgtctgagaagacccagcaagaaaactatgaaagagcagccaataagaggaaggcgtatgaagtttccctgaagctaagaaagtgtttcagaaagtgaagattgctcaaccaacctgtcttccaggcagaacaaatgtgcaataaatgaataaataaacggagccactatatgattactgtatctttagcaaaagacacaaaatatgagctataacttttatcacgtagttttctgttcttaaacattttaaggaaaatctattattttcttcatgtatattctgtatgtattcccacataggtttaatttctgctatgaattaattctgtcacgtttttgtgcctgggacttcagaacatacggtattacaggagtaaaagtaaaacgcatcattaaagttaacaaccgtattctgagactaaaattcgaagagaaatttcaaaagtttttggagaatgaagatatgcatgattcagagtaagaagctgaattctttatggaacaactttacaaaagtgtgactgtatttgtaaaatttctattttaaaagtttacagcattaaaaatatacatataccttgttagtaaatgtttcctttttatgcatctcccatggccaggatgacctcataatttatccacattgagcctgtttttgaggttgaaggcaggggagctattaataatgacactagaacattgcatgtcaatgacaaatatccctggcaggacatatggttatcttatctatggctaagcttttgtgaaatcaatcctcaaactttttctgtttcaattattcttaaggagctaccgaaggatgctggaatgccttttttatgtttttgatcctgaagtttcagtgaagaaaaagcatcttctacaaatacttgaaaaaggattcaaagacagtgaaacaagcaaggtagcataaaatgtcatttagaataatgctttcttcctagcaagtggagctctgccgctggttaagcatgatttcccaatccttttatccatatttatagtaaatttctactgctgtttcacaaaaagcttagtgttatcatggaaagtatagcatctttcctctttggattataccaaagtaagcccattaattactactgcctgaccctacgtaatccttctaggcatcttatttttatgttgtgttccttttgttgatggttttgaaatctgctttttaaattggttataaatctttaatcttttgtaaactctccagtcttcaccttgaagcaattcagtcacttaactccactgtactttctagctattgctttccttttactgctaccatttctttattctctacttcactatctccatcttgctgctgatcttgctttatcattggtcacttctgatgccccaagtatccaactaatctttctcagacctccaccatcttgacaaggcagctgtagcacactggtgtagagcagcgcttcccaacctttttcacatcatgacacacataaaatgataatattcctgcatttggatcccgatttcactcctcaccagctatgtgacttcacctctctgttaatctgtttcttcctatctgtaaaatgaagataataataatatctattttgcagagttgttgttaggatttagtgagataatgcattaaaaatttcttggatattggtacaccagtgttcatgacatcactattcaaatagccaaaaaaactagaaacaatgcaaatatgcatcaacagatgaatggataaacaaaagtggaatatacatacaatggaatgctattcagccataaaaagaaatgaaattccgaaacttcctacaacatggaagaaccttggaaacattatgctagagaaataataagccagacaaaaatggaaaaatattgtatgattccatgtatgtgaagtacctagaataggaaaattcagagacagaaagtagaatagaggttaccaaaggctctgggagaggaggaggtagggagttactgtttaatgggtacagagtttcagtctggaataatgaaaaagttctggaaatggatggtggcgatggttgcacaacaacgtgaatgtacctaatgccactgaattgtatgctggaaaatggctaaaatggtaccttctatcttatgtatattttgccacaataaaaatatcacctccccaaaaaagcattccatccactcagtggagaatgggttggtgggagtagaagcagatgacaaggcactatgtaggggagctattgcagcagctcaggccatagaggttggtactgtcactgcagggtggtggtgagagtgccctcattgtactttatggagaagtaagaaggaggtgaggaattcagggttttacaaggcagagtgaattgctcacattcggtccagagaactatgaaccattatcgggagagggtaagggaaggatgaggctaacacttctgtgttttccacctaccagccctgtgctgagtactttatcttctgcatctcctaaaagagatgaaccacctcctttaattctcccacagctctctgtgctgctctgtccaaaagagtagccaccacccacatgtaactattaagcatttgaaatgtggctagtccaaattgagtatgctgaaagtttaaaacaagcaccagtttttaaagactgagtatggaaaaaaaaacactataatttttatattaggtacatgttgacatggtagtattttggacgtattagattaaataagatattttattaagatttgccaaaaaaagatctcttggaccaatgcctggcatcaagaaagtttttgatattttattttgatattttgatattttattttgaaagttttaaatatttttatttttgaatttttacaattgtctgaaacatttgacactattggttgccttcttctttttgaaactctcctttggcatccatgatattacactattgttatcctcctatttttctgattgttattcgcttcctttttgttccccattttgcttctaaacatgggaataccacaggttaaagtctcctgatcttcccttttttcttcacacaccatcaattactgtcattgttaagatcctagaaatggaagaaacatcagtgtgtagcatgtaaaagatcagatgagctacatttctgtgctatgatgtgtacataatgagtcaggataaatatttatgttccgcattgtttaagagatgggctctgatttaaaagacagccgtgtaagcagtttagaagagaggtttggctaaggttggcagtatctacaggcagagggctggccatagtggggaagaagaaactatttgactagcaaacatatctaaggttaagtccacttttctagttggaagaggaaggatctctttctatcaattcaggatgaagtgttcagtagtaagggtgggagagtacgtaagtaaatctgctcacatagcttgagttcattccctaccgaatattgtttgtaatcaaggacttggtcaataaacgcaaagagtatcacgtattcacttatggtttctccaaaatgtacatcttcagttaggctatctcttcctctctgctctgccacctacagctgccattcctgcatggttaatatactttattctcttatatagtgtgtctaaaaccagccttttaaaactgttaagttcagggttacatgtgtaggtttgttattaggtaaacttgtgtcatgggtgtatgttgtacagattattttgtcacccaggtattaagcctagtacccattagttatttttgcagctcctctccttcttcccaccccctccctccagtaggccccagtatctgttgttcctctttatgtgttcatgtgttctcatcatttagctcccacttattagtgagaaaatgtagtattttgggtttctgttcctgtgttagtttgctaaggacaatggcttccaactccatccatgttcctggaaaggctgcatagtattccatggtgtacatgtaccacattttctttatccagtctaagcatgtaggttgattctatgtctttgctgttgtgaatagtttgcaatgaacctatgtatgcacgtgtctttatgatagaacgatttatattcctttaggtatatacccagaaatgggattgctgggtcaaatggtagttctgtttttaggtctttgaggaatcatcacactgttcttcacaatggttgaaccaatttacacttccatcaacagtgtataagcattcctttttctccacaaccttgtcagcctctgttattttttgactttttaataatagccattctgactggtataagatggtgtctcattgtggttttgatttgcatttctctaatgatcagtgatgatgagctttttttcttatgcttattggccacatgtatgtcttcttttgcaaagtgtctgttcatatcctttgcccactttttaatggggtgatttttttttgtaaatgtgtttaatttccttatagatctggatattagacctttgttggatgcacagtttgcagaatttttctcccattctgtagattgtctgtttactctgttgtttcttttgctattcagaagctcttaaatttaattagatcccatttgtcaatttttgcttttgttgcaattgctttcaatgtcttcatcatgtagtatttgcccattcctacgtccagaatggtattgcctatgttgtgtgagggtttcgatagttttgggttttacatttaagtccttacatttaactccaacttgagttgatttttcatatatggtataagaaaggggcccagtttcaatcttctgcatatggctagtcagttatcccagcaccatttattgaataggggttcctgtccccattgcttgtttttgtcagctttgttgaaaatgaaatggttgtaggtgtgcaaccttatttccaggctctctattctctgttccattggtctatgtgtctgtttttgtgccagtaccatgccgttttcttactgtagacctgtagtgtagtttgaagttggatagtttgatgcctccagtattattcttttcgcataggattggcttggctatttgggctctcttttggttccatttgagttgtaaaatagttttttctagttccgtgaagaatgtcactgttagtttgataggaatagcattgactttataaattggtttgggcagtatggccattttaacaatattgattcttcctgtccatgagcatggaatgtttttccatttgtttgtgtcatctcttattttaaaaccaggctttaatcttttgcttataagcagctctctcctggtcttctttcctgatttccataacaatactgtcatttccttcactgaacatgctcaaagccttggaattatgttcaaccctcccttttccattatccccacatctaatcattttccagtggctcttcatttctctccctaatcccattgcctgcgaccactttcaacccttagaactttccttctaatctctgccattgtttcccaataggcaacactgcccttggtcatgccctctagttcttccatttttcacagtacaaattaatctttcttaaaacattattttcatagtgcacattgcactgtgtccatgatgagaaactttcagtagcttcgcattacatgtaatgatgatgtccacattcctctgcctggcattgaaggcctctgacaaccctcacaatctatcttcaacctaactccccattaccaaatatgccaagtgcccctaatgaagtatgtagtctacttgtgattctcctaagtacagctcataccaccctttgatgaaatgctgttttctatttttaccctgtaacagacttactgatcctttaagtcccaactcaagggtttcttcttttgtgtggcttttcctgaattttcaaacagtaggtgcccttttacctagtttgcaggttaatccaaaaagtcagttaaaatggagaactgtaaacagatgatttacttaacaaatcctttaatataacttaaaatacaaatttacattcatgtgtcaatcttctgtgcaggtccaaagcctttgactatgaaattggaactctaagtagtctttcttgtatcagccataaccatgtttcatattagttttgttttccttaaagttgagcatgcacttaaagattcttgcaaagtaactcgaatgtaaaaatccttctagtttgtctgattccccccaccaccccaaacttctgcatttgctttatctacacatgccttgccagaagttcttaatgattatcttctattgaattttactaaattttccaaaattgttcaaagaaacaactcctcttctattttatagctttaaataatatgcataatttcataacaactacaactggcataaacaagcttgggaacaaaattaactgactcttggtaagcatacaacacaactggatacagtagaagtacatccattttttaaaagttccattttatccctgaactgccatcatagtatgagttatatagacaacagaaaatactggttaatcctgcaaattggttaagtgttagttaagtggtgaacaactgaaaaattttattataacacatttgttttattgaaatgtaaccatttgtgtgcatttttctactagttcttaagagcaggatctgtatttatagagtagattcttagtagaaatctagtgaaggaattgatgtcagatggatggatagcaatcacacctatttgtataccttcatgttttcctcctcttaaaatataatttccttttaaatttctgattatttgaattatgtccaatcttcaaagcctacccatgatttcattgcctctataaactccttcctaatcccttcagttaaaaagtatatcttatttgacacatcttgtggtgccttgtattttttaaattatcatatatagtttctatatttgcctttcttaactgaggaccaagactacactgtagccttacaataccctgcacgtgggttatatcgaatggatatttagtgatgttcattgaaagtctaaaaaggttacttactggggtgtggaatttgtggtcggataagccctattagagtatactcacccatcagtatctctgggggattggttccaggactcatgcagataccaaaatctgtgaatacacaagtccattatataaaatggtgcagtatttgcatataacctacacatatcctcttgtgtactctaaaactcctctagactacttacaatgcaatgtaaatactatttaaatagttgttatactgcattgtttgctatttgtattattttgtattgcatttttttcctgaatattttcaatccatggttggttgaatcctcagatgtgggaactgtggatgtggagggctgactgtatttattttttcagaatgtctttggattgcagatttcaattaaaaaaataagtaatttggcatttacagataagacataattctaaataatttggctattaatgttaaacaaatagtaatttcaaacctttgagattgtgacaaggacaaatagacctgagttcaaatcatgactttgccaattactagttctgtccttggacagatcgtataatctcttttagctctagttttcttactactaaaatctaaaaatagagatttttggtttttagagctgttttcacggcaagcaagtaatgtgaacattaccgatagaatactttcaagaaataaagttagtcacaatacaaactaggatttccatgggttaacacatgaaaagtgttttgtttctagaaaacaatgtagattattagccccaaaaattatagtataaacaagaatcttcactgatataatacctcattccattagattttctttttggagttagcaagattactagtggagtactcattgaaagctattgctcctgctccacatagtattatcagtcttgactgtggctgcttttccaggaacaatttttgttctgcatcaccttttattaacctatttgcatatgaatttaagataaataaatggttttgccaaatgaagttgcacctgaaggttatctacttcttttcagtgagtccggcctgcagatttctttgcccagacacataaaaataaaataataaaccctctgtattgaagttgaagtattgtcaattttataaaaatactcagactttgttttttctttgcagctgcctctcaaaaaagaagccatcattgtttctaacagtctaagtataagtgagtgtcccagaattgaatttttacagcaaaagcacaaagatgagaagaaaatctctcttaagcatgagctcttcagacatggtaaatacaaatatgccatgtttctgaacttttaagttctgtcttcaaattcattaattatttttatatcgtttctgatacttggttttatcaaccaaggagatgttcttcaaaccattttatttcatatttaccagtgtagtaatacatgactttctcatcattaatttagccacacttttaacagatacttactgagtgattattatgtcagcattaagaggaacatttgttactcagatatttaattcaacttttcagggacatttttcacagtctgcttttgtttattatgttgtgtcacatatatatatatgtgtcacagcatatatatatatatatatatatatatgctgaactaaatgtgtgtgtgtgtgtagtgtatatatatatatatatatatatatatatacactacacacacgaacaccaaattcacaggaaatagaaaagaatttggcccatatatgtgataattatataataattatataaagtactccggaagataggccttatttgtcctgaatcatcataatttaagatgataagaaaacctgggtttaagttaaaatcagctaaagacaaattgtaaagtgtatggattgctttataacttgtcttatataagataattttttgataattcattcatagttaccagtacttcatttgcagcttgaatatgtagaaatataagtacacaaaccaatttataggacacttctgggagaaactccctggtacccatggactggggaaaaagactatagctcatcatgtccttcttgcctcaccctcttccactgtacattctttagttccacaagtatttattgaatgcttattgtgtgttaggcactggaagggatacagtctatgcaaactagacagtttcatctttatggtgcttataaatattaataatcacataaatataaaatcatagttatcatataggagctataaacatgaagtattaatgcgtggtaccaaagaatgtataatatggagaatagatcaggtcagggagtaaggaacacctattctttagtctcaaccatccgacctactaaagcagggtctccaacccctgcccacagactggttgcagtttgtggcctgttaggaacctggccacacagcaggaggtgagcagggggcaagtgagcaaagcttcatctgtatttgcagccactccccatcatttgcattaccgcatgagctccgcctcctgtcaaatcagtggcagcatttgattcttataggggcgcgaaccctattgtgaaccgcacatgcgagggatctgggttgtgcgctccttatgagaacctaatgcctgatgatatgtcacttgtctcccaacacccccagatgggaccatctagatgcaggaaaacacgctcagggctcccactgattctacattatggtgagttatataattatttcattatatgttacaatgtaataataatagaaataaagtacacaataaatataatacacctgaatcatcctgaaaccatcctcccatccccagtctgggggaaaattgtcttccatgaaaccagtccctggtgccaaaaaggttggagaccactgtactaaagattgggtagtcagaaattgggttaacttaattctataagaatgacattctaggttccagattgctaaggtgaatcattctgaactaaacgatatgtgttttgcagttttttatccagttaataataattataaaattaagcaggttattgagtctagaaagaactccttaactccttacttgaaaaaaccttttattctttatcattcttctccattttcatattaagaaatgcctcacgatgttctgctagatccttctggaatgtttccaaaacaattaggttctcctaatttacattttatatcttgtacatagtaaaaacaaacaaaattcctttgaacattttatgtattatgattataaattacgtttttagtttcttgactttaggatttaatgaatcccaaggatccttaagaatctaaaggaaaatgaaatgtttattcattaagtagacatatattgagtgcctcctaccatctaagctatgtgctaggtgctactgaacttttacccagttaacaacaaccaaaatttatttttaactacttaaaaaaccttgccgaattagtgtgttctttccttctccctcttctgtaaagctttgcttgatataatcacacaacacctcttttataattatttcatgtattcaacaaatatttgttgagcatctattttggatcgagcaatgtgttatgcgctgtacagtagcaaacaagagagccagcatctctgcctttacagaacatacagtttagtcttgggccaataaagaaggttatgttggaaaattattaaagttaattattcttaagaattacttctgtttttttatatttaggcatcctcctcattacaaaagttttccttggccagagtgttcaggcccatgaaaaagaatccatcagtcaatccaactatccaatggttaattcagtgttcattcctcggaaatatttactaagtatgtctatcataaagattaatgtggttttatctctctgaatgaaaaatgtttgtgtttaatacggatactcacaattttatttctacttaacaaagtttgtagaattttctacaaaaatctgttactagccactaataatttttatattccctacatcaaagacatttatatatgggtgtgggtagataatctggcaaattttaatgtaattatgtatttgtgtgtgtgtgtgtgtgtgtgtgtgtgtgtgtgttcattttcaaagaattaaaaaagcacccgacttttaacaagagttttagagaaatacgtttgtcaaaattgcatggccacacattgaatagaaaagtgaaaaagtatgaaaaggaaaaggatatgaataaaattaagcactactagtctatgtagtgaaaggatttatataattaaaaagtatttatataattaaaaagctggagtggaaaggatgaaagaaaaaatcctcaataatataactgtcgcaacttactgagtttgttatttatttaaaaatgaaagaaaaaatcttcaataatataactgttgcaacttattgagtttgttatttattaaactatgtaagaatgaaaaagtatgtttcaatttgagaaaatgtgtttgctttgcttgtttttgcttttactctagattctgtcatgggacaaagaaactgtgattgcagtgttcggcagtgcaagtggtttgtctttgatcatgaccttgttttgccggaatatgttgttgaatttgagtatattacaatggtatgaattgttacatattcttaaagactaattctaattccttaaatgggaacaaagtagtaatttgaagtcgaataatgctatgtcaagtttatattatgtgcatgtgtgtataattgttattttgtgaataacttaattttcaaaacaagtcaactaatattttttaggcaaataatcaaatgattaatatatggctgtactcccactggaaaagattcagtctactttgaagattcaaaatacattgaaactacattgaagaataaacatgaaaatgtgccctcactttaacctcactgccattctctttcaccagggaatccactgttaacagttttatgggtttgctttcaatcctttttctacgcatttacatatataataacagataccatttgacatagtagaaacaaggtctaagtattctgtgatttttttgcctttaacaatatgttttgaacatattttcactttagtacatatagatgggtatttcattattttggtggctgcatattattcagtaatactaatttattcaactattctcctgttgatatactgtgtccatatttattatttaaaataatatttcagtgaacatcattgtagatgtatctttatacaaatatggaagtttctctacaggatagatttgtagaaaacttgggagtcaaaggatatatgcatcttaaattttgttagattttgccaaattctctccacaaagacttgactgttttacaaatttccaagtgtgtgtgacagtgcatgtctcattacatttgccaacacaagatgttatcagtctcttttggccactatggtgggcaaaaaacattatattttattctttcatatgcttaaaattatttagagttgtacgaaccaaatgttatatcttttgaccattttctattaaactctgtctttcttgtattaattgggaaaatccttacatacattctggattttagtactttatcttagcccaggcatggtggctcatgcctgcaatcccaggagttcaaggtgagaggattgcttgagcccaggagtttgagaccagcctgggcaacatagtgagatcttgtctctacaaaaaactttaaaaatttaaaaaattaaaaatcatttatcttatatatgttgcaagtattttctgtcacttgccttttaattttaattgtaagaaaaactcggccaggcgcggtggctcacgcctgtaatcccagcgctttgggaggccaaggcaggcggatcatgaggtcaggggatcgagaccatcctggctaaccatccccgtctctactaaaaatacaaaacattagccggccgtggtggcgggcgcctgtagtcccagctactcgggaggctgaggcaggagaatggcgtgaacccgggaggcagagcttgtagtgagtagagatcgcgccacggcattccagcctgggcgacagagcgagactccgtctcaaaaaaaaataaagaaagaaaagaaaaactcatcattttgttcatgtcctttgtagggacatggatgaaattggaaatcatcattctcagtaaactatcgcaaggacaaaaaaccaaacaccgcatgttctcactcataggtgggaattgaacaatgagaacacatggacacaggcaggggaacatcacactctggggactgttgtggggtggggggagggggaagggatagcattaggagatatacctaatgctaaatgacgagttaatgggtgcagcacaccagcatggcacatgtatacatatgtaactaacctgcacattgtgcacatgtaccctaatacttaaagtataataataataaaattaaaaaaaagaaaaactcatcattttaatttgtaattcacaagttaatttttaagaggtcagctctctctctcaatcttatcctgtatggattctgaattttatgtcttatgtcaaaaagcctgtaataaatattctttattttcttacaatacttatataacttgttttaaagcctttagcttttttaatccatctagaaattgttttatggtgtgtgaggtagaaaggtggtcaatttttttaaatgaataaatacttaggcattatcttttctgctctatttcaaaatacaacctttattgttaaaattatttgcatatatgaggaatctgtctatatgaatctattctgttccattgaactctttcatctaattttggatcactatcatatttgttttggttattacaaacttcatatatcttgatgtgtgatagggcaaatccccttcctctgtccccactcatctttttaaactttttttgactattcttaaacagtatctttttccaaataaaatttagaatagcttgtcaagctctattttaatatcctattaaaatatgattgaaattatattgaatttaaaacttaatttggtgtgaactgactactttgctgtattggacttcttgttctaggaacatgataatctgtctactccatttactcaggtcctctcttacagttttctttatataggtctccaacatttcttgtttagttctggacatttatattttatattgctataatgaatgggattatattagtcaagtatgcctttagcaaaagatacagaaacccagacaaacagtaaacagatagaagttcatttaactcacataacaactcaagagatgggcaatacctggcagttgtgaccattcaatgatgtcagcaaagaccttggttccatcatcctcctgcttgccgctttatgagctcttttgatgtgatgattcaattctttcttctcttcttgaaagtttgcttctcttagtttcttggttatttcttctcttccattctctattaggccctctggaataccccgattagttaaatatcgggtgttccaaattgatccttcatgccttttaattttttctcttctattttatactctatttttaaattatttgttttgaaatattttctcaatcttagcttccacattgctaatttgatctgctaccatatccacttggttctcagggtatttactaaatttttattttaataattgtttttattttagctttgaagtgtgtgtccttttcttttccatagcagcttattcttttatcataggtactttattgtcctagatttttaaaaattctctgatgaagtattctggttttttctagagccagttctgtttgttcatgtggctcttgctcattcatccacaattcttaccgtaattactgaattacctgataattaaggtaactaattgctctttgttcaagtttctctggatctgattttaaaagtgtttatctcctgcatattttttagccagaggttacatttctgatcctatttacctgtcagttcagtcctttctgattcatgtgtcacaatttctaggcttttgtaggtaccctcttcactgttatgaaatattttaaaattatcttctgccagttttaagaaatgttcagtgggtgggaatagatacaccatgcatagcctacaattttaatctgctctcatagatgtcctaatgtgattctgataatcacagatatgactgtataactaaaaatgtcaactcatcttttctacatagcttgtttgtttttcaaaatgataaatacagcaactgattttgcaatgtttttaatacattttttaggtcaaggcaccctctttattttctgtattcaacaatgttattctagaagaaagcaaaaaaaacccagaagtatcagtattttccaaggatttgaaatttgatgatgaagttataaaaatggagcccagaatcaaggcccgaccaaaactgattagtttggatgataaaacaatactttcccttgcaaagactagcgtttacagtcatattgtggtgagtattgtgagaaatacagctttgagacaggaatcttgaatttggaatcagaatctagcatatgaagtcaaaagatactaaactgcctgtctgatgatgccaggtacaatgctacctaaagcgtccatttctctttttctacttggattaaatcagtgctctctagtagtaatataatgtgaaccacatatgtaatttttacttctctagtagctatgtttttaaaagcttttttaaaaagtaaaattaattttaataatacattttatttaactgaaatatcttagtttgttttctatttctataacaaaataccacagactgagtaatttatgaagagaatacgtttatttagctcatcgttctggaggctgggacatccaagatcatggtgcctgcatctggtgagggccttgcagtgtcataaaatggcagtgggcatcacatggcaagaaggcaagagcaagagagccagagagagctgattttataacaaatttactcccaagataatagacccactcctctgaaagtgacattaatccattcatgaaggcagagggagtaagttccaacacatgaacttttgggggacacattgaaactatagcacctgcatatctaaactattatcatgttaacatggaaccagtatgaatattcattaataaggtaatttcatcctaactcttaattctgaagtatattttacactctgagcacattaagactagtcacatttcaagtgctcaatagccatttgaggtggccttccaattagcaagggattttattcctgaataaccaatcagctctcttcaataagataaaggcagataagttttaaataagcttctagaattaatcaacatagaatatgggatctttacaaaattaatcaatggaaatcaggttacttattaaagtgacttactttatgccgagacaattctactgagatattaggcctacttctatgtctgacttttagatgtgttcatttcagatctgctgctaccactctatccaaactactatagtttctgacctagactattaccccagccttccaaccagactctctgtactctactattgcaatattgcacaactctagaaggcaaaattcacattatattctctttagtgtgccctttgggtgtcattcattatataactgaatagaactcaatacaagataaggggagtaggatgcctctagagttatgcaacagaggccctgtcctgtgtctgtaaatgtgcagcataataagagcaatcttctggctgacagtactgagaaattattatttctgcactataatatctagatttactattttagtaagaaattagtttacctgagtcaaaaacatcaatttagtggaggaaatagatatgtgaacacatgtaggaagctcagagttactgggagagatttatagaaagaggtgagctttgagtggattttgaaggacatgagaaatttagttgtttacatcttccagagagagaaaatattcttactgtagaaacatgcttttgaaagatccagatgtcttcagggaacactgaaaaatttagtatgcctagaatatagtgttacaatggtggagggtaaagatgtaggttggaattcaagaaagacacaggaagccagggctggaagagtatgaggttgtagccaaattaggatggattttggaagccaaaatttaaaagtttatattcttctgtttaaggaacagactccctttaaagaccctaactttgacagcttgtgcatggaattaactgaaatcagactggtggtatggaaattcagtagaaaactattgcactatccaaaggaaaaatccattcatttcttcactggataaccagaaaaccagctgcactgttacatcaccactaccactgcctaagtctgctaaggcactgatagtggtgatataacggtgtggcctgtttgagaaacagttctacaatcaaatgtataaagaaaagagggaaagcaggtgatcaacagtatgttagatagtgaagctctttatcagacacatagggaagatgaaatcagttgtggacatgttaaatgtgaggtttctgtagaatatatcatggatgatacccatatgtgacttgtaaaatcactagtctgcataaattggcccttaacaattttagctaattttgacagctattagaaatttaattgtttctcccttctaggaattttgttatgtccacaatataaggcataagatggtggtggtgaatgaagatagctgggagatagatacttgatactgtagtcagttgcattaatacattgtcttgtgcccttgtttattttgcaagccatacataaatacagtctttacttgataccactcataatggtataaagacagaaaaacatataggcatcaggatctctcctttagtataaatgtgtaataatatttgtttttatatagcctagaatgaaatggacaagaaaagtctgggccaaattctgatgtaggtgttgtcttaaacaatctcccacctcctcctttgaccttctgtcctcctacttcagcaccctcagcttttcttctttggttcggtgccctcatacattttcctgccatctctcttgtgtgaggtaccctacctgataccccaaatctttagggtctccattgttcactggttagccttagaaacagatctaccctaataagtatcttaacacatgtatttattttctaaaaagaatttcacgccaattgctgacaaacttagaccaagtgagaaatcatattaatcaagaaccaggtctagtgatactattacaaattatttatcttttaacatcatagattagattttttttcttattgactgtttcttaatgctatttaaaataactgctttcttattttgtagtatattggctcaaataattgttctaaacattttacatatccacacttcagtttaatgtagaatgtaacctgtattattttttaatgtatattttattttacttcagagtctgaatctacatggaaacagcttgagtaaattgagagatctctccaagttaacaggacttcgaaaactaaacattagctttaatgaatttacctgtttagatgatgtataccacttggtaagaattgttcctttgaatctaaaaaagtgaaactcatagaagcagaagtagaatggtggttatcagggcctaagggctaggggaaatggggagatattggtcaaagggtataaactttcagttataaattagacaagttctaggtatctgatgcacagcaagtgtggtgatggatgtgttaatttgattgtggtaatcattacacagttatatcaaatcattacattgtacaccttgaacatattcaaatttattctgccaatttaatattttttaaaaactgtgctgactctgggcacactgcccaggagttaggcctgctctcaaaggaacagctataaaataaaaagaaaaaactttggtgcagaaaaaagatcatgaagtcagaggacaaatgataaattggaataagcatttgaaaaaagagctgtccttttgaaaacattaatgtaaaataaaataattaatggataaattatttttgtaattacggcttcatatctaccatttacaagattatacagcctaaatcagcctaaatacatatactgtattatgttactttctctaaaacaggtcttaggttgaacttttgttagcagaccaaatccgtaccagtggtcatatctcatttctatctactttaaaatgaatatattaaaataacttctcaaatttgcttttaaaatgtactttggtgtaatttccatttttttctactcttgttttcccactcttctttctctctttctcatgaatccctatttctttttcattttgtagtttaccacttcacatcttaagatggtcagttcctcccatctgctcatccaggttattatttctttctttctgtcttgtcctttgacctgaatatcacatgcatagatcttgttgaatttgtgtttgccttcttgtatatcataggacaatacaggaatgcacatgtacacataggcatggatattgtctggcttttattttgttatacatcatataacaaaaataattacatatgtggttccagaactgcaacccagcatctcctgtttacatgggttccaggtcactcacttatctcttcagaatatatcatcattttcagctcttattcattctttattccagctccttgctactatatcaaagcctttacattatttcttctaccattgtaatgggagctgtttcttttacttattggcattaggtttagatttagtgttaaactcacttcctttttcttttggtaggcccaagcccttttaagtaagtagaatccctgagagtctggattcagtatgcaactgagggaaaaaggtattttagaagaggtctcaggactgtatgtagattgttggtatttttatttttttctatttatttgccagcacttccaaaattacgacagtcattataattttgcttaggcacagatttaaagagtaaactcattcaagacacttagatagagagtgagcttagccagctgcccagcatttattttgccatgtggtggtggtgttcaactttaatacaaaaattattttcattatcatagcctcacagtctacttgttaaatgactataaccttagtcattttacagataagggaactgggtaagttttatgccaaagtggtattttcaaattttaggatgagtaaaggtggctagctatagacctttcaaatgtcaagtctctaaaaatgactctaaggatattagaggtggccagagagaggagaaactctacatggatgtctatgtgtattttttcatctttttattataaaataaaacacagatacagagaattacatgctatatatatggcttagtacattgttgtaaggtgaaaatgcttgtaatcagcacccagatcaagaaagaaaattttgccacctagggcaaaagcctcttctatgtgccccatgccttcctctctccacaagaaatcattatcctaacctctgcagtaatcgtcttcctggattttttcctgatagttctgtcacccaaatgtacatccctagcacaatagtttggttttgccatttttaaaaaatgtaactgcgtttcttttgttgcttttggcaaccagttacattatttgtaacaacttgttatcattacagaggaagtttatatgcattgtataaaaacagaaaatgtaggccaacaacaaaacattctcaccacccagagatcaaccttaacttcttttttttttttttttttttttttttttttgagacggagtctcgctctgtcgcccaggccggactgcggactgcagtggcgcaatctcggctcactgcaagctccgcctcccgggttcacgccattctcctgcctcagcctcccgagtagctgggactacaggcgcccgccaccgcgcccggctaattttttgtatttttagtagagacggggtttcaccttgttagccaggatggtctcgatctcctgacctcatgatccacccgcctcggcctcccaaagtgctgggattacaggcgtgagccaccgcgcccggccaaccttaacttctttgtactctgtcttttaaatctcttttaattgatagatttcccttccatttcccatagtttatctctagaaatacttgagccattcgacccaaagagtttccagcagcctgggatttgcttacttaagatacatcgctatatgcctcccatcttctatatttcctgcaaattggcaagtggatccacagataggatcagacccaggttccatttttctggcaaaactaatgtttgacaagactgtaggagacacgtgatatcttattgtctcacttgtgtgatgccaaaagccattattacttaatgcagttggggattacaaaatggtgatattcttattctatcattatttcatttattatttggaatacttttacaaagagacatttctcattatctattattttatttcccagtggtagcattcacatagaaagtacagaatagatgcttatccaccagttttcaagataatgaatttgttccctatcatttcccaaagtgagcaactcttgttttaataacagtatgaatgcagggacttaacaatatttgattatattcaatccattgtaatttttatcatggttgaagctcagattgtctcatctttaaccagtgggagcttttcaaagttaacttcttttgccttgaccctaatggcctttgatagcttatttgacattggtataaaaagatgttccatacacatcttatatattttctgttgcagacacagtatcagccatgtcttcaagaaaccttagtttcttttagagagaagtggtccttcagaaacacaatccagttggtcataatttctaggtattagaaattatgactgactggaaactggactgaacttgttggaagggatatgaatatatgtgtgcatgtgtgttgcatgcgtgcacccatgcgtgtgtataaataaccttatgaattttttatacttccaattcaggttcaagaccacaaagctttcaacttcttctctattacttacatatatatacttttctcataccaagaatcctgattcttaaggatacaagatgatagaatatttaataattactcattgttttatctactgtcgtacacgcaacagtgtcataatgacagtacttatactattatcaatatcatttactggaaagattttctaaaaattttgtgtatgttcttcccattcttccccattttaaaaaataattaaaataattatactataactatattgttaccgcatgtagccttatgctctgtacactctcccttttaattcattggtaattgtatatttacttctcatcaccagtctttattttggtatctttctaaacattttgattgtctgaaatatatcctattatagatcataggaataatatcccttcagttactgaatgttaataacagtttagctatgtcctttatacttgaaaggtggttttgcaagatataaaatctttggctcacaatttatttttttggggcatcttaaatgttacttcattttcttctatcacaaagtattgttgtagaaagtctgatgagaatgtatgatttttttaccctttataagtcacaagcttttcttccttctagatggccaaataacttttttagttttctttaaagtctaataagtttactagcatttgtcttggtgttggttgttctgggttgtttttttcagattcacagtatgatcttccaatatgtagtttaaaatctttttttctttcaggaaagatgttttaaatttgaattttttaatcaatttttctgtttccttgctgttgtcttcttcttcagggactcccattatccatatgtgaaatcttctttatcatcagtatttgtcactttctcttgaatcctttttgtctcttcattcatttcttatcttaaatttttttcactttttcatcttgtatttctcttaaaagtgttatctattttttattcactcttggatatgactaatttagtgtttatttcttaaattattttattatttcatttcattgtttctgggtcctttcactccacgttttaaaacacttttttcgtttttgtaattcagatttatattgttattttatgtctcatatcattcttaacatcttttagtttgttttaaaacggtaggttaatagtcatgatatgtttcttgagcatatttttctggtgtacttttttgctaccagtaatattaacctctgtcttccccctctccacactcccaccatagctttgtcttgaatttgacctcagtacttttctctgctcatttgtaaatgaaattagtttttcttaacttttaaaatgaggtaaggttcaggaaagtttttctaacttcacagatcttcctcttctgttgtttatatgtactgtttaaaatttgtaatgcttactctgagatttttttggctctattccaatcctccactttagtctagaccttcctttttttttttttttttgagacggaatttcacttttgtggcccaggctgaagtgcagtggcgcaatctcggctcaccgcaacatccacctcctggattcaagtaattctcctgccttggcctcccgactagatgggattacaggtgcacaccaccacacccagctaactttgtatttttagcagagatgaggtttctccatgttggtcaggctggtcttgaactcccgacttcaggtgatctgcccacctcgacctcccaaagtgctgggattacaggcatgagccgctgtgcccagcctagatcttcttttttattcacctctcttgtccttatcctgtttcattttgagtttagccccaacagtttcttctatgagaaggattctgtcttgaagagagtcctagtggaatagtttttagattcacaggggctcgactgctccagggactgctttcttcagacctttcttttttctttttcttttttcatttttagacagggtctcactctgtcacccaggctggaatgcaatggcataatcatagagtacactgcagcctcaacttcctgggctcaagtgatccccttgcctcagcctcctgggtagctggaactacaggtgcatgccaccacaccctgctaattaaaaaaaaaaacaattttgtagagatggggtttcactatggtgcctaggctggtctcaaactcctggtctcaggcagttctcctgcctcagcctcccaaagtgctgggattacaggagccactgtaccaggccccttcagacctttttactgtggatcccatgaactcatctggtattgaagagaacaaaactcctccctatttcaattgctgtaaattggtctccacacattccagtgaatatttgttgactgttctggggctctcctgttttcaggtccatcagatgctgccctgacacttccttcttctcccacatgaataccatgcaggtcttgtgttgatggtggtttatctctaccaacttcttttggagcctatagagcaaccttgtcatgtagttttgttgtaaacattgtccatgaaaatttggttttatctatttgctctgtttttatgtgtggattcacagcatttgaaaacttctgttgcctctgcctctatattctctaatacttggttttatatgcatgtgtactattatgtttattccagtattgtaaaaagttatgatctaattgaatcactcacttataattcctatcttttaagtttttaaatttgctttgggatactcatctttactgtcattttccttaagtgtgtactaaaatggacaatttctatgcccttcttgcatgcttctcatataaatgaggtaagttggttctactaagttgtagaaagtaaatgtatcggggcagagccaagatggccacataggaatacctccagtctacagctcccagcatgagcgatgcagaagatgggtgatttctgcattttcagctgaggtactgggttcatctcactggggagtgtcggaaagtgggtgcagaacagtgggtgcagcacaccgagcgtgagccgaagcatggtgaggcattgcctcacccaggaagtgcaaggggtcagggaattccctttcctagtcaaagaaaggggtgacagacggcacctggaaaatcgagtcactcccaccctaatattgcacttttccaatggtcttggcaaacagcacaccaggagattatatcccgcgcatagctcggagggtcctacgcccatggagcctcactcattgctagccaagcagtctgagatcaaactgcaaggcagcagcgaggctgggggaggggtgcccgccattgcccaggcttcagtaggtaaagcagcccagaagctcgaactgcgtggagcccaccacagctcaaggaggcctgcctgcctctgtagactccacctctgggggcagggcattgccaaacaaaaggcagcagaatcctctgcagacgtaaatgtccctgtctgacagctttgaagagagtagtggttctcccagcacgcagctggagatctgagaacagacagactgcctcctcaagtgggtccctgacccccgaggagcctaactgggaggcaccccccagtaagggcagactgacacctcacatggccgggtactcctctgagacaaaacttccagaggaataatcaggtagcaacatttgctgttcaccaatatccactgttatgcagcctccactgctgatacccaggcaaacagggtctggagtggacctccagcaaattccaacagacctgcagctgagggtcctgactgttagaaggaaaactaacaaacagaaaggacatccacaccaaaaccccatctgtacgtcaccatcatcaaagaccaaaggtagataaacccacaaagatggggaaaaaacagagcagaaaaactgggaactctaaaaatcagagcgcctcttctcgtccaaaggaacgcagctcctcaccagcgatggaacaaagctggacggagaatgactttgatgagttgagagaaggcttcagacgatcaaactactcagagctaaaggaggaagttcgaaccaatggcaaagaagttaaaaaccttgaaaaaaaattagacgaatggctaactagaataaccaatgcagagaagtccttaaaggacctgatggagctgaaaaccaaggcacaagagctacgtgacaaatacacaagcttagtagccaattcgatcaactggaagaaagggtaccagtgatggaaaatcaaatgaatgaaatgaagcgagaagagaagtttagagaaaaaagaataaaaagaaatgaacaaagcctccaagaaatatgggactatgtgaaaagaccaaattacgtctgattggtgtacccgaaagtgacagggagaatggaaccaagttggaaaacactctgcaggatattatccagaagaacttccccaatctagcaaggtaggccaacattcaaattcaggaaatacagagaacgccacaaagatactcctcaagaagagcaactccaagacacataattgtcagattcaccaaagttgaaatgaaggaaaaaatgttaagggcagccagagagaaaggtcgggttacccacaaagggaaagtccatcagactaacagctgatctctcggcagaaactctacaagccagaagaggacagtggggaccaatattcaacattcttaaagaaaagaattttcaacccagaatttcatatccagccaaactaagcttcataagtgaaggagaaataaaataccttacagacaagtaaatgctgagagattctgtcaccaccaggcctgccctacaagagctcctgaaggaagcactaaacatggaaaggaacaaccggtaccagccactgcaaaaacataacaaaattgtaaagaccatcgaggctaggaagaaactgcatcaactaacgagcaaaataaccagctaacatcataatgacaggatcaaattcacacataacaatattaaacttaaatgtaaatgggctaaatgctccaattaaaagacacagactggcaaattggataaagaatcaagacccatcagtgtgctgtattcaggaaacccatctcacgtgcagagacacacataggctcaaaataaagggagggaggaagatctaccaagcaaatggaaaacaaaaaaaggcaggggttgcaatcctagtctttgataaaacagactttaaaccagcaaagatcaaaagagacaaagaaggccattacagaatggtaaagggatcaattcaacaagaagagctaactatcctaaatatatatgcacccaatgcaggagcacccagattcataaagcaagtccttagtgacctacaaagagacttagactcccacacaataataatgggagactttaacaccccactgtcaacattagacagatcaacaagacagaaagttaacaaggatatccaggaattgaactcagctctgcaccaagcggacctaatagacatctacagaactctccaccccaaatcaacagaatatacattcttctcagcaccacactgcacttattccacaattgaccacatagttggaagtaaagcactcctcagcaaatgtaaaagaacagaaattataacaaactgtctctcagaacacagtgcaatcaaactagaactcaggattaagaaacaaatttacaagaaaaaaaaaccccatcaaaaagcgggcaaaggatatgaacagacacttctcaaaagaagacatttatgcaaccaaaagacacaggaaaaaatgctcatcatcactggccatcagagaaatgcaaatcaaaaccacaatgagataccatctcacaccagttagaatggcgatcattaaaaagtcaggaaacaacaggtgctggagaggatatggagaaataggaacacttttacactgttggtgggactgtaaactagttcaaccattgtggaagtcagtgtggtgattcctcagggatctagaactagaaataccatttgacccagccatcccattactgggtatatacccaaaggattacaaatcatgctgctataaagacacatgcacacatatgtttattgcagcactattcacaatagcaaagacttggaaccaacccaaatgtccaacaatgatagactggattaagaaaatgtggcaaatatacaccatggaatactatgtggccataaaaaatgatgagttcatgtcctttgtagggacatggatgaagctggaaaccatcattctcagcaaactatcgcaaagacaaaaaaccaaatacctcatgtcctcactcacaagtgggaattgaacaatgaaaacacatggacacaggaaggggaacatcacacaccggggcctgttgtggggtggggggaagggggagggatagcatttggagatatacctaatgttaaatgagttactgggtgcagcacaccaacatggcacatgtatacatatgtaacaaacctgcacgttgcgcacatgtaccctaaaactgaaagtataataaaaaaaaaaaagaaaataaatgtatcgttgttacagtgttcatcattcctggccttgcctgtgtatcagtgtacttaaactaaggctttctttatgcagtggaaggactgggattcataagtcatagaaaataaatacatcatatagttgtatggaatttttcaaaaatctaaacaagatatccacataaggcaaattgaaatgtaataagctgcatgtctgtcattcactatcaggaaaagagaatatctgggagaaggaaatagagatgttttctctgaaaatagctccaccataattagtgttgactagggaaagacaaagataaatggctatttgcaacctcgatctagaaaacaattacaattctaattttttattgaaataatactgaatatcttatctttctgaatgagaaatctgttgttaagttgttcctgatgtctagagatagctaacctacatttagagaataaaccagtatcccaagaaaatttaagaggtgttttgagttttaatctttgtaagttgtactgtactgtactgtaacttgagagatttttaaactgaatcaaaagaaatattaaaacaaaatgctattgcaaaactgaaatactgtttcatgactatttaatgagttcctggaatctgttttatatcctgaagataacagaaataaagattccccccctgttttcaaggggtggaagaagacaggtttttttttttgttatattttattttattttgtttttgagacggaatgttgctctatagccaggctgcagtgcagtggcatgatcttggctcactgcaacctccgcctcccgggttcaagcgattcttctgcctcagcctccggagtatctgggactacaggtatgcgccacgatgcccagctaatttttgtatttttcgtagagatggggtttcaccatgttggccagatggtctcaatttcttgacctcgtgatccacccgcctcagcctcccaaagtgctgggattacaggcgtgagccaccgggcccgggcagaagacagttatatttttatgatgtgtggttcccaaatgctggtctacaggcaggtgccacaatgtgggacaagttttcaccagcttatgatgaaaattgggaacagaagggccatatagtaaattcttataaagcctaattcactttacttaaaggtgttttttttttctaaagttatggccttaatagttttttactgccaaatatcctttcgttcaagaaatgatgataggaagtgatagtttttgttttgttttgctaatgcttgcttctgataataaaaagtcagtaactctgttcattttcagaaatttttttaggttttaattcaactcttgaaacctgaaccactataagaagttctatcccaacaataagaattataccttataaaggaatgactaattccattctggattaaaagagttgtttgaattaagttgtagagaaatcaaacataacaaattaaagtcttagagattttttacaaacaagtaagatgaagatatgaatagataaatagccaaagacaagaaaggcaataaacaaaaaaagaatttaaaaatgaccagtataaacacatagaaaaatgttcaacttcaccagtaataatgtaaattaaaataaggcaggtggatcagtgagtatttgagaaaatgggtattctcattgtctactgttggaagaaaatgttggtacaaacttccttgaaatctacttggcagtatttatcgagagtcttaacaatacagaaagtctaagaaccagtgatcctgtttccaaaaacctgttctgaaaaatattttggagctgcaattagagaataattctcacggatgtttgttgctgtgttgccaacagttagaaacataaagatctatagtaaaatgtttttaaaaattatgatcacatagtcaaatatcatgcagtcataaaaaatcatctttaagaagatctaataatgtgaaaaaatgttaaaaggatacaaaattatatatgttttacataagaaaaaatatgtgcatataataaaaaacaatgctttcagtggttctttctgagcaataggattatatatgttttctattttttcttttcatttatttgctatattttccaaatttccaacaaggaacatgtgttacttttatgatttaagaaaattattatttaaaagtatgcactttttaaaaagaaaattattagtattaagttaacaggtttagtttctaactctgaagatgaacctttttaaagcaggctatggggctcaacagtataaacaagaagcctatatattaaaaagtacattttgtttgttggggataaattatcttgacagtttctttatatcttctctcctatgaaaacagacattgccactctgtgttacaagggtaaaatatgaattgaaagagaattactaaaacataatacctgtagctctttagacaaatgcatatgttgataccatcattgcaacataactactgtttatgtgtcctgtgaggattaccaggaagtgtgtaaagtatgtaaagaaccacagagaaactattttgtaaatacaaattatgattctcttagcatcacttttatttatatgtgttgcagtataaccttgaatatttggatgcaagccataaccatgtgataacccttgagggatttagaggtctgatgaaactgaagcacttagacttgagctggaatcaactgaaaaaatctggcaatgaaataaatatgttatgcaaacacaccacaagccttctcactcttgatattcaacataatccatggcaaaaggtatgccacagacatgttactaaaaagcaaacatttttattttcagagccatttccctactaactttactatttagtaatagccagagataggcaaagtatcttcgtttttctagacttccttccgtgaagtcattcataaattggatttaatgtactgatcaaatgaatcagatgttactataagaaaagactataatttcaaaacagattttttgtaacctctaatagattgagaacattattgcttttagtcattgatgtcattgccatttgcaaacctccagatattttatatagttcagtgtgccagaactctattttaatgagtcataggaaccaagaataatataatacagtgagaggggcacactattaaggaagaaacataatttgatttataatatatcctaatctgtggttgaacaacatgttttacaattttattttgcattttgcattattcactacttgttttctgttttaagtccagaaatcatctcccctcataaacttgcattataaagtcttatgttctcttataaaaaggaaatctgaacattattttttctcattacaaaaatatgtagattaatgctaggtaatttccatattccatgactatatttaagtatatcttcaagtatttaaaataagtcccaagattataaagtcaagaatcttcctttctctgcctttaaaagatgtatatcaggctgtgttcagcctttaaaaaggaaactaagcacagtaggttctattaaattgaccatattactaagtttatattattgtatttcttcttttttgctcagtaaaagtgaagaatatttttcttttgccaaagcatatttcctggatgatcacagtacagctatctctctgttgccaaattggattgtcaagggctaaagatccatattgaatcacacatggagatgactagcttactgctgatctagataaacaggagtcactacagttgttcttttaacacttttcaccgcagtcacttttcaatagcttatgggatttcccttcctcatcagagtagaatcatcaaccttcaaacaaacagattaattattcaacataatttcaactattatttaaataattaagctttttttaggtatatgtaatgaacaaggaaatgtatgattttgaattatatggaaagacatgaaaacagtcattttcatgccataacatatttaacagtttataaaaaattttttttttgtttttcccaagccagccacattgaggctgagtgttattggcagattaaagactcttacccatttaaatggagtcttcatttctgaagaagaagcaacagcagctatgaaatttattgcaggaacaaggattactcaggttggattttactgtttactattcattgtgctatttagaacatacagataatattttgcatactctttttctgtcattaagattttatagtccctcttagcctattaataaaaaattaatatagagcaatcataccacttggtattttttctgtttaaatgtatctcatttaaataccaaatcgttgtatggattctcttgactatccatgaacactacaccaaaaatacctctagggtaactgcttttttaccagtcacctgaactcaccagagccctttctagagcctacatgaaaataagcaactgtctgaggataaggtaagcttagaggccttcagaaagcattagtgaattatctatctacttaatattaacattatatttgtttggctgaaaggaacaaaatccattaacatggaaggaggggaaatacctttgttatccatattaagaatgctgtactttagccaaagtagcttcaacatcctaaatatatctactctagttttctagttgtttactttttgtggagtatctgaatattaattccttaggcaatataatgtttagttttggatctattcaaaattttgaaaagaaattttttattggtaaaaaataataataacactcctaaagaagagctgggaatttaccctaagaaaagaactaaaaatagaactaccattccactcagcaatcccatttctggggctataaccaaaagaaaattaattgttctactaaaaagacacatgcattaatatgttcattgcagcactattcacaatagcgaaatcacagaatcaacctaggtgcccatcagtggtggactggataaagaaaacatggtaaatatacaccatggaatgctacacagccataaaaaagaatgaaatcatgtacttcacagcaacatggatgcagctggagaccattatcctaagtgaattaacacagaaacataaaaccgaataccacaagttcttacttataagcgggagctaaacattgggtacacatggacataaagatggggacaatacacattggagaatacgacagggaggagggagatgggcagagctgaaaaattacctattaggtactatgcccactacctgaatgatgggttcaatcctaccccaaacctcaacattacgaaatgtctccttgtaacaaacctgcacatgtaccccctgaatctaaaatgaaattaagaaaattagttttttaaaaagaaatcaaatcctgctaaaatcctttaagacaatgtggtattggcacagagctagacaaatagaccaatggaacagaataacaacctaatatagacggtggaaactttataaataacagagctgcctttgtagatcagggagattattcaataaaaggcattaaggagtttattgtaaaaggcaaaaccaaaaatttttttgaagaaaatatgaaagattatcattatgaccttgaatttgtgaataatttagtaggcaagaaacaaagagcataaaccataaataattggacatgtctacattaaaattaatatatcttttttcaaagaaagtgaaaagacaagctacatactgggaaaagaaatttgcgacacaactgtcaaaagatattctttatatatccagaatatataaggaaaaagacaaccagccgaacagaaatatgtgccgaagatctgaacatacacttcactggagaggaaatcagaacagccaattaacttaggaaaagatactccaccatattagcattcaagaaaatgaacattaaaaacacaatgacctaccaatttttgccagttttatagatgagcaaaaactttaaagtctgacaataccaagttgttgcaagaatatgaagtaaaagtgtaatttttctgaagtggtacaaccactctggaaaacaatttgacattattcagtaaagctgatgtatatttgtgtgtgtgtgtgtgtgtgtgtattctacaacccagcaattttactttacttaggtgcatatactctaaagaaactcttgcatgtatgtaccaggaaacatgcacaagaatattcatgacgacagtgtttataatagcaaaaactgaatcaaccccaatgttcattgacaggagagtcattaagggaatactatacataggacatatgaatgaactacagctacatagagaagcttagatgaatctgatgaatatgatattgaacaaaaaaggcaagtcataaagaatacatacatattcaatttacatgaagttcaaatatgtgcacaactaaatgatatattgtttatggacacagacataggactataaagaaagcaaggaatggtggacaaaacatttgagataatgatcacttctaaagaaaaggaaagaaaagggcttaggatcgggcccacagggtgcttgtaatctattcataatattctagctcttaaactggtttcatgggtggattctatgtgtgttcatattatagtaatcattttacagtcttataaatattatcttgtaatggttccacatttgctaaaacaagaaacaatgtaattaaaatgtatctagatattgaaaacaatttaaggcaaaggaaatgttacattttataattatttattgggccactcatcttccctggaaacaataattttaactatatatcaactaacctctgtatactgtttccttttttcattgtattttttaaattttattagttatctctcttacggcattctagtactaaagaggagagaccacggatacttagtatatggccttctgccaaaattctgacgcaggtttcaaagttaggacctcatttacatctgagtggaaactgctacttgaaggtaaaggctaattctattaaacctaatataaagcttaatttaaatctatttttaagtcagtgttggtctgtgtatcataaagagggcacagataggtaagggacagaaagctggaagagattaattaaaatagggaagaaacacttaagatctaccctcttggcaaatttcaagtatacaataccgtatcgttaactttagtcattaactttagtcgttaaagttatcgttaactttgatgttgtacattagggtctctagaaagtattcgtcttgcataactgaaaccttgtacctcttgaccaacatctgcccacttcccattgcccctagcccctggcaaccactattctactctctcctatgagtttgactattttagagttcatatataattgagattatacagtttttaatttacaatgtatgcttatatcaagttatacatctttaatatatgcaattttaaattgtcaattacacttcaacagagttggacaaaataaaaataagaaagacattgttattattagtaaaaagtaatacatttgtcatattccaaaaaataaaaaacagggaggtcaagtcatgaatggctacgtcagatgggctgggccttgactgcgttcgccacagaattggaaatttaagataaaggtgcactaaaacttaaggacaaatttaaagggccattctaattccgtattctgataacatgtcagaataggcaagattctgataacatgtcagaataggaaagcaaactttaaaggctcagagccagagatcaagccaaaattcagacagcaagagtcaggtatcctgacaagggagtaggggagctggtcagaattcagccaaggataagggaaaaggttatagaacacttgcagcttcttgctacattaggtgtccttatacctcttgccaaacatagaaactgggctaagtgaagctgctcccagaaaatgggagacattactggcattacttttattacaagatatatatagatattgagctgcaaatgaaggcccagtgacagctttggctgacccacaggcagttctggagttagtggagttagaatggccctttaaatttgtcctaagttgggctgagatggtcaggcctttataggcttccatcactggctgagggccaacctgggaaggagagtgaccttggcagctgtctacagcaaggcagtccctgcagggactgacagctgaagactctgccagaagcactcccagcagctgggacaagtccattactgtaatgggactctagcacatcgcagtgtccttaataccatataagtccttcttggagttataatctcgtcaaattttacttttctgtaaactgacagcttcacaatatctttagctcctgaaggaattcttttgatatctatttatcacatttgaattatttcattagctttttaaaatgttattaacattgactgaatttataagatttagaaataacatacaatgtaaattattctacagataactgccttaaatttagatggacaacatctttttgaaatcacaaatttagaaaaattggaaaatttgaaatgggcatcattcagcaataataatctcactaaaatggagggtctggaatcctgtattaacttggaagagctcacattagatggaaactgcatctcaaagatagaaggtaaggtacttaagaactttgaagtctcaaaatatgggatgtctaaacaacaaagcaaaaaataaccctgggaacagagtttctgaagaggaagatctctaggaaagttccaagtttttgtggcagggtattctaaatacctgtgtgaggtaatgcaattattagttagctagattggaccattctacaatgtatatatatacttcaaaacatcatgttgtacaagataaatggatacaatattatctgtcaaattaaaaaataaaagataaataaaaaattaaaacgagttcatacctattagtggaattcgtgactattttactttatataatgagcccgagcaagctttcacctcctgtgccttctctcccctctcctctgtgctagtttataatctgttaccaaacattagcacataccaactagttagtcattaatgtctgtaaagttgagtaaacaaatgaatgaggtatgcttttgaaaaagataaagcagactagttctgttttgaaaatataaaattgaggttatatttggaaatttgaatactttaacaagaaatgaaaattatactcactagaggttgaaaataaaatatactatatgtaacattttccatggatccacatacaagtccaattaagcagctttagtaatatcttaataataatgataccaatataatatattttatttgactgtttaaagttcagtattaaaacatatttttctgaaccagagagaataaaaaagacttttcctccctttccccttccaagcttcttagattcttcacttcatttggatttatgcttatctacagctaaaaatcatgagtttagagaacatgtcctagaatatatactactaagtcaagtattttctgactcctccccagctttattttattcttaccttcattagaaagaaattgaaagaagctttccatgacttgctaccaactttctcttattctccctctccatctactcaaaagagtaactaactcctagaaattaaaaaatatgtccacaagtgtgcactatttgattgaaaagagaaatatgtatatgtgtgtatacacacacacacacacacacacttatctgaataaagaatatttctgtatgtgcattttggtaacatggttgtgtttgtcaaggagggaaggtaagaattagaaatcacggctgggaaacagaatttacattttattcatttttgaattggattatttttatcatgtgtatatactgcatttttcataaaatagaagatttgatttcacaaaattatatatataaaagcaagtattaaatatatttaagaaagcatacataacatttgtgacatatttcattttaatggctgttaacaatatgtttctaaaactttcttgatcatgagaatcacttaggacacttattgaagatacagattcacaggcctctcttctgtagatttcagtagagtaaacctaggggtagctcaggcacctgtgtcttgacctatcactagtctcccattcccatacaactggatattagttttgctttgtacatacaattaaaaaccctatttccttttcatttccttccataaacctattaaacagaagaatcttccaatctatatttttcttacacctatattttggagaagatagctacccctctaaactttaacaggaatttctcctttttcttcagacatgggtaggttccatatccatttaatgatttttgctttgatggctttgatcctatcttgccctggattgattcaccttcaacattgtacagtcccacaataggaactgatgtgaaaggggagcacagataattatttgatactttccaaacattattccatttaatttcataactccttggaagtaaattttagtatgcccgttttatggatgaggaaattaaggctcagaggttacacaatttatgtatcgccacaaacctagtagtgatatatttgaagccaactaggattccgaagttcttgtctttcaactgcactgtcctggctatacttataaagtgcttgcagtacataatgtatgcaggagttagactggttccattttccaaacttccatcttagagtacttttaggcataagcaagtaaaagtaggctagattgttcattttaatacaaacgatgcactttccagaatgtggttccttacccttaatatttaaaaatgagggctggtgattattttgagctttgtgtagagctttttgttttcaaaatgatgaaaatcttaattaattacatcattttaaggttatttgaaagagaaattcaatattttcatgtaatgcctttccttaactcctaagaagaaggaatctacttagaaatccaaaatttgaatttaatgtttgagatggggcttatacacaagattatattcttccaaaacaaaggcttaaagcaatgatggttagtattacagaatctttaaagccatttgaacctagctatctaattacaataaaatgaccagccacttattttttaaattaaacctttagtgttatctgaatcttttcttgaatttgcttatttttctaggtatttccaagatgactaaattaactcgcctcagcataaataataatcttctcactggttgggaagagcatacctttgataacatgcttcatcttcactcgctttctcttgagaacaacagaatcacttcattgagtggtttacaaaaatcttttactcttgttgagttatacataagcaataactatattgctgtcaatcaggagatgcacaatttaaaggtaatcatctgggtagtaatttttttgttttttaacatgtattgtttctttatattatgaaagtaatgcatgtttattgcacagaatttggaaaatataaagaaaataaaaataagaataacaagtttattaaaatgtatttgcattcaatgttgtatacatacaaaaatatatctgtgtatacataatgtccccatttgctatccttctggggtaactttttttaaatactcaagtatgataaaccaaacctattccttagcattctcctgttctcagtacaattcgtgatgatctttcactgttctcttaccagtggctcaaacttggtcgcctttgctcagatttgcttttgttaattcccccaaaaaaccactaatttaaggctgttgtgtaataggatttactaaaggtttgaacaaaacagagggtttctatagcacagaacaggaatttacttcaaatgtcatgtgtgacttcattgtttctaaagctcagtggccattttctaacactatgggtcttacactggcctgtccttttgctgatacaatattactaggactttatctcctaccaaaaacttgtgtccatttcctgtcttttcttagttcagacttctccccattccgttcccccagtataattactacttctagagctagggaggcaacctaatcaacaacaccagcaacacaataagccatttcacattatgatgcacagtagttttactccctcttgttttcagtagttttactccctcttgttttcacctctcccctccatacctgccaagacccttccttcacaacaaaggcatatcaaagtgtcttgtctaataaaacagcacatttcccttaggatgaattccactaccctctcagaaagtagaagcacttcagtttcatcacttttcaaatagcagtgtcttttattcctgttatatctatatagacacatacatccatttattaagccattattccataaacaaagtatatttgtcttaaacatagtgaagttccctctaagcccttaccattaatagataatacatttggcactagtatcctaaaagggattctgattatataacatagaccattgaaatactgcacaaaatatacctaagtggtctgaaagggtaacccttgcacttaaaagtgcactgaggctgggcgtggtggcttatgtctataatttcagcactttgggaggccatggtgggagaatcacttgagcctaggagtttgaggctgcaatgagctatgatcagaccactgcactccagcctgagcaacagcacgagaccatgtctttaaaaaaaaaaaaaaaaaaagtatacttaaaggcactgaaatcccatggaatgatagataattccaatattaaaatttgaggatggctaacctcttactagagtgctttaaatatacatatagatgaatatatgtattttattacctagggtttatgcaacttggtcattctagacatgtgtgggaacatcattatatggaatcaagaaaactaccggttgtttgtaatatttcatcttccagaactgaaagctttggatgggataccaattgtaagttgatttatgactcacaacatttggtctaagctgcatagtcacatatttataggacatagtcattttgaacattgctttatcactagcattatagccaaatttactatacttattaaatctaggtctccaaagcttattttagatctgggttttttaattttgtcatctggtcaattcttaattgtctgaattgtggtggaaagggagggctgtgctgcttacaatagaacccacagaattcagtgcctaaaaggtaaagaacacaattttatgggacaggatagaaaattatgcactggggatttaccatcctcctaagcctaaaagcagctttctattttcagtgcaaatatagttgctaatattaataattaagaaaaatatatttgaaccaacatgtggtatgtcaacattactaagtaagctgtaaagaaaaatagacacagaccctaggactgaatgtgaaagcaacatttggatactggattctataacaagcaaattcatagggctcctgttttccacatagcagggtaaatgcatgacaaatgtgtaaagagtaaaaggtttatggtgtaatgttgcctagctcctgtcagaaaagaaaacacatcaaattttctagaaaattgaaagatagttcatgatcatttagtattctgaggtactccaagaagattactaatcctagcccttctgttttctggcccatcctcagaatgggtcactaaaactttctcactccaacacatacaaattctctagaaccttgtatactgtgacttatttatttgttagctttcactgaaaaatgttttttaaaatagtcctatgagaccagtactgcatttactctaaagatgttgttgaggatcttatctgtcctatctctctgtgccctcatttgaagggccacatgaaaaagcacttatagaaataaatgtagaaaaaacatttaccgctaaggaaaagttatgttctgctcactgacaatgagtgtattagtctgaaatctgctactaataaagacatacccaagactgggcaatttataaaggaaagaggtttaatggactcacagttccacatggctggggaggcctcacaatcatagtggaagacaaaggaagcgtaaagtcatgtcttacatggcagcaggcaagagagcatgtgcaaaggaactcccctttataaaaccatcagatctcatgagacttattcactatcgcgagaacagcgtaagaaaaacccacccccatgattcaattacctgccactgggtccctcccatgacgtggggattattacaattcaaggtgagatttgggtgtggacacagagccaaaccatatcattccaaccctggcccttcccaaatctcatgtcctcacatttcaaaaccaatcatgccttcccaatggtcccccaactcagttcagcattagttcaaaattccacagtccaaagtgtgagctgagacaagtcaagtccctcctgcctatgagcctgtaaaatcaaaagcaagttagttacttcctagagacaatgcgggtacaggcattgggtaaatacacccattccaaatgggagaaatgggccaaaacaaaggggctacaggccgcatgcaagcccaaaatccagtgaggcagcaaaatcttaaagctctgaaatgatctcctttgactccatgtctcacatccaggtcatgctaatgcaagaggcgggctcccacagccttaggcagctccactcctgtggctttgctggatacagcctccctcctggctgctttcacaggctggcattgagtgtctgtggcttttccaggtgcacggtgcaagctgtgggtggatctaccattctggggtctgaaagacagtggtccccccctcacagctccaataggcagtgccccagtggggactctgtgtgggggctccaaccccacatttctttttggcactgccctagcagagggcagcaggcttctgcctggacatctaggtgtttccatacaccctctgaaatctaggtggaggttcccaaacctcaattcttgacttctgtgtacccacaggaccaacaccatgtcaaagctgccaagtcttggggcttgcaccctctgaagccacagcttgagctatacattggccccttttagccatgactggagtgactgggacacagggtaccaagtccctaggctgcataaagtatgggggccctggaccactccaggaaacgtttttccctcctagacctccaggcctgtgatgggagtggctgctgtgaaggtctctgacatgccctggagacgttttccccattctcttggcgatttgcatttggcacctcgttacttatgcaaatttctgcagccagcttgaatttcttcccagaaaatgggtttttcttttctactgcatcatcaggctgcaaatttttcagacttttttgctttgcttcctcttgaacactttgccacttacaaatttttcaccagataccctaaatcatctctctcaagttcaaagtttcatagatctctagggcaggggaaaatgccaccaatctctttgcatagcaagagtgatctttactccagttcccaacaagttccttgtctccatctgagaccatctcagcctggaccttattgtctatatcactatcagcattttggtcaaagccattcaacaagtctctaggaagttacaaactttcccatttttcctattttcttctaagccctccaaactgttccaacctctgcctgttacccagttccaaagtcacttccacatttttgggtatctttacagcagcacattactctaccaataccaatttactgcattagtctgttctcatgctgccaataaagacatacatgagactgtgtaatttataaaggaaagaagtttaatggactcacagttccacatggctggggaggcctcacaatcatggcagatgaaggaagagcaaaggcaggtcttacatggtggcaggcaagacagcatgtgcacgggaactcccctttataaaaccatcagatctcatgagacttattcactatcacaagaacagcacaggaaaaacccacccccatgattcacttacctcccactgggtccctcccacaacacaagtggattattacaattcaagatgagactttggtggggacacagagccaatccatatcaatgagtattatttaattatattccttttcactttgcctaaaagctcaggaccaaatttatgaatcaataatataaaccctataggatcttacagtctttttgtcactaatcctagtgagcgtgattttcactatgtatggtttgcattttactatttgattatatgtgtttcctgtaagctgccacaaattatttgtggaatgaggcagaatataaatgtatgaattaataattggacatgaagactagactgaagaatttagattttaaatgcaaggtaatgggaatgcattggatttgaagggcaaaggaaaggaagaataaaggatttctacaaggcttgagtctatgccaataaaagacaccataacagaatatgaatataggaagaaaagcaatttgggggtgtaagatgattagtattagacattagttttatatgacagaagatcatctgactggagatgtcaagcaggcagctgaaatcacaggattaaatatgcatatgaaaatttactttacatatgtttggacttggaagtaatttgaagagagttaacagttaagaccaaaagcatatgcaatattgtctaaggaaagagagtagagaaagtaaagaaatcaaagtgaggctctaatactttcatttattaaacatatgtagaaaaagaagtcatgaaaagtgggtgcagaggtaggtagtacagtaatatataatgctagagtgtctgagatataaataaactttggaaatggcatagttcaaatcctttattttatgtatgaacacaaggaactctagagaagttacatgacttctttcaagttatgtgactctttaatggtaaatcatgggcacctgagcctcattctctgtccaacactctctagacacataattacattgtcttctttggagtgggagtagaaaccaagggagggcatagactaggaagacccaaagaacaatttgggtagttgtgttttcattttatcttttgttcctatgtacttttatttgtaaaagattattttttgcattaaggatacatattctcaatttagatatgaagttttaacagattagaaaaaaagaagggagtttgagtaaaagtagatcaaatgacttaccagtttaatttagatcaagttcaaaccatttgtctgaaatagattgtcaaacaatagccattgggccaaatgtgacctgccacctattttagtaaataaaactttattggaacacatccatgcctgtttgtttatatataatctgtgactgctttcacactgcagtggcaaaattaaatagcaacagagaagctattgttcccaaaggctaaaatactgactgactctttacaggaaaactgtagaaaacatttgtcagcccctgatttaggaggacattaatcatatgttgcttgtataattatgaaaaacacaaaagcaatggtatttctaaggcttaatatgtttttattttttatttattttttgtacaattttatttatttatttttttaattttattattattatactttaagttttagggtacatgtgcacaatgtgcaggtttgttacatatgtatacatgtgccatgttggtatgctgcacccattaactcgtcatttagcattaggtatatctcctaatgctatccctcccccctcccccaaggcttaatatgtttttaaaacttattttgagattttattattgaggattcaacaagagaagcagaactagtaagatagatatacatatagagatatctatgtctatatatagaaatatagatatcaaggaatatttaataattgaggggactgcctaaacaagtctgacatccataggacaggccatcaggaagggaagattatggacaggctgggagtcacagggatagatgaaagctgctgtccatgagtagattttcttcaggaaaattctttatttcaggaaacttacctctgcttttaaagccttgcaattgtttgaatcaggcccatccagattattcaagattatctccttattgcaagtcaacttgctaggagctttaattatgtctacaaaattctttcacagcaatacctacatcattggctaaaataactggggactctagcttcaaatattttgcagctctgttgttggtgcatacacgtttaggactgttatgtcttcttggtggactgaccgttttatcagtaggtaatgttctgtctgactctggtaatttcctttgcttcaaagtttactttatctgagattaatgaagccactcctgctttctcttgattaatgtttaggatatctttttccattcttttactttcaacctgcatatattattatattcgaagtgagtttcttgttgacaacatacagttggatcatgttcttttaccttttagctaatttttatcttttaattgatgaacgaagaccatttatatttactatagccaactgacctgttagggcttatgtctgccattttgttttcttgttttatatttgtttcctttgtttatctttcttctgttttcttttttgtgccttcctgtgagcttcctgaacacattttgaaattctatttttatttatccatagtgttttttagtgtatctcttcatatagttttttttagtggttgttctattacaatgcatatacataacttactatagtctgttagtgttgacattttaccagtttgagtaaagtgtagaaatgttactttccttccagtctatttcttctctcctgttaatatttgacttaaatattttcaccatatacattgagaaccaatgagacaatattatagttttttcacatcaactaatcaaagataatttagaaaaatcaagaaaagaagggaagtttattaatactctttccattgtgctttcctctttcctggcattccaagattccttttttttttctttccatttcaaaaactttctttagtcatttcttagggtagttctgctggtaacagtttgcttagttttccttcctatgagaatgtcttgctttctctttttatttctgaatgatattttctctggatatagaattctgggttgatgtttctctttcaccacttgaaaatgtcgtgccacattccctggtttccatagtttctgattagaaatctgctgtcacttacattgtttttcctttataggtaagatttaattcctctgtcactgttttcatgccttttttctctgtcattagtttttagaaatttgattctgattattattatgtgtccttgcatggatttgggttttttttcctgtctgaggtttgcttagcttcttacttagtttcttagtttatgtcttttgccagatttggaagatttttggttataacttcttcaaatactttttcagccccacattatttctcttctttttctatgaatccagtgatactaatattaaatcttttttatggttccacaaatacaggatatgcccatcttggtaaagtgaggctcatttatttatgggtctattttctctcttttgttcatactgggtaatgtctattgttctgtcttcaagttcagttattcttttctcttttctttccactctgctattgagtccctatccattgcatttatttgtttacagtatttttcaattctaaaattttcatttcattcttcatatcttctattgctttgctatcacttatttctttgctaagggtttctgtttttttcatttgtttcaagtatgtccataattgcttgttgagcatttttcctttgactgctttgaaatgcaattaaaaatatttgtgtcatttcaaagttggcatccgttgatcgtcttttcacattcaagttgagatgttcttggttcttggcataacatactttttattttattctggacatttggggtattatgtgggtcttatttaaatctattttagcaagcctcccttggcactataccagtgagaagacgaggaacaactttgttgctgtcaggtgggagatagaagttcaaattcctccatttggcttctgttgacaacctggaggtgtgttcttcattaactgctaggctagagttggagttcatgctccccaccaggcctccattgatttactctggctgggaaggaaggaactccttgttactattacccagaacccttcactgattcatcctggctgggagagacaagaatacctaattgatgctccacagataactcattattactgggtggaagtgggaatccaaactccccatgttatctacaataacacttgcatgcagggagtggggacatgtgttactgctgaggagggatgaaatacaggttcccactcagcaggtggatgatgaagaagtgccttgttacagatgagcactggtgaaagtctaagcagcccattctgcttttacttgtgggcatgaagttgggggccacagtttattctgtaggatttagcaggagtaggcttgttatcgtctaaagttttctgctgtgctaggcttcccctttcccgatcctttgattagagagagcaggctttttgtggactttgtcttgttatttccttactgtcatttctgggtttctagcttctctaacacccagtagagattatgaggcaaaaagaaaatccagggtgtcattcctcaggtcctgaggtacctacctggtctgccttcttctccacatctttcagtattcttatgtttggttttaatttctttaattaaaaaaaatttttagagacaggatctcactctgtcacccagactggaatccagtggcatgatcatagctcactgcagcctctgaactgtgctcaagacatcctctggcctcagcctcccacatagctacaactagaggcatgtgccactgtgcttgactaattcttttttgttttttgtagagacagggtctcactttgttgcccagcctcatcttgaactcctggactcaagcaatcctcccaccttggcctcccagtgtgctgggattataggcattagccaccttgccctgcctatgtttgtttcatatataatgcacaggatttagctctacttagtaggaggaatctggaaaaatgagtccactgaatttttacctaaaaccagagaactatgtaatttagtcatctgtaagacaggacatcattttctaaatatcttcatataggaaccatcagagactgacagtgcaaaagatttgtttggtggtagacttacttctgacatgattgcagaacgacaaggacattccaacttcaaacaaatgcaagaactaaattggacttcatcatctattaggtacaatcattttattatatgcctttttacattataattacattatgtaattattatcatttttctgaagcttacatttatacaacttatctaaatataatcaataattcataaaattatctactgtactgaaaagattcatgctaagtaatgagcattttttgagatggggtctcaaaaaatggctcactgcagcttcaaccttgcaggctcaatcgatcctccgactataggcacgcaccaccaagcatggctaattttctttgtattttttgtggagacagcatttatgccatgttgccaggctggtctccaatcatgggctcaagtggttcacctgcctcagtctcccaaagtgttgggatttcaggtgtgagccactgtgcccagcctaaaattaaaaattcctttgtatggcataaaagactctttattatctgtccattattatctcttgtagtccttttctttactgcccatgacacttcatacttcagaaattctgaaatattctagttactgaatctcaatcataagatgttctttcatatttgtttctccctttgtttttcctgttgcactgcctagaactcttttctgctaatttgctcgacaaatacctataactcctccaaatatcatctcaagatgtttctcctccatgctgtcatccttgactttttaaaatagattttatttccctgaaatgccattacattggtatgatagagatgctaactctatcacagcaattctcctctttatttttatttttctggctcccacttcttgggggctgaaacatttctttcatctttcttgtagcctttccaaacacatccgctgcacttaggaaatactaatggaaatatgttgactgaatgaatgacttattagtgggtaaaagtatgtcataattgtaacttcaagtttaggatttatttagagaactggttagggaaagggatgtagttttatgctcttctctgtcatggctcaaatgaagatatagctatagactgggaatcaagcattctgtttaattaccaaaatgttcacacagggtggaatgccataaaagtttccagaagataccacagaaactctattttcaaagaccttacctgcttttcctttcctttcctatccctaaccacttcctggtatttcagaaatgacctacttcaatatatatcatctgaagtttataacctgaaaagcttatgatttacaatatcaacttcactatgatttcataaacatatatgtgaatttataaagaaagtggaaatgtctcttttataagtttcttctataatagtgctatgtttatatggtaatagatgtgtttttttttaaagcaaccaaattctatgtcactttcttgcatatgtacccaacaaaaatgtatattcagccgattatttaaccaattcattttacattaaagtaattatttttatacttgtcaggtgagactttttaaatgtctttggtggctgtatgtgaaggaactcaccttttcctatattttcctgtcctattaaaataatagctgtatttactttgtctaaattcagaacagtggatttgattccagtcgaccaatttagaaatgtgtgtaatgtgaatctacagaacaatcatcttacctcattcagtggattaatctatctacctaatgtgaaggtaagtcattcacaaatttttctttctttcaaggtttccaatacaaattattctttgctttggattaaatggtatttccatgttattaaagtagataaattattcctaaattttctttgggttttttttttgttttttactaagcaagaaaaaactattaccttccaaagtgattttggtgtgacctcagttttatgtgattgtcacatatttagtaaattttcctctgtagtcagagatgggattgaaggcagatatggaaagaagcttcaaggttctttaaacggccttattgcctccgttattatttacttgactcaggcatctactaaggccttttaaacataggtaaatagctgtcttttcgactaaaaattatttcatccttgtcaggtttggagaaatcaggagaacagattgagaaagttgaggagttttctagggtctccatgtgaagtactgtaatttcccagaatgtcagattaaaaacacattgaaaactaaatctagattatttaggatataaacatttgttgttttagcactaatatattattaaattatgtggtatattccaagttttatccatacaatttttaataatttctaggatttctgattaataagatattctttctgtaggtcttatgccttaactataatcatattgaatcaatcatgcccagactaaagcctcagactcacttaaccagtagacaactactgtaccagaaagtgccttcaagtggctatggacagcaaggaatttcaaaaacaaacaggtagtattctttatttttatgattataactaattttggctgggaattttaaaagcagttaatcacattaatgatagcagtaacacattccagtacataaaatttagcttattgtaatacctattttatttaatagctacatgccaaaaataaacttcataataaaaaggtactcaaaatatttctctcattgtttattctctgccttctccatttcaaacctatattgtgaataaagggaaaaaaccaaaaaacaaacaaacaaaaggccttgtactgcatgtttaatgaccttgggtttcttttttaaaaattgaggtacaattcacataccataaaactcaccctgtatgtacaatttagcaatttttagtttcttcatcataaacatttttatcaactcacaaaggaaccctatacacagtagcatggacgtgggctttttttttagcatttgttttgcttttatttctaaattatttatctggtcacttaatgactcagcaccaatggaatagatactttatgcaaaaaatgacgacaaaccttctacctccttacacatttttgacagaacatatatatacatcatatataatacatcatatatatgatatatatattttataatgtgtatctccaaatcagaatgctttcattccagttttcccaataaagaacattccttgtgctttttattacctctatcgaagtataatttccttgcaacaaaattcaccaatgtaagtgtaaagtttaatgaattttgacaaatgtattcaatcataaaacctctaccacaatcaaaatacaaagtattcccattccagaaacttcctttgtaatctctcccccgacaccctggcacctggcaacaaccactgatctgctctctcgctataattttgcctttttccagaatttcatataattggaattatgtagtaagtagtttttgtgcctggctccttttacttagcataatgcttttgagagtcattcattttgttccaagtgtcagtaatttatttcattttattgccgaatagtattctattatatgtattatatgacaagttatttatgcatttatcattgatgaacattttggttgttcctaattttaggctattacgattaaagctactatgaacatttcatttatatacatacttttttggatcctattcatatttgatttttctaatagttttattgaagtggcagttaatgtatcatgtttacttatattaagtgtataattcaataattttactaaatttatagagttgtataatcatgactgcaatacaattttataacattttccatctcaccaaaaagatccttcatgtccatttacagtcaacttcctttcccacctctagtcccaaacaacctctaatctgttttctagaattgtattttctagacattgcatataaatggaactataaaatagacggtcttttgcctctggcttcttacactcagcatgatgttttcaaggttcattcacattatggcatgtgttagtagttccctcctttttattgctgaatatattggccatttcactgtatggatatgactgtatggatatgttacataatgtttattcatcagttgatggaaatttggattgtttctattttttggctggtttgactaacactgctttaaacatttgtgtacaaatatttgcatgcactcatattttcattatgtttattttgggtagatacctatgagtggaatggttgggtcatacagtaacttaacatttagctatttaagaaaccgctaaactgttttccaaaatggttgcaccatttttcattatcaccagtagcatgtgaagattttaattcctgcacatctttgccaatgcttgttattgcccatcttttatagtatagccattctaatacatttgaagtggtatctcattgtggttttaatttgcattttcctaatgacgaatagtgttgagcagtgtttcatatgcttattaatccttcatatatcttctttggtaaaatctctattcgaatctgaaacctaataaacctaattgtttaattaggttgcttggcttttcattattaagtgtctttatactgggggtaagccctttattaaaaaatgatttacagatattgtctctcaatctgtggcctctcttttcattttcttaaatgatgtctttgaagaaattttaattttgataaagtctaatttaccatcttttctcttacagattgcaatttaggtgttatatgtaataattctttgcctaacctaaggtcacaaagatgttctcttgttttctttaaaaagttttatgttttcactcttacatcgagtcctatggtctattttgagttaatgtttgtgtatgttgtgaggtaggagtgaggtctaaatctatttttgtatgtggatattcagttgtctgagcaccatttccttagaacactctcctttcctctattgaattgttttggcacctttgctaaaaatcagttaagcataaatgtaagagtttatttatgtactcagttctgttccattgatctgtatgtctgtccttttgtgccagtactagactggtttgattactgtggttttataaaaaattttaaaatcagtgatttaagctctccaactttgttcttttaaaagattgttttgaatattctagattctttgcatttctttataaattttaggataagatgtttattcgcagtgagtgggggggatgtcttctgggcttttgatagagattgtattaaatgaatctattgatcaatttgggagaattgccattttagtaatatggaatcttctaatccatacacatagaatatttctctatttatttagatctttgttaatttctctcagtaatgttttgtagttctctgtgtacagattttccactttttattaaatttatgctgaagtattttattcttttttatactttgtgaaaagaatttttgcttaatttcattttcagattatttattgctggtaggtagaaaattcagttgatttttgtacattaatcttttatcctgtgaccttgctaaactcctttattgcttcaagtagttttttggtggatcttttaggattttctaaatacaggatcatgtcatctgaaaataaagacagttttatttactcctttccaatctggatgcatttttttcttgcctgattgcattttctaatgcttttcattgtaacaccttatgtacttctttattctagaccattctttttaaagaataagtattattatataaaatataaacagactgtattaagcttaattctgatatattaataaatttatattttcttaacttcagtttatagtaaacacatactgaactgtctttttataatatagctggtttgaagttaagtttatggcctcaaacttacctatgtgtttcagagatataatgagcagtgaaaatttgcctccaataatgcacagtttagaagttcttcatttgggctacaatggaatttgtaatttgatccagctacaacttaacagactaagaaatttaaaattcctctttctacagggtgagtagaaacactgttactgtataagtctttatttttaaaaactgattttatcatcattctgttttgataagcaaatataagcatcagtatttactcaaacattcatagacaaaaatattttaataatcacaaattgatttttcttggttacttacattttttagaaaccatttttaaaggtcaatgcagtattctgagaatatatatagtattacgtcataatttacttgtatatcgtattcaacttaaaaaacaataaaaaaaacagtggataattcacaagtatttattaaacccagaattgtggtaagtactatgaaagatatggaagtactatgttattataattatgtatcattgaaatccttgatctaagtagcttaagatctatctgtggagatgtactgggccaaagatgaagttcagactatgtattactaacttaagtgcaatagaagttcagagagaagagaaattaaaagattagctcgtcggcatgtatagaactctttaaaggagtgatagaatctagattgaaggtgagcattactgagtgctttgcaagcagggggaggaggaaaagagtcacaggacatgactgtggtgtctatgggccaagacttgaaaagggaacaacctgatgagaacaaagaatatgcacttttctaagagagttataaatcctctaaacatgattaatttgataaataatcctcatttcaatatatgagatcattttatttagtttttgtttaaataagcctcattactttacagtaatttttttattatacttcaagttctgggatacatgtgcagaatgtgcaggtttgttacataggtatacatgtgccatggtggtttgctgcacccaacaacccatcatctacattaggtatttctcctaatgctttcccttcccttgtccccctactccctgacaggccccagtgtgtgatgttcccctccctgtgtccatgtgctctcactgttcaactcccacttatgagtgagaacatgcagtgtttggttttctgttcctgtgttagtttgctgagaatgatggtttccagcttcatccatgtcgccacaaaggacatgaactcattcttttttatggctgcatagtattccatggtgtatatgtgccacattttctttatccagtctaacatggatgggcatttaggttggttccaagtctttgctattgtgaatagtgctgcaataaacatatgtgtgcatgtgtctctatagcagaatgatttataatcctttgggtatatacccagtaatggggttgctgggtcaaacggtatttctggttctagatccttgaggaattgccacactgtcttccacaatgtttgaactaatttacactcccaccaacaattagtaatttttaaattttgtggaatagtgaaaaattgaggttgaaaatatagagccaggaccaaagtagggaaagccaagcagagaaatttgtacaggatgtagtcaacaatagataggagcttgaaactttgagaagtagcgtgagaaaaacacagggcttgggacattagtctaacaataatttttaatggcataggagaaaggcaggtatatccatcagtgggacatgtggggagacatcgaggtagttgatctgagtatggtaacttctcaaagacaggcctttctagaccatatttttaaaaatttgaatgcatctatcaaaagcacttgtgatttggatcaagaacctggagacctggccttaaaaacaagaaattcagcacaatgacagatctttttttaaaaaaataattattttagattcaaggggtacatgtgtatgtttgttaacatggtattatgtactagtgggaattgggctgctagtgtacccattgcccaaataatgaatatagtatccaataggtaatttttcaaccctcacccccctcccattctccccctttttgcggtgtacttattgttggagcgtacttactgtgtacttattgcttagctcccacgtgtaggtaagaacatgcagtatttgattttctgtttctgagttagctcactgaggataatggcctccagctccatccaggctgtggtagagggcatgatttcattcttttttatggctgtgacagattgatttttgtttttgtgtttttttcggttggttttttgtttttggttttttttttattttttattttattatttattattttttgagaaagggtctctctgtatcacccaggctggagtgcattggcacaatcatagctcactgcagcctcaacctccggagcccaagtaatcctcccacctcagcttcctgagtagctgggactataggcttgtgccaccatgcctggctaattttttaatttttctatcttttttttttgatacggggtctcaatttgttacccaggctggtctcagactcctggccttaagagatcctttcacctcagcctcccaaaatggtgggattacaggcgtgagccaccactccctgcccagatattttaaaagatacactgacatacaaaaaagcagaccacctaaccctggaaggtctatttcaatctaataatgtaatggaggagtatgttctgatgccatggcgagcatggcaaattagagtagggcagccttattcaggaagtgaggcagtttactctgacaataacagctgccatttatggagtcactaggcaaggtgtttgtctacatagattgtcatatttaatcttcacagcaactctacatggtaaggattgttacatatattttacaaaaaaaaaaaaaaagaaagtgacattcagtgtggtttaataatttgccaagtttgcaccagtgtgtgttatggtacaaagtcaaacctagatctatctacctccaaagcacatgcagtttctatccagcttgaatggtataataagggcatagactagagtgctggcagtgggagtggtaagaggtgaatccaaaaggcagtttaaaaggaataaatattaggacttagtggctaattagatgtaaaataaagagaaaaactgtcccagatgtttttataatttcattgggagattgggcaagaggaggtactaaagctaaagtcattgggaaatgttgctcatttgggagtagagaaagatcagcttgtgttataacaattttgatgcactaaaaatagaaactttttctagcaatagtactggaccacaagtcaggactagagatacattattttagaatgatcacaatggaagtgacaggagaagtcaaaaatgtatgtgcttacttaaaagtaagcacacagaaagatgaatgaaaggctgagaagagctttgaagacattctacccctttctctatatccttgtcagcatttatgattgcctgtcttttggataaaagccatttttactggggtgagatgatatctcatttgtatttcccttatgattagtaatgctgagcatttttccatatacctgttgaccatttgtatttcttcttttgagaaatgtctatgcagacctttttcctgttgagttgtttgggctccttatatattctggttattaatcccttgtcagatgggtagtttacaaatactttctcccattctgtaagctatctcttcacttcgttgattgtttcctttgctgttcaggagctttttagcttgatgcagtcccatttgtccatttttgctttggttgcctgtgcttttgaggtattacacaagaaatctttgtcaagtccattttgattttatttttgtatatgatgagagataggggtcaagtttcatttcttctgcatatggatatccagttttccacccaccatttattgaagagactgtcttttccccaatgtgtgttctcagcacctttgttaaaaatgagttgactgtaaatgtgtggatttatttctgagttctctattctgttcccttggtctatgtgtctgtctttatgccagttcttaagaggacactagccatattaaattaatgctcatcccaatgacctcatttaaccttaattatctttttaaagaccctttctccaaatacagtcacattttgaggtactggaggttaggattttcacatatgaattggagggggacacaattcagcacataataatcaaggagaatgaatattgactgaaatgtagtatggcatactagaaagataattgagcttaaaatgtaaaaggtctaagttaggcctgatactgccatttttatgtctttgagaaagccacttaatttctctgaccctcaattttctgattagaaaaaagagataaaatatttcccctgtagtattttgagactctaatagaaaatactgtacatataaaagcattttgtaaattggagagtcttcatataagttatcattaatatttatatagctattgatagctacaatagagagaaatcataggtttataaataaggtttagagttttgaagaattaaatgaactttgatgtgtttaatatgattgcagtgcaaaaatatgagaaagaacagcataattaatgtgtattcttctaacataatacaacaaattagtctattttaagaaataattaaatatactattgtaatatctattagagtactaatatactcaggaagcgtatcttctgcagcagtcttctatatctacttttgtcaataccgactattttaacacttaattaccaaacagacatattagatcaattcagtacattctgtacatcacatcctgatctttcaaattcacaaatgagaaattttagcaaatattattttatgatgatgctaccttcctgtaaattacatttcaatttctctttggaaataagtttcttgaatcctttacttcttttgacaaatcatctgattaaaaaatatttaaatgtaagtagatatcctttacttcaggaagtttgggctcacttgatatatcatgacttatctctttttaggtaatgaaatcagccaagttgaagggcttgacaacttagtagtccttcaagaattggtagtggaccataaccgcatccgatcatttaatgacagtgcttttgccaaaccaagttctttattggcacttcacttggaggaaaacagactacgagaactgggcaaattacaatctttggtaaaactagagaaactcttcctaggatataataaaatccaggtaacattattatttttttattatgggatttacaagctttagtttctctgagttctgagcataaagcttccaaacacatcaatgaaaatgttgctagtatattatttatcacctatataccatctatatttcaagtcatagaaatagtctgtgatgcagaaatatccaccctacttctagacttcagaactggacaaagcaacatgcacaagctcattaacaaagattagttctacgtgttctaaggctcttctcatcagtcctctctgagagttctcatttgttccttgactgctcttggtccaagttgtttctgaatctcgattccggacttcctttggccccttaaacttgtcatatgtacttgttctacccggcatttgaatcaactcctgataatggactttgacttggcttaatattttatctctcccc

SEQ ID NO: 315 - DNA, 3369 bp, Homo sapiens
atgtttttcttagggtatcctcgtatagttggattatcattatttcctaatttaacgagtcttaccattgttgctcaagatataaaagaaatttcagggttagagccttgtttacaacttaaagaactttggattgctgagtgctgcatagagaaaattgaaggtcttcaagaatgtagaaatttggaaaaactatatttatattttaataaaatttccaaaatagaaaatttagagaaattaatcaaattgaaggttctttggctgaaccacaatacaattaaaaatattgagggtttgcaaactttgaagaatttaaaagatctcaaccttgctggaaatctaataaatagcattggtcgatgtcttgactccaatgaacaactggaaagattaaacctttctggtaaccaaatatgttctttcaaggaactcacgaacttaaccaggctgccttgcttaaaggatttatgtctgaatgaccctcaatatacaaccaatccagtttgtcttctgtgtaattattccacacatgtattatatcatttgccttgccttcaaagatttgacacattggatgtgtcagcaaagcaaatcaaggaactggcagataccacagcaatgaaaaaaataatgtattataatatgcgtataaaaactcttcagaggcatcttaaagaagaccttgaaaaactgaatgatcaaaaatgcaaattacaaaagttgccagaagaacgagtaaaattattcagctttgtgaagaaaactttggaacgagaactggctgaactcaagggctcgggcaaagggcacagtgatggatccaataacagtaaagtaactgatcctgaaacactgaagagttgtgaaactgtcactgaagaaccaagtcttcaacagaagatattggccaaactaaatgccttgaatgaaagggtaacattctggaacaaaaaactagatgaaattgaagcaatttatcatattgaagtaaaacaaaagaagaaaagtcatggcttattgatcccacttttgttaattgagttagagactgtgggaaatttccattttgaagaaggcactcgatctgatgactggtttaatttctgctatgaattaattctgtcacgtttttgtgcctgggacttcagaacatacggtattacaggagtaaaagtaaaacgcatcattaaagttaacaaccgtattctgagactaaaattcgaagagaaatttcaaaagtttttggagaatgaagatatgcatgattcagagagctaccgaaggatgctggaatgccttttttatgtttttgatcctgaagtttcagtgaagaaaaagcatcttctacaaatacttgaaaaaggattcaaagacagtgaaacaagcaagctgcctctcaaaaaagaagccatcattgtttctaacagtctaagtataagtgagtgtcccagaattgaatttttacagcaaaagcacaaagatgagaagaaaatctctcttaagcatgagctcttcagacatggcatcctcctcattacaaaagttttccttggccagagtgttcaggcccatgaaaaagaatccatcagtcaatccaactatccaatggttaattcagtgttcattcctcggaaatatttactaaattctgtcatgggacaaagaaactgtgattgcagtgttcggcagtgcaagtggtttgtctttgatcatgaccttgttttgccggaatatgttgttgaatttgagtatattacaatggtcaaggcaccctctttattttctgtattcaacaatgttattctagaagaaagcaaaaaaaacccagaagtatcagtattttccaaggatttgaaatttgatgatgaagttataaaaatggagcccagaatcaaggcccgaccaaaactgattagtttggatgataaaacaatactttcccttgcaaagactagcgtttacagtcatattgtgagtctgaatctacatggaaacagcttgagtaaattgagagatctctccaagttaacaggacttcgaaaactaaacattagctttaatgaatttacctgtttagatgatgtataccacttgtataaccttgaatatttggatgcaagccataaccatgtgataacccttgagggatttagaggtctgatgaaactgaagcacttagacttgagctggaatcaactgaaaaaatctggcaatgaaataaatatgttatgcaaacacaccacaagccttctcactcttgatattcaacataatccatggcaaaagccagccacattgaggctgagtgttattggcagattaaagactcttacccatttaaatggagtcttcatttctgaagaagaagcaacagcagctatgaaatttattgcaggaacaaggattactcagttatctctcttacggcattctagtactaaagaggagagaccacggatacttagtatatggccttctgccaaaattctgacgcaggtttcaaagttaggacctcatttacatctgagtggaaactgctacttgaagataactgccttaaatttagatggacaacatctttttgaaatcacaaatttagaaaaattggaaaatttgaaatgggcatcattcagcaataataatctcactaaaatggagggtctggaatcctgtattaacttggaagagctcacattagatggaaactgcatctcaaagatagaaggtatttccaagatgactaaattaactcgcctcagcataaataataatcttctcactggttgggaagagcatacctttgataacatgcttcatcttcactcgctttctcttgagaacaacagaatcacttcattgagtggtttacaaaaatcttttactcttgttgagttatacataagcaataactatattgctgtcaatcaggagatgcacaatttaaagggtttatgcaacttggtcattctagacatgtgtgggaacatcattatatggaatcaagaaaactaccggttgtttgtaatatttcatcttccagaactgaaagctttggatgggataccaattgaaccatcagagactgacagtgcaaaagatttgtttggtggtagacttacttctgacatgattgcagaacgacaaggacattccaacttcaaacaaatgcaagaactaaattggacttcatcatctattagaacagtggatttgattccagtcgaccaatttagaaatgtgtgtaatgtgaatctacagaacaatcatcttacctcattcagtggattaatctatctacctaatgtgaaggtaagtcattcacaaatttttctttctttcaaggtttccaatacaaattattctttg

SEQ ID NO: 316 - protein, 1119 aa, Homo sapiens
MFFLGYPRIVGLSLFPNLTSLTIVAQDIKEISGLEPCLQLKELWIAECCIEKIEGLQECRNLEKLYLYFNKISKIENLEKLIKLKVLWLNHNTIKNIEGLQTLKNLKDLNLAGNLINSIGRCLDSNEQLERLNLSGNQICSFKELTNLTRLPCLKDLCLNDPQYTTNPVCLLCNYSTHVLYHLPCLQRFDTLDVSAKQIKELADTTAMKKIMYYNMRIKTLQRHLKEDLEKLNDQKCKLQKLPEERVKLFSFVKKTLERELAELKGSGKGHSDGSNNSKVTDPETLKSCETVTEEPSLQQKILAKLNALNERVTFWNKKLDEIEAIYHIEVKQKKKSHGLLIPLLLIELETVGNFHFEEGTRSDDWFNFCYELILSRFCAWDFRTYGITGVKVKRIIKVNNRILRLKFEEKFQKFLENEDMHDSESYRRMLECLFYVFDPEVSVKKKHLLQIKGFKDSETSKLPLKKEAIIVSNSLSISECPRIEFLQQKHKDEKKISLKHELFRHGILLITKVFLGQSVQAHEKESISQSNYPMVNSVFIPRKYLLNSVMGQRNCDCSVRQCKWFVFDHDLVLPEYVVEFEYITMVKAPSLFSVFNNVIESKKNPEVSVFSKDLKFDDEVIKMEPRIKARPKLISLDDKTILSLAKTSVYSHIVSLNLHGNSLSKLRDLSKLTGLRKLNISFNEFTCLDDVYHLYNLEYLDASHNHVITLEGFRGLMKLKHLDLSWNQLKKSGNEINMLCKHTTSLLTLDIQHNPWQKPATLRLSVIGRLKTLTHLNGVFISEEEATAAMKFIAGTRITQLSLLRHSSTKEERPRILSIWPSAKILTQVSKLGPHLHLSGNCYLKITALNLDGQHLFEITNLEKLENLKWASFSNNNLTKMEGLESCINLEELTLDGNCISKIEGISKMTKLTRLSINNNLLTGWEEHTFDNMLHLHSLSLENNRITSLSGLQKSFTLVELYISNNYIAVNQEMHNLKGLCNLVILDMCGNIIIWNQENYRLFVIFHLPELKALDGIPIEPSETDSAKDLFGGRLTSDMIAERQGHSNFKQMQELNWTSSSIRTVDLIPVDQFRNVCNVNLQNNHLTSFSGLIYLPNVKVSHSQIFLSFKVSNTNYSL

SEQ ID NO: 317 - DNA, 60202 bp, Mus musculus
  misc_feature (1)...(60202): n = A,T,C or G
tctctgagggtgcgtttccatccatgaccccaatgtggagactccctcaactgagctggaggagtattactctggaacagcacacactggctgacttcaggccatgtgtgctttaggaaaacttaggcgtcaaacctggctcccttgcctggagcggaagagccttcctagaagtggcaatcccacccctcccccaccagagcccacacactagtccagtcactacccctgcgcaccttccaacacttctctccaccacaccagggctgatgagtgtcagaggaaatgccacctcatggcagaaaacctggggggactttcctcccttccataaacatttactgaaataacttttctgctgatggttgttttaagacctgcagcagaaaaggagacctgcgaactagtcccactgtaacttttgttcagccagatctgtgtcatcggtgtgggccctaattttgtccttgatgaaatacagcacctttccctcgctttcacgggctaggttttgctctctgtgaggtatgactgataattctgtctctgctctctatctgcctggtggagattgttaaaagccagaacccaggctggtttctgcctctgcagggatttaaaaggaattgtttctaggccctgcccgttgtttatttaaatgtgtgtcaagtgccaatcagatgtttggcacgtgtttggcattctggaagttttaaatttttaacctgttgttgttcccctcccccgcccccctcacctctacatcagggctgagcagatgagggtggtggtgaatatgaaataagaaacagttttaaatcgaagaccatcagatattggggggggggggtagagcttctcaactctggagagggaggagtcaccacgagcctgacggatctgagaaggctacatagcaacagggtctctgttggatgacacatcatatcaatgggtataatgggaatgatgatttcaatggtcgaactcagttgtcaatctatgagatctagaactgcctgggagatggatcttttgatatgccggtgggagaatgtcttgattaggttgaggtcagaagactcacccacagtgggcagcaccactccctaggctgagctgctgggctgggtaacaaggaaaaaggaagccaagaaccagcattcattactttcttcttcctgactgcagatgcaatgtgaccaggtgcttcaagttcctgctgccttgacttccccactgtgatggactgtacccttgttctatagtcaatataaactctgtctctctaaagttgcttttatcagggtatttttcaagtaacaaaagaaaaggatttaagataatgatggtgttcatgaaaatagcaacatgtatttatcttttagcacatggcagatattgatgtggttctagaccctcattttacaaatgaggaaagtcaggtccagctgacttattctccgcctttctctttctttcttttttttaaaaggatctcaggtggcccagtttgtcttctaactcagtaagtagccaaggctggccttgaactccttatcttcttgactctattgcatgagagctaggattacaggtatgaaccatcaagtctggtactaggttcagacttcttaccttaaagtctggctggtctgcagcaacgccttcttggcatgggaagcagggataaaggaggaaggaagaatgggagaagttttagtatctcaagaagcatcattgtatggggctaagtggaaacattattagactccctcttgtaaaaacaccctgacatttcttcatggtacatctctaagattttaatgtgctctacagatctaagcaaatgccccggactcatctcagatcctatttcttgttatactcaattgtcttccttcctccctcccttcctccctnnnnnnnnnnnnnnnnnnnnnnnnnnnnnnnnnnnnnnnnnnnttttgagacaaggtcttactatgtggcccatgttgacctggaactcatcctgtatccccagctgatttggaactcacccttgccctgcctcagcctggtgggtgccaggattgcagatgggtgccatcatccccagcttacatgtctcttcctatttgctccatgctgcatgatccacacgctctgcgtctgggtcctagtggaatctgtttattcactcacttatttagtcaatattgtttgctgataacttatgacttgaaagtaggactgaaacatcatttttgatctgacagagtttaaagaatctacctacaatcttactattgccttcaggaatcctttaccttgggcccgagtcatttattgcctcaatgctataaataatacttatcttcctggaccctcgaggctgtttttttcttgttgttgtttgtttgcttgcttgcttttgtgtgtattctgttgtttgttttatgtatttatgtatttatgtatgtatgtatgtatgtatgtatgtatgtatgtatgtatgtatgtatttagagacagggtctctatagcctagacagtgtctagcttgacctccaactttgagttcctagttgtcctgcctccaactcttgagtgttaggactataggcgggccaatacacgtggtttctgtggtgctgggaatcaaatccagggcattgtgtgtggtagccaagcactctaccatctggccatgccccagtctctgggctgtcactctttatgggccagaagaaacgatatattttttttttcttttactttgcttcttttataagggtggtgtcagcgcctagcagatattcaaatgaggttgtctgactaaattatttaaatgactaacttaactgtgcaccatgagaaagcagttccaacggtcctgcatttagtctcacatcaggggttgagtggcatttgatggacgagcaggaatagaagccgatgaagttccatggagccaattcagcattcctttcaaagcttgactttggatatcttctgcctagatccttcagcattctttagtggtgagtgccaaaaaaaaaaaaaaaaaaaaaaaaaaaaaacccgacccaagctatgcttatcaagacaggaagaggaggttgatttcatcactacggtgtctgaaggctgatcctgaacgtgcacgtgacacgttagactcggtgactcaaacggtgaactcgtggctagttctcttcttaattgtctgaactttcttttcctctatatgctagtttctttctgggtcagactcttttcatgtgataggaaaatggccaccaatagctgcaatctgtatgtctacaatgatagtttaaggaaacctctctttcttagtatcacttaatcaaatcttagggaagactggctatttgggtcatggacctatccctgaaccgatctccacagtttgggacatgaactcccgcaactggactactcaggtcataccctgaatttgttattctggggttgctctaatcacagtccctcaaagacacaatttgagggaggagagatttgttttggcccctggtttcagagtttcacacagtgtgtgagaaaggctgttcacatcccaacagctctgcaaacattgggacaggaagtaggcagggataacacactcccaaggactcatccccagtcatttcctccagctagccccgtgatagcactaccagctaaggatcaagaaataaaaatgtgagctggtggagggtggggagggggggaaatgaacataattccataacattagcgatatacaatagatggatattgagattagctttacttatattgaggtttgcgaaaacaaacatcttgagaatctaggcaggtcgtataaatgactgaaagcagatggaactgtgtcatgccaagggagcagtccctagtggtttcaacccatcccttgccataagagtgtgcatgctgtggtagatattacttggtcactaatgtctggttctcttctctatagactttgaaatcaagaatcaccttactttggccaaagaaatgaagctaaagtgatggtctccaagaggagatgactgggctgctgctgcctggtctactctcctctcttagttatggtggccttgctgacatgaaggtacaataccatgccctcacttgtaggatggctgccctgggcaatcacttagatccatagttgtcttgtgtgagggttgtgtaacaggtccctcccggatggaaacactatatcctgcagggaagctctttaagcaggaaggtaaacaactcaaaggagcatcaggaagtccctgaaactgaccagattcactaggcccctccctgccagaagtaagaaatacaagccctccgaggagaacagaacagagcagcaaagaaaactgagaccaccttgccttgaagaagcaatcagtggagctgcctggaagaggattagaccaacttaagtgcctggagagaaccctctgcaacctgctaagctgcctgcaggctgtgcaatgtactccgggttcccagcttttgtgagctgtcacccatcatccatgctggggtgggctgtagtgatgcagttgtctttgagtcatctctgctcctgtgagtaacctcaataaaactcatggtttaccaagttggactctgacggtatctattttggtctgtcactgcttctctatctggggtgggaagatctgtgtattgcatctccccaggagaagttttgtcctacagtggtgaggagtaaccttttttgtgtgtgtgttaagttggtggattggtagatgcttgctacttatgtaactagcctgctttcactcctggatatacacccaagttgcctggctttgagtttttccttgtgagctttagcttttcatggccgagccatctctccagccttggcttgctttttaaatgttttggtttttcaagacaggatttctctgtgtagccctggctgtcctggaacttgctctgtagaccaggatggcctcgaactcacagagagccacctgcctctgtctctgagtgttgggattaaaggcacatgccaccagctgggtttggttttgccttttaaagagaagggagaaatacagagttgagtgaaatatttgatacacagagaagagaatgagaaaagggaggcagaagaagaagagggggaacagaaagaataggattaactcaagggagttttaactgagaaaacaatgcccaccaggatgtgagcagcctgcagccccatcccacgcccagggttctggaccaaacaaaaatgaaaacaggagaaagcaagctagacacaacatggctcccctctctgcttcctgatgtgcccagatgtgcccagactctgcagccaccatgcctccctcaccaagatgaatgccatcccctgagccatgaggcatagtaaccctttcctgcctgacagatatttatcacagcaaggagaaacagtaataaaggccgatgcagacgctcagatatggctacacaggacctctgacgtacagggatttcatacaccgtctttcagctttatggtggtgttaacacgccttcataaaaaccactctgtttgtccccttcagtccagccgttgataaattgcatgaagtatgaacacgtggaatacgtttgtgttagaactctttgcccgggtgtagaccaaaatatgtgttttgagcaaagctgagggtagactgggccaagccctggtgttttgtaaaaccagatggattaagtgcatctttgacttacggaatcttcagctcatggtgggtttgccacggtgtaactccatcctatgtgaagaagcatcagcggattgtaattttggtgggcgcagtttgaatggagactgaagcagggatcctgcctggactctcacagtgcctacggttcctgtcagggactctcctctcagctaccgttgaccttgctgctcattactggcttttaattcattcttcctaactagatgggaggtgggaccgcatctttgtgcacgtcacaggttacaggcatatgacagatgtatcggtaaatactgagtgtaaagatgagccaactggttgattagtcagaactgttgcttcctcttttcacgttggagggacagttctggggaattgctttaccacatcaatccacctttccctctgcaaagagcttgggactcattaatgtccattaacttttaaaacgggataatccaaataagagataacagctaatgtatgtttatctacttagctagagcctcacgtataccaggctggcctaaaactcactatgtggctgtggtggttggaataggtttggtccccagagactcttgtgtttgaaggcttgacccatgcatggggactggcactattaggaggtgtggccttgttggagtaggtgtggccttgttgggggaagtttggcaatgtaggggcaggctctgaggtctcctatgctcaagctctgcccagtgtggaatccagtctcctcctggctgccttcagatgaagagatagatctctcagctcctccaatcccatgtctgcttgcatgctgccatgatgataacgaactgaacctctgaaaccctaagacagccccaatgaaatatttgcttttgtaataagagttgccttctctgtggtattgccttaaagcagttagaacccaaactaaggcagtgatggaggatgaccttgaactccagatcctcctgcccataccactaaaacactgaccttatagatgcacttcacaatgccaagtgtgtgctggtgctgggactttgtgtgttaggaagccctctactaactaggctttatcttcaccccaacacccactccattgaggaggactttacttgctaggaaataataggacatcgaaacccaggttactgcagacaagccagttgacagattcctttagatgaattctctcgaggtaaggaggatataaccggcctggctagattcagggactgtgtcaccattattccattggtgtcttgatttctctctatttttatttgcattaatattattatcagtaaacatctttgctcaggtggcatcttccagtttcaggtcagcttctggtagcctctctccctggccaatccagagaactcctagtttcctccactttatctggggtctgtggttatctctgaatcagcccgatggcccatggatgtgcatcttattggaaacttgtttgtttgtttgttttatttagttgcaagagacaagacacctaattcagactgccttagcctagaccactgtttccctaaaagcctaaggtagatcagttgcatcaggagattgcatgttcgcccaaaggagccagttgtggccttccctccagccttgcccagaaacaatgactacacagagaggtctggtaggaaacggtgtggctaggagggaggtctgagctgtatttgtatagtatccaatataaaactgggtaacaactatatcaaaatgggggagcctaatagatattggggagatgaaagggaataaagaccccttagtgcccccacgccaatgcctttcctgtagcatatttattttgtggaggaagtagtgacccagaaggacacctgtcacctagccatgatccaaagtaggccttggagaagagcagctttaaggacacattttcaattattaggccctgcacagagatgagtttagcgttttcaaagtcccaccagaggacacacagaggtttaatgctccacctgttccctgttttctttcccataaacatcagatcctcatcttaggggagaagcatcatgtgagccagttccccagtctccagctttgatctctgtgtgttgtaaaggtgctgctggcttttctgggatggagaatcatgtcctacaggagtgattcacattaccacggagtttgtggcgtgtgttcctttggagtctttcttttttttcctttcatcagtgttgtgagggaagtgggctgatggtggcggggaagatggacagtgatgtcattagggcttggtctgtttctttccattcacctgttcccccctgcaggaagacttacgggtaaaatggagaccgattcctccctgcaggcaggcacgcacgtggagacctgcttgtccggcttggcgcgtggacttccttccctccctgttggtctttcgatctcagcatttgtactctatgaagacttgaactttttctttcacttcctttcttctatgggtgatgacctgctgtctctctgagaaggaggccgaaggtcactgagtgtcaacattgccactcctttctgatttaagaggaaagagggcgggggtctgcccccccccccaagggtatggagacctgtgtgtgtctatgtgtgtgtgcaaatagttctcagatgccacacgcatttctgcctgagacaatccgcctttgagggactgtcatattttatctagagtgttctttactatctacttctgtagcagggtgggaagagagcacggaagctggccctggagtccttgaggaagaaggcctttggaggtttggcagaagtcaggtaggctcactgctgcgtcctgtcaaagggaggcaaaagcctgctggagttgggcaaagagccctggctcaaactgggccagccactgacaacaacggtggcctcagggtgcagttccacttcaggagctcgttcattcaccgcatggcttcaggacgtcaggacgctttggtggacagtgggtagggattaaggcttccaaacgccttaaacccccgcccatgctcctccgcggaaaaacaaaacaagcttgcgagatcctgcagcgtccgaagacaccactgcgcggaaccctcgctctggatttgggggagagcgcaccggacggaggaggatggttcggcgtgggctgagctggaaggggttctctgctcatccggccgccgccttcgcgtcgctgcctcccgggctgtgtagcattttgggggtggcggccgcaaggccgagcaggggatgcgcttacataaccgctcgccgtgtcctgctgcctcgcgctctcgggagccgcgggcggggcgcgccgccggaccgcaatgctgccgggaccagcgcggcggggcccgggccggccccgcaggcggaggagcgcgagcatcggcgggaggagggcgccggcggcgggggagnnnnnnnnnnnnnnnnnnnnnnnnnnnnnnnnnnnnnnnnnnnnnnnnnnnnnnnnnnnnnnnnnnnnnnnnnnnnnnnnnnnnnnnnnnnnnnnnnnttccgcattcccgacccctccccgccactcagggcccgctatatagccggggctgatgcaacccgtcccgccgcccgccacagcctgcgggagggacactcggcggccgcgacggggggcgctggcggcagcggacgctgcagcggcggcggcggggctggcgccgcggcggctcccgggccgggacgggcctgggcagcgggcggcagcagcgcggagtgggcaccgcgcctgcagcagggttctgggcccggggccgccgcctccgccagcggcttctgcacggtgggttcacggaggggggaggcggggctgcgggcacctggggtggcctcccccggagtagctaccgctggggctcccgccaccccagggccggaatactctatcggatggctgcagccgctgcccaccggtggttccccggctgggcaggacagtcctgtctgtggccgggacagcggggcgctccctccttgctttccttccccagtgctcttgctgggaggctgtgcacagacggaggagagggcggggtgagcgggagaaaactgtgccggggactgcgggggactcaagggggcatgcacgccccagacctgctgacaggtcgcgcctcagcctcttccgtagctctctttgcaagacctggaggggagggtattgagaaaggcatctaaccaacagggcttccttcgcttaagagcattgctgcggcgggctctggctgggttaggagggaaccacggggcagtccccagttcccttgggatcccgtcaggcacatcaggttatataagaaggtaagcaggcttctttaggtaacctgcccagtttagaaggcactcttcctcccctcttatccaagaaggctaggcttcctggacccttggagcggcagaaacaggctttgcctgggtatctggaggagctggcaggcctgggatgccttgactcatttgcagaaatggatgggccatttggggatagaggtggagaggcgggtgcaagaggggaatcaatcgactatttgagtcagctccccctagaagattgtccagcccttatgtgttggagtggcaccttccaggggactgtggcacaggtctgtgtattgttaaatcttgggccactctacccaggatcttaattcaggcagcatgggaaacaggctctgtaccacagctgggtacctgcctgtcccaaaggctgttagcaactgtcttcctcgtccctcgacctcacccccaagtctcccccaccctccagggtttaaaaatcaccccctcttgctttccctgcttttcagcaaatctggctggcttcagcttggatggcgggcttatcttcccgtgcaggtttctagggaagagtttaaccggggatcaggtgtgagcagggttctttacagaaacctgaggtccggggatagaaacaactattctcctgcctctaaggcgccagaggtttcactttgcctaaagtagtagggaggatggatttctcaaagactcctctgtttcccttccacgttggcttcagttcagaggagctctagaatcttcctgaagagctgggtgctgggtggtttgaaaggttgcaggaaggactggggggagatggcctctgaaccttttgtcaataaattggttacagtaatctccaaggagacaggtctatcatggtgacggtgtcacttaggaaaagcttcggtacatgtgtcccttactcatccactgacgccttttgcactaccagggaactcccctgtcttcctggtctgtttatctttcccacctgttgacaagatatcctttcccactctttcagcttgcagaactgggcctcctgggcctcggtttgttatggaggtacaactggtattacaattcatagccctgcttcctcatcccatctccctcgctccctcttcctaattatcccccccaccccccacacacacacacactggaaaggaagaagccagcacaaaccctagagcacagacgctaggctggcctgccttgtatccattcagcactaactctccctggtccctctaaccctccagggctggggataactcttattcttttcttcagcagaacgcagactttctttccacgggaatgagttatgtttgagacccaaagtgggaagaagagaaaaggagtaaccgtgcaggggtttgtgtgcgaatacccctgcaggcagggggagagcaacaggcatgctatttttttccattttcctttaattaaggctctgtggaggtgtgtttgaaaacagagggtctcctatgcctttgaggagggtgagaacactcttttggctgcgtcccgggccatatgcaacgtatggtggccaatgaaactgggcctggctctttctgttgcttgtcttggcagtcagcttcatggcttgtgttaccagctctctgagctcaggggctgccaagctcagtgtgcctgtgtatgtgtgttcgtgtgtgcctctgtgtgtgtgtggtttgtcgagactcagcagagacaagtgtctcagtgacctaggcttggaatttctagtctttctttgcgctcactggtggtgggaggcctggctagagcccaccattaagtctgattgctggatatagtccatggggtttagtggtagggcttcacttccagaacttggctagccagtgcctcttttctcatagaccaaagccaccatacaccatggtgtctataccctgcattgtccctgctgagggaaggcaggagaggacagatagagaagtaggtcctcttggttcccaataaaactctctgggttctggcagaaatgatttggtgtcatttattaagcctctagcagaggatagagctgtatttgcaggcagagctctgtagaagacatctttctggtctccagggaagacctagagtctgttgggaaatagttgtggcttcttccatggctgggagtgctctgagagaccattcctgccagcttgctgtggcttctcctgaccccagctgcctctctccatcttctcatgactacccagggagtaacccctaatgaccagccaaagaggtaaaagatactggcactctgttttttttgatcagggccagagccctagccagtcagtggtgcccgtggctaatagcctgtgccgctgtagtctggcctgcaagtttcaggacacttaaggagaaacagaggaagctgcaggtgccaggcttcctttctgtcctgtggtagccagtcgtgactcagcacctttcctttctattcctgtagtttactgtcaacatatgctatggctctgcgttcttgggaagagggagagcagggagccctaagaggagactgtttgtgactagggaaagggagaccattgttagatagaagtgatctagaggttgtcttgaggggtcatctagtcctggcatgtccgcaggaaggaagaccgctaccctgacttccctgctcatcaagtgaaaggttgttccacgttctttgcaagagctaagtactttgattttctctacggccttacaaggcagatgatgtcactgccactttatagtggcgaaagtgatacataagagaggtcatagaactgtcttgggtcacacagagagcaaagtttcacactcagccatccggctccattgactcccgctcgcctgcctgtagagttcagggcagccttgcaagagcggcatttgtggtttgggtggctgtcattcaggcgctttctctactctttgctcctcgccctctgggtcgctttggtttcagaggctgtttggcagtgctgttcagatcacaggaagtaaatgaccgcctgattttgtggctccaaggaacagctcggtgtcacttgctagctgtgtgactttgaccaaattccctaacccctccatgtctaactccctctgagattcctaacttttggtcctgcactctgcgggtctctggcttgccaccttctgttccccttccgtggggtcctgtgctacatctcctccctcctgggaatcttccagaatccagctcccaagtcttcctgattctgggtcattgctccctgctggtggctttggttccactcttgctcctgggattctaggcaccctcactcattgcctgctctgtctcagacctgaagtcatcttgcacaccatttgcacaccatcctctatgccggtccaggctgcctgcttatctggagagccctgtcttcggggccccgggagttcacattttcttctgatgttctagaagttaggtcctggggtcctctcctgtcatctttttaagtgtttttgttattctggatgaagatgctggtgtttaaggggagacctttacgaatgtagcttgccaaagtaagaccgcgacctacaggcatacagaaagacgtggggtgttgtattgcttcccatatgataaatgagccatatgataaatgctccccatatgataaatgagaccaggggcggggaatgagtaaatcaccaccacctttattctctcgagtggaagaattctttgtgttcgtctctgcactgggtatttttggcctggaaaagctttgtggctttttattctgcacatccaacgcagcacccaactgtgttcttccaagtccccgaggaagtcagcacagacatataaatactagatacttcctccacgtctttgtccttgagcccatctggcccgttttcttcaagctagctttcagggcgctgtgccttctctcctgttaacttactccacacatcgcaggagggtccctgggactttctgagccttttctaaaagtcttcttcatactgggctttccgatctcccaggttttcttttttgctttgttttttgtttttttgtttttttgttttctgttcttttaaaaattattttggttttgcatacagagtagtgggggcggggtaccttgatatgtacctggctttctttctttccttggctcacttccaatttacccaaacaatttcccaaatcaccaaagtcactttggcagtattgggatgatcctagctactcataaagacatggagggtgtctgtctgtactgcagacctcctaggccccgaagggaaggaaatggcaggtcttcctcagcacccagtgtgtacttctctctctctctaaatcgcttccgtctggaacaagcatcgtggagggtgacttggcctcatgtcatctttcctgtgtcttccttgaagcaggaagttcctcctcactgtagagttccatctccagtcccttttgctcttatagatttcctaaatcacgtggaactgacttgtattctaaaacaccaaagctgccctttagccttagatagcaaaccggtggctttgcagttaataggtttccattttgccgccttgtcttggccctcctccctccccccttgcctccccagacagctgggatgacttctccctggtgaatgtcagctgcggctgtctcccaggaatggcatgtattaaggactttgtggtttgcctctgagcagttaggggcttccaagtagggggaggagagactcctttttgcttctacaaagaaagcctggtgcgtggatctcttgaccaaaacttgtctttgggatggattcataggggaatgacaagaatttgggggacagctcttcctggggggggggggttcttcagtagcagagaagtcattattcgttgcgagcttttgttagtgtctcatgtatatcatctgtatgaacataaacagaagctgcaaacagagcctgctgttcctggaacagaatgaagtctggcttccgtctcgaagggatggctgaggcaagagagcatcaaagcccttgggactttctctctcttgggctcttcggttggactgaatggcctggaggggaaactatagcttgacagagaacctggaagattctatcccctaaatactaaagcccgttgctatgagtttgctgttgttcatctatctacatattcactcattctacaaggctttcttcattgttctttggctgccagaaatgatagttaggcagggggttgcctgtaacaagcagccacggcctgttaccaggtggtagaatagctgagcactggtctagcgttgccataaagaaggaggacttggtatctgccccttccctgttcttttagggagatggcagcctgcctagggagtgggggttcctcatgactcctccaactctaccttctgaacaccacagtcttgctggatgccatcttgggcctagggtgtaggagaggcctcagaactgttttacatgggctcctcctactcaagctgctttggagctattagggggaactacttagaattgggtctccataagacacagagtgccctagactgactcctacatgtatgtttgtcactaggagacactgccttctactgaaggtgttaacacctcctgaaccccctgaggggaaatgataagagtcagggtcctaaaactagggaccagagtctagtcttgattctgccctcatctggctgtgtgaccttgggtaaatcacttagtgtctctgagcttcagtctcattgtgcaaaacgaggatgtggtttagcccagttcagggccttcttcatctctgagactgtcatgttcaatgtgtatcgtctcaggtccttttctgaggtggcccagggcacattgggttctcagggggtgggacgagcaggtgtgttgtacccagggagccaagggaccaaatgttgagagtatattagtggagctcagataaaagagcctgggtacaaataccaacctggacacaaaggcttgactctgtgtagatgatttgatggacagaggccatgtggggaaggggagaatgaccagcccaccatctatgtggttcttaacctgtgggtcgtgactcttccagagtcaaacaacccttgcacaagggtcatataccaatcagtatttacattacagttcataacagtaccaaaattcaggttatgaagcagcaacaaagatgattttatggttggtcgagcatgatgaactgtgttgaagggtcgaccactggaaggttgagaaccactgacttaaagtaacattcattggagtctgtagtttgaaggtgccaatcacttgtgttttttaagaaacaagcccaagggacttgagagtctcagcaattaagagcactggcttctcttccagaggacctgggtttgaatcctagcatctccatggtagctcacaattgtcagtaaccagtcccaagggatctgacactttcttctggccttcaagggcactacgcccacacagtgcacagacacacatgcaggcaagacactttttgcacatcaagtaaaatgaaaaataaaaataagtaagcccaacatgtaaggaagcagaagtgaagtggagactgggctttgtattcatgactatatggcttcccaagggaccctcgtcttcattctagatatgagaaattgaatggggacagggtgggtcactccctagggtcacttacagatgaggatagatagccccagacatcatggccttatgagtacttgaactctgacagccgagaagtctggcccagcagatgtccatctcccctgtcctcatctgtgtgtcctctacagaaagacagatgggtgtggaaggatagaacacatgcatgttcatcaactgcccatcaaccttgatgtctaagactgtaaagagtggattttatgggcttgggcagactggtggggaaaaggagaaattatttccctcacagcactggaatgcatgaatggtttttgttttagaatgttccatacaagaatgctttgaggctttgaacctctgacagctatgttgtagtgcctgttggctcctgatagctgttcagtaattggatgaatggaagaattataagtggatggatgggtgggctggagggctagatatatctgcatttattgacagacttctgtcctatctgtgcctggaaatgacagtctcgcccgtgaaagtccctcagtaaagggaaggaagaaataagaattccctgggcgttcattcccattttgcttctatcttgtcttgtatggggctctgagaatagagaattcttgaagaaattttctggtggtgcctggagaaagtacatgcaaattaattccgtcttctttaccccagactcttccttgggcttcagacacattcacagtcacctttaactttgcttaggttcatcttgtattcatgctgtcttaacaagtgtgcagagtaggatgtgtgatttgaggggaggcaccattccagaccaaaaatagctgcctcttgaacaggtgtgaaggtgcttcagattccatggcgatgctctgtctctctggaggctgccactgctgtttaaatccagcccaccagctttaactgtgcagcatcccaaggagatctttctatcttgcaaggaattctggccaggtctggtgaggtgggtgggaagactacaggcagtctggggccaagccagggcccgataaatgttgcccacagttgggttaaggatgcctttaggaagggccaactctcctgcaagccagagatggatggccttagtgtgagtcaattggctgagtttcctagcatcacagggacttggagcttacaggcaggaagagaaaggaatcggggaaccctgatgagagaaaggatgggccctggcagctcacagagccttttctcctcaagctaaccttcccatcctgctttctccagcccctccaggccggcctgccactcctcctgctatgatgcctgggcagatcccagacccttcagtgaccgcaggctctctgccagggctcggccccctcaccggacttcccagctctgctctgaccacagaggagctgaaatacgctgacatccgcaacattggggcgatgattgcgcccttgcacttcctggaggtgaaactgggcaagaggccccaacccgtgaagagtgaggtgagacctttgttctccagacaaagcccacgtttccaggtttggttctaagcacacctaggacccttggtcttgctcctcaacctgtggtctgagaatgagcaggagagacaggggctcaggctccaccccagacacgcgctgacagaacctgtatttttaccaagctctgggggattcatgcatgcattcaagtttgagctgccactgggtcagggcaggaggcttaccctgcctgtgggtctaggaagtgagaggagagtgataattctgagcatgaatactatctcagcagtctctctagggtgctgggaggaccaacagaggtcatggagatgtgcatgtattttgaaaagcataggggggattgagttctttataaaaattgatgccactggccatatcacgtcttctgcccttttgggccctccatctggagctgaacaagggaacttaggaaaaggatggtgtggtcatcctttcctctttatcgtgcaaagatgggcatggtttcagtccccagcatcatctgcatgaagcggggtcttgcagaggactgattaatggagcgccccatcctcagttcttctgcacctgctgctctcaggattgccctgtgtcagggcagctgttccccagtgactagtgagaggcagcagtgcctagcatgggtaccagtataccagagaggtgtatgcctcaggcatttacccagagctggtgatttgttcagaggcctatcctggttagggcttatgcagagctatttcttccaaaaatctaccacctggaaggagccaggggtaggaggtagaggaagctggagtgggctggaagtagggagtggctgtgtgtgtgtgtgtgtgtgtgtgtgtgtgtgtgtgtgtgtgtgtgtgtgttcctgcttggagagtgtgttcacgtgcagaggtgagcctcaatggagactcagcttggaagtctggaagctatggaggcgggggcttctggatgaagaaggtgtcaggctgcacactgtgtgtgtttactgatctttgttctcctgttccctctctcagtgtgagtaccatgcacacagcagagaaagagcttctgggggcgtgccctgttagcaagctttctctctgcacgatggatttggctttcagatgtgtttggtttggcctgcttggtgttttaaaagcaacccaaaccaatatttcacttaaaattttcaacaacaacaacaaaaaattggcaaatcaggtcacacgctgcttcggccaggcatcacaaaggccaggcaaatggagagagtcgtttcacgctttcgatttttgggagttcctttgtatagacacagttatcctggaactcactctatagaccagggtcttgaactcacagagatcctcctgcctttgcccacccgcaaccctcccaccccgagcgcaggattaaaggcctgcggcaccatcatctggctcactcttatttatcgtagaccctccctagaacaccgactctgcttttcctttggagtcacctatcctcccactagctgtctttatgcccctctgcagcacagtccctgctggagcctctggacttgaaaggcacagattaaagacatcagaggtgtctactaatgtgagaattgactattcctccgagttcactttcagtggatactgtgctattagtcgcacttctgcagtggaagaccttgtcttttggcccctctgctccacaccttcctaggccagttgtctgaaagtggtccttctggatggttctgctaggagagccgctaactgaacttggaagccatgatgagcctctgatgagcgttcttccagccgggtgtgacctgccgggggaacagagctttccatttgtcatcgtccccaaaggccttggaggagcttcctttttttgggtaggaaaaagcccattttggagttgggtatttttacatttcacagccacccccagcctggtggcatatgccctgtacctgatagtgacgctctgtcctcacaggcacccacagacatgtaccatccaggccgtgaagatgacaagctgtttttagggcgtatttgcatgtcccctctctcactgtcaggctgcagcagtgtgggggcagagaggcagttggacctgctgagttgtgcctcccggagggaaggccagctgtgcctctaaaacgtacttacagatgttccctaggtcacacagaggggtttgaagccctttcttggatctggtggagaacctcgcagctgacaaagctctgcggaagactgatttgtgtatggcaaacagcctttgtgggttttcccactggcatttgaggctcatacaactttgttcactgatgctaaggcaccaacttacatccatggaccaggctaggccctgtgcggagttcttgccacacttgacctttcatcccttagctagtcatgtgaccatgtcctccccataagagaacaggaatttgaggtctaggatggaggtgatgtgacttaactcatgccgttgagcaagggcatgccaggtcctggacatggtggctaagctatggtcatcacaactccatctcccttgccctgaattaggccgcaggcatagtctttctgtgaggctccccgcttgcctcacaggcccctgtcctccctttgctctctgtgcgcgcgcgcgcgcgcgcgtgtgtgtgtgtgtgtgtgtgtgtgtgtgtgtgtgtgtgtgtgtgtaggtgccatcatgtcgtggcttgtgttcagaggtcagagggcagcctcaggagtaagtcttccacattccatcttgaaacagggtctctgttgtttctctctgtgtgtgtcaggctcgctggttcggaagcttgggacgtttctctcatctccacctctcacctccccacaggagctatagatgctcaggctgcgagtccagattttacaagagttgcagggattccatctcagaccctcagacctgtacaaaatgcttttacccactgagcctgctccccagccctgaagtcacgattgctattttcgctatagctatataatagctataatataactatagtaggtgagatctaagctgagtgacggccagcatcacccactatagttgcttaggagaacaaataagcaatgtgactttggaacttaggggtttaaccttacacagtgctgtccccttgtcccgtgtttctgccaggcttcaaactaagccctctcttggcctgaggatgccagatacacaaagtcctaaaacactcatccattcaaagaggacagttcagtagtggcagtgtctcagggtcccaaggaagcatgggccaagccctgtgcatgtagctctgtcagaattggcttttgcatccaccttgcaaagactagtgctctcttggaccacatccaaacacacacagaatttcagttagagaaagtcaaagggacctaagcaactggttgtggattctggagcattttgtgctgatgttgccagtattagcaggtgacatgatattagaatggtttgtctgcagtccgtccactaagtatctcgtgcatgctaaacattgtgttatgcaccgaggctccaactatcaacaaaggagatagacgcctccctcttgtggagctatttattgctgtgagcatcaccaaaaaggaaggctgttaattcagagtataaaaggccaggtagtggtcagtcatcctcatctggtgaaatgctgtatgctcattctgatgactggccagggactctaggaacatcccgtcctgttgagagggtgtgtgtgtgtgtgtgtgtgtgtgtgtgtgtgtgtgtgtgtgtgtatgtgtgtgtgtgtatggtgtgtatgtgtgtgtatgtgtgtgtgtgtgtgtatggtgtgtgtgtgtatgtatgtgtgtgtgtgtatggtgtgtgtgtgtatgtgtgtatgtgtgtgtgtgtatgtgtgtgtgtgtatgtgtgtatgtgtgtgtgtgtatgtgtgtgtgtgtgtatgtgtgtgtgtgtatgtgtgtgtgtgtgtgtgtgtgtatgtgtgtttagagacaatgcttctttctgtctctcccttcttttcaaggcaacgttgctttctacaagtctgtagattttttccctcttattttatgtcctgcatcctctgatggggctaccccttggccagctagtcccttctgacctggaaatgtcaccctgctacagtgggcagatgtggcctggtggcctagaatgcatttttagttgggagggaagaaggccagatgcctctcccttgcacactcagccatatacaaagcactcacttcccctagctggacgggaccctccagccagtccctgactgctccgcaaggtctggaggaagcttaaagattcagaaggagtctggtctgggtgatctagaacaggggctgtaaaccatcgaccaggctggcctggaggtcagcctgtagactgagtcttgttagtgctgtgaactatctaaacagnnnnnnnnnnnnnnnnnnnnnnnnnnnnnnnnnnnnnnnnnnnnnnnnnnnnnnnnnnnnnnnnnnnnnnnnnnnnnnnnnnnnnnnnnnnnnnnnnnnnnnnnnnnnnnnnnnnnnnnnnnnnnnnnnnnnnnnnnnnnnnnnnnnnnnnnnnnnnnnnnnnnnnnnnnnnnnnnnnnnnnnnnnnnnnnnnnnnnnnnnnnnnnnnnnnnnnnnnnnnnnnnnnnnnnnnnnnnnnnnnnnnnnnnnnnnnnnnnnnnnnnnnnnnnnnnnnnnnnnnnnnnnnnnnnnnnnnnnnnnnnnnnnnnnnnnnnnnnnnnnnnnnnnnnnnnnnnnnnnnnnnnnnnnnnnnnnnnnnnnnnnnnnnnnnnnnnnnnnnnnnnnnnnnncttcctttattttgatatttttttcctaagctgtggcctctccctatggagtccaggcttgaaatcatgaacctcctctcatctcaacctgggcattgacattttagtgactcccctcaatgtatgcaagcatctgtgtctgtatctgtgtgtatatctctctgtatatgtagctgtgtgtgtctgtatctctgtgtctgtatctgtgtgtatatctctctatatatgtagctgtgtgtgtctgtatatctgtgtctgtatctgtgtgtatatatctgtgtacagtatgtatctgtatgtatgtgtgtgtatctgtgtatctgtatgtgcaactgtatctgtgtgtgtcagtatcaatgtgtgtgtgtgtgtgtgtgtgtgtgtgtgtgttgaatgggttgcaataattaggtttatcttttaaagtagccctctctggccactccaggctgacacccttctatgcacaggcacttttcatgtcaccatgtcccattctgcactgccccctgtgctgtctggtatgagcccacttcccactgttctcttagcagcagagttgtgagtgtgtgctgtgggttcgggtgcaggctctgatcttacaccccttctgtctggtcctttagcttctcacagggattgtgtgtccctcaccttactggctgcacatgaactgcgttgattttctctgtgctctgtcttcaaagtcttactttccctgggttttctatttcttaagttaaatgggggtggggtgggggaagagaaagtgaagagagagagagaatttaaatcaaaataactattctcaaacttggtcgatcgtccatatagcttgggaggcttttcctaagctccagtttnnnnnnnnnnnnnnnnnnnnnnnnnnnnnnnnnnnnnnnnnnnnnnnnnnnnnnnnnnnnnnnnnnnnnnnnnnnnnnnnnnnnnnnnnnnnnnnnnnnnnnnnnnnncaatacctgcaacatcccagtcctccctactccagtgctggctctgccccctcattactttcacagcaggagaggaaatctgctattggcagatctcacctggtgactccccaccatctccaggaccctgtgggatatctcaaagctttctcccattggatggaggtgaattggagtctgtgggcccagggtgacctcagaagacagttcactctccagcacaagtggtcctctagggagtattcacaaaaggaaccaagacataatccttctagcctgagcatacgaagttgcgtcaagccagctctgtgctgggtaaacattggccccagcctgctagtgtttttagaggcttgaaacgtaaaggcagtccgctgacatttttagcaagccttgcataattggtttttaatttgtggctctttggaataggcttggccttcttcccctggctcagggtttcagtttttttttttttttttttttttttggtctcatacttggttggcagagaaagccagtctgtcctttctgggaacagacactcccagttcatctttaaatcttgaatttccactttggctccatagttttgtgagcatgttttcagaagtagttgactatttaaaatgtgggtatgtacgtgtgtgcttgtatgtaagcaggtacacgtgcgcaagtgtgagtgtgcagaggccaggggataccctcagatgtcatgtttccttagtcctgagccatgttggtttttgagaccaagtttcttgttgagctgtagcctcaactgcggctaggttggctgaccagtgagctcacggatcttccttctcctcctgacactggaattacgagcatgcgccggtgtgcacaactttttgggtatgctatgggggtcagtctcaggtcctcgtgacaagcaggcactttagtgacagagctgtatccccacagccccagaaattttgtttttaagcaattaaattttgtttttaagcaattaaattagttggcctctgtggtcctgagtctaagctgatatgaaaccctgagcatgtacaaggctcgtggagtttttgtttttgtttttcctgaaaatggtgttggggatcgagggtacctcagtggtaggctgctcagggtcctgggttcagcccttagtacaaacacactggtcatagctgctgtcctgacacacagtcctttggagagatgatggaagatgtggacgaatctgaattttcttggaaaaaagtcagatgcttttgaaaagtttgtggtggtggtttgtgtggtttcttcacgccttaagagggtcatggttacgtcattctcttagggtttatatgatccagtgaattaatgtaggtaacgatttcccaggatgcctggcatacaatagaagacacgcagccgagtgttgattgtgcaagttcatttattgattaagtttgtctcatggactctcatttcctcgaaagtcctttgtccctgaaagtcctgaacagcctgaatgtttggaggtgcccaggagtcaagggagcagacactctcctggcttcctaaccacaggggctactcctgggatctgggaagaacacttgacttgagtttatgcgtctgggtttaaaatggaatgccactcctttccagtgttactttgggcaagttgagcggtaggtagattgaggaaacagtctcagaaatactaatacgaaggttaagtgagacactatacaaagacggccttgaccgcagaatgcactgtgctgggggggtgacctctcctgggaatgaatgcgtttgctctgactcaactgtcctggcggtgctggtctcatgatgtgtggagcttgtgacctgagccgcagggaagcagcagaccttcctgtttctggctgttcctgccctaaagatgcagctggagtctgtcatcttcaggcactgtgggtgaagaggtgctctagccctttgccacctgtgtgtcctctcatctttcttcctgtggtgttcaggtcactgctggatgcctactggccactgttttttgttttgttttgttttaaagcagccttgtaaagtggccttcatccctttcgctgtccccatatccatggcaacatggatgctaggctgggaaactgacttatttcccaggtaaaattcatcaggctggacagcatggagccactcaaggctctctcccctcacagctcccacagagcaacttggcttcaggttggagcggaaatccctggaaagctgtgtggatggattaagatggggctctgtgggcacccggagtgggtttagctgccctggatagctgctgttctctgcagcgtcagtgtcccgccttattgagcccagggtgtgggcttgctgtgggtggtaggacctctacagccttcttccctgcctgccacccaacctcagtgaagaacctagttctgtggcaacggtgcagcgaagcccacgttgctgctgctgctgctgctgctcaaggggctgagctctagtgaggtcatgagacacccttagaggtgaaaatgaagaatgtggtgagaaacaaattgtcaacaagagagggaaaagcgaccaggatctgattggtgctgctggcgctaaggaggagatgacagcccaagtacatttgtcacagtgactggggtctccggttataagtctgtcttattcaccagcctggactcattttacacttaaataccaacaagatttttttctaaaaggaaatgataattatatcattagaagaagcaggatacacatttttatgtccttggactagttagtagtttcttagacacaaacacacacacacacacacacacacatgctcccctacacacaggcacatacacacatgagcatgtgggcacacacacttacacctcagtattacaaagaagcaacccagtttaaagaaatgaacagggacctcaatgtatgtttcttccaagaacatttttattttcgatttttaaaaccgtttgaactggaacataggaacaattggtttcattatgacatctgcccacatccgtatcattttcttcgctcacatccctatggtcaccttgtgctgttcccttctggtggctccgtcctttcccctctgtccagacccctttaccttttatatcatatttatgtttaaattgagattttttttgcatgtgaaagaacacatgtgatattagtcaaagaaaaaattaaatggctaatcaatccatgaagatgcttgacaactgaacctgtgaacaagtgacctgtcacatcacacccagtcatcatgaagtggctgtcatttaaaagatattacaaggatgcagagcaatggccatcagaggcttctattgggagtataaatggtgcctcctttttagagaacagtctagtactttctaacagactgataacagttaccagaagaccggaggtcctactcattagaaaagaaaccacgtggggctgggggaaccactaggtaggtaaagcagaattcccaggcagggtggaggctgcttgtaatcccagcactggggaggcagacctgagatcatcagagccaaggagctagctagactatccagagtcggtgagctctgtgttcagtgggagactcggcctcaatgaaaggagtggagagcgattcagaagacgtctaacgtccactttgtgcctcctcacacgcatgcacactcttgagcaaaccgtaccatgtagcaaaatgccgttggaccacaaaaaggctgagggcctgtacatcggtgtactgaggagaagcagccagtcacacagaatcaaatgtcccgtgatgtgtgctgctcagaatagtcaagtagacctagaactgttctcctggtcaccttagggaggcaggaggaatggggaggagctgtggcagggctggggctttggggcgtcacaggaagggagtataaaatgtataaaaatgtaaaaatgtataaagttggctatggttatgcaagttacacaactcaggctgacgagagctactaatcacatcgcttggtgcattagttctatatgtgaactttatctcaataatacaaattggaaagcacggtgtctgtctcacagggttctgcggaggtgtcatataacagttctcccagcatgcagcagtgtttgggaatccacagccatggctgttaaatcctccgctggggctggggagagctaagtggtgcttgttttgcagagggcccaagttcgattcccagcatctacatggtggctcacagtcgttcctagtccctgttccaggggatccaacaggcacacacacggtgcatgcaggcaaaacatccgtgcacataataaataggtagatagattagatagattagatagattagatagattagatagattagatagatagatagatagatagatagatagatagatagataggtagataggtagataggtagatagatagataaagacaatcaaataaataataggataattaaataaatcctcctttggcgccaacagcagtcaaaaaaagcccagggctggtgaaggtcaatattccctcctccctttctgttgctaatggctgtctgagaacagccagcattgacaggagtttgtgcagaattccaggaagtggggtatgctgggtgactgctgctaactctggctacatagctggatccctagttctgattcatgcagtctgagtgggactgacaggtgctcccaactggtgtctattggttgaaaccctcatcacggtagaaagcagccgggtctctgtgtgtagggcaggaggcttcctgaatattgcccttgatggtcagtaagctgcttttgcagacgtcagcattcatctgctccaacctcagtgtgagggaggtgagaggaccatccgttgtcagaggatggagactcaaaaagaccaagccaccagccagagcctcacttgtaagcatgactttatcctacttaaaagaaagctgtcttttggtattcagatctgtctatacagttacctaacctaaggatttctggtgccagggcgttctgctttgcatacatttcagaataagccttcctcagacttgtctttagcggatgaatacccagagaggcaggcgggcatcgctttttgttgttgttgttttgttttgttatctgtccacccatctgcttagctccctagctcccagcccactgatctgctggtgtaagttcagagtccaacccttaccacttcctcagctaactctgagtttgatactttgtatcaatcaaagcatcccttgccattcccactgattacgaggattgatacagttaggggcccttgaatgaaattctgccgttttctagatttagcttttggggtgtcaaacagacaaagggcctttgttgctaaaaccgtcctggaatccattggttggtactgctgctcatcactgcgtggtccacaggccagtgtgctggcagccaggagtaggcttgaagtgccatcctgggttccttccaagctgactttgcaaagggtggggtccagggctccttcaggcaataagccatcaggatttggatgctgttaggtgaatttgtcttccagccctgcctggcaagttcctatctgagaaatgactgacaagaatctaaaaccacatttttcttctaatttacttccagcttcttgcaaggatccgcctgccctcgggcacttagtaaagcatgcgcgacctggatctgtccaaccagaggttggtctgactcagcagttccaaaccacttatttccatgtcctgagatctctggcctgacatcagcagcgtccacaccctgaggactttacccaattcattaagctggctcctttggttgttataagagggacaatcagataaactgttcccatgtccaaggagcctgcatttgctgtggctgcccttgagttcttaactgttctaggactagggaggagtcactccatccctctggcagggacagttgtctgccatacttcatctgtgttagtacccaggcccttccttgcccatctgaactgtcactctaatggtataatccttctgtcctccaggccaggcatccctgactgtgacctcatttgaccttgtcacgtgcagaattttttattagccagcgttcagttccctcgatggagaggtggccgttctgctgagtgatttgtcagtgatctatttcttgcgcctgagagaaattggctgaaatctgtggtttggctgcacggcctgcatacagatgaaacggaactgccttggtggagaataattaagctcgggaccttgtttttcaccttcacagtgaaagacaaatgacttccaaaggctttaatgggttggcacttgaaaagggcgactttggccaactcaggctttctgagcctccctgttcataaatattctatgcagtgcctgagcctccctcgaatggtatagggagtcagtgcgtgagagtttatccctcagtttgtaggccagtggcttccagacatttcacaccacacaccattgttcagagaatccatttttggaactggggagatagttcaatcaatagagtgcttgttgcataagcatggagacctgaatccgatctccggcaccaatttaaaagccagatgtagtggcacaggcctctgatcccagggctgaggcggcagagactggagggtccttcctcagtggtcagccagtctagacaagcttcaggttttgtaagaggctctgcctattaataaataggtaggtaggtaggtagatagatagatgatagattagatagataaggtaatgagctattgaggacgacactcaatctcaacttctggcctgcacacgtgtgcgcatgtacacacacaaacacacacacaaagtttcaactagattattaacttttgagaagaaaagtgttttttccgtgccatttgttttcggtttcgtttgcgtttggtggataatgagaatcatctcatctttggaagtaattgtccactgggggaaaaaatagattgatgggcctagagatggggaagcagaccaccccccctccttaaaccataagtgtggaccaagcctgaaatagtctcattccaacaaaaatctccgctctccaagcactcttcctttataggactcgagggccagctctcctctcccgtattagcactggtccctgtctgtgccaagatggctgttgctgggtctcctctgtgctcttccctggtagccatgtttgctctttccctaacagtgaatgggtgtcaccctgctcagcctggtttcgcaggctttgttccaaacacaatgctgtcttttcttagccttggaaacaggctgttctgagtggcttttttcgaaaatggcccttccctcctgtgtgtgctgtaaatcagcccacgcctagcagccttttgttttacaggttctctcttgacccagaggagatttttcccccctgtgggtagaaggccaaggacattacttcttggtgaggggtagtgagaagatacgttagtttaatgggtgagtctgtggcactggtctaacaactcataaaggtctactaatttgtaaaaaaaaaaaaatatatatatatatatatatatatatatatatatatatatgcttcttcccagaagacagtagccttctgcctggcctgccagtgtcttgcccgggacctgggcatgcttgcttcccactctgagcatgcggcctcatgacgcatggagatatagaattttaggggtttgtctgttccataacctcaggctggggtttagtgtccagccctgtgttcctctctactgttgccagcaggtacaggcaccagctgtgcctgggcactggggaattcctgcagggcatctggtgcctccatcagcactcccacagagccttctcccagggttgccaaggggccctgagggagcaaggcctggtgcttgtgtttgtcatggttacatcctggttctgcagacagcaaagtgcagtagcaaaacactggagcaggagtcaggcaggaatctcgggatcttgtacgagggccatagggctggtccccgtcactgtaaagggggagaaagttcccaggttcctgtctagattgaatttcctctccttttagcaaatgttgagcagtctactgggcacacaaaaagccaacaagacacaggctttgtcttcatgaaactcccagtgttgtggagagagcctcggagggtagaaagcagcacagcagggccaagggtgagttcagcattgaatgggagctctgtgcagagggatgcttctcagcctgagggctcagagtcaaggaggacttcctgatggagatgatatttcctgccccccacccccccaacgtaagctagaacatgggatgggaagaccaaaaggaggctcccagcagagtccggcagggtccggggacagatggtacagtggcttggaccaaggtaagaaacaattcaaggtgacacagagcagtcaagtagccgaagaggatgagcccagcaatgtcctttgaacttatcctctaggacccagttcctgtccccaagtgtgaacctggaaccagcctcagtttcccatctgtacactctaggagtaggtttagatgtttgccatttagtctgtgaaaatagaaacgtcttaaaagagatctagggaatgtcggtgtgcttcctgccatgtgaccattcctccaaaggacagaatgaatgagcccaaggaggatcacagaggaggtctagcccagtcagccacgacagaggcagccggccggcacagaatcggctagtttccctgcctggagagctacaagcgacttttccctctgcagactgtggtttgtccactggtaaatgagaccctctcgggatcccttgagggtgctcttgaaggtcagagagaagtgggaactcttgcactggctaagtgttttcatgatccaaagaggcgagctgttgtatagagttgacggtggtgatgagaccccaggtgtctggtggcagactccactggaggccatgcaacccacagatttgtttgtttgtttggtttggttcaagtggtattcggttcaaagtggaattagttggctgcattacagatggttgtgagccaccatgtggttgctgggaattgaactcaggacctctggaagagcagtcagtgctcttaaccactgactgagccatctctccagctcgaggttttacttcttaaaaaaattatttctttatttttatttaatgcacattggtgttttgcttgcatgtatgtctgtgtgagggtgtcaggtcccctggaactggagacagttttattcccatgtaggtgctgggaattgaacccatgtcttctagaggagcagtcagtgctcttaaccactataccatctctccatctccaagaggttttacgtttaaaaatcttcagctagtcttgaaaacttgaaagattgggcagcattgaaactgcttggctgatgctaatctgggcatccctctgcagacacagccctgtccagtccctctcccttattaaccattaattagccagcctagctcttaaaggtggcttcggtttgcagcccctgtcttcaacagccattcatgtgaacttgctcatgaggccctgcccagaagcaacagagattcagcccttagccacttgcactagatggacttggctagggaagaaaggtggccaagggcaggtagttttcagtactcaacctttggaagtgctttggagggccagaggcttggccctggaaggctttagggagaccctgggatttcctcatccctgcaggagaggtggtcggcccagcctagctggcctgggctggccaaagtttcacctctggactatcctactttgttggtagggagcaggggaacccctggctcagtgcagccggtttatgtggggaatgtctggtatgtttgtcatttgggtgtttactttccagggtgctcacggtccctggtgttgaaatgtggcttctctgtgttggaggggagtcttgtgggcctggctagtggctctaggcccagagcccagcaaggctcttcccccaacactgcacccctctctctcttttccatgccaaggaggaagattgaatgtgcctctagagcatgtacggtgtcttagttaccttgtcacatgcaaaaaaaagatgcttgcagagcctttcctaagctccaggctctgggctggatggagctgtgtccttccaaacccactctgtgccatccctgtgcactgaggagtcaagattcagagaggccacgtgactcgcccagaagcccacagcctttctaacagagcatctgatctccgaccctgaagaatggtacagcttgtgccatgcccacatgcccaggcctggctctctctgtgtgtgctaccgtcctaagacccttcagattctagcaatactgttagcttctgcttttcactgtgcccctgcctgcctgctcttaatgttcctttactgctttatccatgttaccttctgtgagagagtcagtgtatttcctgcaccttgggttaaacgtgctgttttctttcttgttctcaaaaaaaaaaagagagagagagagagagagagagtctcacgtagcctaagctgaccttggcctagatactgtagccagcgatgactgaatttctgatccccctgcctccactttacaggtgtgcaccaccacgaccagttcatgcagtgctgagggtgaagctggggcccttctgcaccataggcaaacactgtcactgagtcatagccccagccttcaagagacataattttgaaactgctttggaaatgtcagatgtcacacgtcagtctcatgtggccaccgaggcaaagtgtgtggcccgaggaacatgatcaaaggtgaagactaagctgaagagagcgggaggggcccttccattagctctgcagctctgcagctgttaccctttcctcttcactgtacgggcagtggtttttttggtttttgggtttttttttttttaatttaaaaagacccaaagaggagaaagcagaacgaacattgctgtcagaagtagaagcttcggttgtgactacatgttcccattgtgagaggacatggctgaaaagactgtgtgtgtgtgacacatgtagaccataagcctttccatagagcataaatgtttgggccccaggggcaaaagatctagatttgaaccctgaactgtcaccgatcataccaacagctttgtctataaagggagaggtggtagagagctgtgctagagaaccccaaagatggagaagtaaatattgtttgtttgtttgtttgttgtttgagacaagatcacactgtgtagccctggctgttctggaacttactctgtagaccaggctggccttgaactcacagagatcctcctgcctctgcctcccgagtgttgggattaaaagtgtgtgccatcaacgactggcaagaagtaactattcttgatttaattcatgaatatacattgaaggccctttccttccacagggtgttcatctgggtgaaggcagtagagagagggtaagatatttatgtaggtagagtaactatcaatagattgataacctcagggaaaagtgaccagagacagaagcatacgtgagagaggtgagcacaagtcatcaaaagcccctggaaggaaacagacaggaagatgataagaagaaaggcactctccattgaggtggcagtgaaatgtagagcaaggagtcccagcagaagggacagcactcggagaacctggggacagggaagagcactgtgctctgatgatgagacaggaggccccagttgctgaagtcaaaggtcaaaagaagacaggctatggaagagccggtcagagacggtttccttctcccactgggccctgtaacagacaaaggtctgtgctataggtaatggaggctgtggagggctgaaagcagagatgactgacattttagccaggggaggcctcccgggagcctttgcggtggtgaagggctcagctgggagggtctgattgggagaggctgtggtgatggtcatctgatcctctggtgcttacaggcaggatccctgcagactgttaaatgggctgccgggtggggtggggtgggattaaggtgatttcaggtttgcatttggttgaacagtcaggcagagggcagtacttacaaaaagagcacaaccagaagagaaatgtgtttgtaggaagactggccaagggctcaccatggccctctgagcaaactcctatacccacaagtccccccgggaatcagattacagacagattccagtcgggcaggtctgaggtggagttcaggaaggaagcagaggacaggcagatgactgtccgcagacctgctctctgagacttagggtcctggagcctccacccttaccaccagcctcacagtgcctgatggcaactgtccagaaagagttaacagtgacggtgaccccagtccctacattgtgtcctgcctgacagctctgcgtgggtctgttattgcgagtgggtttttgtgggtggtggtgggctatagaactatgtttgggatatttttactcatccggtagatctgtgtctaccttacctgcttgtgacccatcatagcaaggaacgttacccagtatcccttggtttgagcttggccagtgggaagcaccaatagggaggaagaattttttttttagttaagttttaaggtatttttaagtaagatttattttgggggtgggtgcagaatttcaatcatgcacccagtgtgttttgaccaagctagccccatcccctccactctagctcctctcctagcccccacagtgatttcttcccaacctcagtgtttatcgtttaccaactgagtgcactcagggctgctgggatgtgtaaggaagggtgcagggctatctactgcagcaacggtgtcctctcatgggccgcatccttgaggtatgctgaccctgcttctctgaacagccatcagtggctcgtagcgcctgcgctagggtgggacgtgatacccacctcctgtccccgagctggcattttgtctgtcttgagctggcctgtgctgtcatgacggttgtgagtttctatgcacagatgctcagatgtgtcctgagaacagctttgctgcagtcatgctccatctctggctcttccacacgcttcaccctcttgcactgtgatcccgaagccagggaaggaggacaggagggaggacgggagggaggacgggcagtagacatcccatctgggactgagctctccacgtgcagacccactgtgggctttgttagtcgacatctgctgcacataggatcttctcggttgagggctgagagactcattaacactagtataatgataagctgttaggagtccatctagcagagtagtaggttggaagagggaattttaaaagccagttcttgcgatccatctctccccagtagcacagtttgcttgcttctgcagatgcttgtgcgaggggcctctgcgtccgtgttctggcactctgagaggctggttctagagacattactgctgggcacctcttcctgagatgactggggaccaccttctggtcctcctgtatcacaaggaacccctgacttcatgaggggggaacctaacgtcacaggcatcctccaatagcaaatgatagagacctccctccatcaaactcactctccgtgccaaaggagagtctcaagtccaccctgaactccaaaggcaagcagcgtagtcaggagtcaggccacctggtgggatcaagacgatcaagacaccttttctgtctgtgtgcttctgcttgcctctgtctgtctgcctgcctgtctgcggtctgtctgtctgtgtctcccatttatctccagctcttcatttgtctttgtttctgcgttctacatgtacctgtttctgcctgggactgtctctcaggggcactgccagggcgagcaggtgaggggcctagacttcacagtgaaggacatagtccctccctgctacccatcgtgtgctttccgagaccccagggtgagggtctcctccagtgtgtgccctgagcaccttgctcaccctccttggtccacagttcttctctatgcctgtgactccctcctgcagacaagcagttccctccgtgcctcttttttttttttttaattcctgtatatttcaactgcctgacctttctgccacaggcaacggtggaagttggtgactctgcacatctcctgtgtcccacactcaggatcttcaaataacaatacagcacagctcatatcagccgttcctaccttgtccctgtcagctgtacaggatctgggacctgcctattcctcagcagggacttgagaacaaagatgggacagggtaaaggaaggacactaaaggtggcaggtccctgaagcatctgtcccttcgatgcagggtgcagttgaggagcaattgtcactgaatgcagctgtctttcccttgggggcttctggaaattgaggggtgatggctgaaaactataggctcccaacccccaactccatcacactattccctaaatgccttctgcctcctcctcctcagacatcccagctcttccagctgtgtctgtaaggagccctgccagtccccatttggggttctggttttagatggctgctctgtgtgtggtgagaacagtcagtcagatgctctgtcaaacccaggaagtatcagggaagagggagcccagcttgctctggagaaaagcaggcagaagatgggtgtgggtgtggggggcaggagagtagagtttctgtccagtcagggacacagacatctcaggcactgatacagtgtgacaagcccagtgcctatggagtgcagaaggcagaggccccatgagcccctggcccgtttctgggagagctttgccagctatatctcctctggactcctccaaagcaacagttgtgggtgggacacattgaggagatacaaccccattctgacggggaagatgtggtgaactcttgggccacatctcgactaggcgagatgtcatttaatgagaaaggttgctcagggtgtgcatgggtggaggagtggctgggggcactgctgtggcagctgcagaatggggggctctagacccaaatgcacacccatagggtctgaacagacctggcagttattagtaccctgcaccccaaatctagatactacccttagtcgctctgtttctgggggagacaggttccagacttccagcttcctctagacaggtaagaggaatcctggtggaacgggtttcctgagtgcagggcagaggtcccatagatgccagtgcagctgctgacatctctgtataggtggcatccatccggtctcgcagttctctacagtctggtattccatgacttagctacctatctagcagggaagaggtggaattctgtagtagctcaggggattctgtcagggacagcagaggggccttcctagaggaggtgacattgactcttgaaggatgagaagcagtttaccaagtaggaaaggagcgtcttcttggctgaggtgggggaggatgtggcctccagactagaaagtattgaaggaagggtttgatgggctccgagggcggatggaacagttcagtgacctgggtgtcaaactggcctgggtgacttgttaaactgcagccacagcccctgaatgtgttactcccagccctctgggcccgggccttgtgcaggcgttacctggtaagaaccgggattgggggacaggggctgtgtctcactggcctgcttagggtaaggcccggcaggggcaggctgcacccatcaccacggcagtttgtgggcagagcctcttggcagaggggagattgcactgccagccacttcctccggttccttccctttgcctgatgtcacggttacctcggcctgctctggggtgaggccgaggtcgggcggaatcaatgtcagccaggtttctgtatccctgatgcaggtcagccagaggagctgccacttctggttcggtttcaaagaaggctcgggcatgggaggtgtcgggtgtggaggcatcgatgaggcacctctccagcagcctcccagagggccagtgtggcttaaggaggagtcttaaggtggtgtggcgggaggaaggaggctgtgctgccaaaatcaaaggccagggcgctggtgtgggtcctgggctcctgaccatgccagaagtgcacggagagaggatgctgactttcctggctggtgtccctttggactgagactttgtcacaggctgtggattgccagagtcaccccttaaccttaccccactcaagaagtgacagaattggcaagcccggtgcaacatcccagctcgtggtctctgacttggagctgtccccagcccagctggcctcccgaggactccagatttccctggttggcaaggacagcccaaggcaccccaacagaaaaccctgaaggaatgtggctcagttggcaaagagcctgcctagcatcaggccctaggttcaattaataaattgagtgtgatagtctacagttataatcttagcactcgggaagtgggggaggatgcttataaactcaaggtcatctttcactacataatgagttggagaacagtcttggctacttgagaccctgcctcaaaaaaaaaaatttagaaaggttgaaacttataaaacctgagttcacaatccagctcagcctggctttgcaatgaatgtctttgttgaatgaatggctgcagataacatgaacttttaagcctcagatttactgcctgcaaaatgggacagtaatagatagcactttcccatgcgactgggtctggagaatggagtggtgtgtgttgaaaggatctgtcaaggtaagcaggaggcagcagctcttgttattacggacagtgagaacttatcaactgcggggcagggtgggtggtgagcttttacccctgctgtgttgtgggtcttgctttatgagtcctgagttcctttgagaagacaggctatcttgcagtcagtctcaggagatcctgagatgtgtccatccaggtgagaaggcagagtcactgtgacagcctggggaaatagatcagcagtttgggggacagagagaaggagccataccggtgggaagatgtggtgagggttggaaaccctaacagaagaggtggggtgacaagagtctgggagaagtgggtgcagaatgagaacctgggtctctgcccaaggtgtttttaaaggaagtgcctgggagctgctggcctggaaaagaatcacacccagagggcttgagcagggcaaagcaggttgccccacccacttgcagggagccgcctgcctcagggagaggactggcctggctcccagccccagatattctggctgagccaggtggccctgccctcaggggacacgggctcctccccaggatgcccacctgctccgaggagtatcctgtgaccaggagacctctccgactcagcagtcacaggtgtttgctgagatgtgggtgagaaagggggatctgtccccctgtctgtccatgtgtcaggtgggaagctgtgctcagttccacccatggtgtctaatcggtggctctgtgccctcacagctagacgaggaagaagagcgaaggaaaaggcgccgggaaaagaacaaagtcgctgcagccagatgccggaacaagaagaaggaacgcacagagtttctgcagagggtgagtggggcagctgcagtgtgtggcgggaagctgcggtgtgtggcaccttgtcctttgcaggggctgatgtactccgcaaccagggacatgatcggacactgtacaacccagagaaggtagaaggacctatgttttcctccactgagcttagatcccaggcactaattaacccagtggctcagacctggaaccatccattttggtcctttgtagctaacacagtgttctggagtacatgctaatgaagtagagtattggagcgatgtcatatctgtgggcaatggatttagctcctgggctggctaccacgaaaaactccctttagtgcaatgcttcatccacactgcataccccactggtctgcccttagccccattgggcatgacccttgactcttggctgctgcccctaggaacctgaggtctggccagtatgtgaaggtcagcctccaggagctgcctgttgtctcctgacgtcatcagccagtgtactttgtgatatgtctagcagggtgcttgctctctcttagccctgagtcctgtcgctcagccctcgtctttgtctcaaaggtggtgtcagggaaggggagtccgtggaaagctgactagtctcccagtagtcggcaacaccccaccccagccattggtttgctactgaacagtaatagcggtaaatgtactaacctaagaggcggccattactgttctacaagccgcaatgatgagcagcggtcatgaacattgcaaagccaggcacagtactaagtgctgggtgtgatctcatttcattgccagagcaggtggtgaagatagggatctttgtggctccctttctgcaagggaggaaggcacggtgacgatgtgaccctagccgctaaaggctaggactgatgtcagtgtctgctgctaacctcaagtctccatgtccctattcccgctctgaccctcagttccttagctggttcattcattaattcatttatgaattgaacaagtgtgggaaatgtttagcggtacactaggcacactgttagaggggcacagcaagagtggccactgctcttctgtggaagatgaagaggtaaggctgagtggcctgatgttctctgaccccatggactgtgtcttcttgtcatctttgccatagcagagagctgttctgggctacaggtgtgaacagtgtgggccatctggagacccttagctatgggcgccatgggccggacactgcttatcaacaggactgagttgccagaggctgggagctcctagagggggtatgcaacactagactagattgttcagcagtctctaagataaaggccttaaagatgagggttgtgtcctgtgctgaacgcccagggcttcttaggagaaacttcccatatgactccagcttcctggagcttgtcagccaatcggcagaggccacaccagagtctcccaactacacaccagtcctacacccactgcatccctagatgtcagtatcagatgaagttgtcaaatgcctactgtgtgccgggcatttcacatgattacaacatttcaataaggtaacacaaattcttcccagtttagaaagtgatctgtggttcagagagaccaagttgcttgcccaagcaacggtgctagcaatttcagggcaggaacttgcccatttctttgtttaggtggtaaccaagggcccgctgcactatgggtcagtgggtcctgttctcttagtggacaacagatagcaagtgagagccagtagccagcaaggagtgttgtttcagaagccagagtgctgtgggggacactcagtgctgctgaggagagactcttccatttgtgagatcaataggggaagaagtaaaagatgaaagacgtgaaggacatcggggcagacagaccctgagcctcgtttgtagagtgatcctacaaggtgggtgtcagaaatggaccagcgtaaacagactagtgtgtccacattgtcctggcatagtttctaaggccgccttccacgtacatgagtgcccccattctatgataacatctatggtcatggaagccatgaagagttcaggaggaggagggcaccagccagaggagtctcctgactgtgaagcaggcctcaggttagggcagctgaagtagctctgttatcccagtaggaaatgtggctgccaaggtggagaaaaggatgtgaccttgggtctgggaagcatccccatgtgggctccagcccagtcctcttctctggacacccctccccatctgaggccttggaagcagaagtagggtgtgaggtacactaccgtgctgtcagtgcctgaggacttgacccgctcttacaccctgacctctggacactcacatacaactctaagaaagactacctcccagagagttcgactctttagaccagtcaaggccaacttgggtgggtctttgggtggaccagttcacaccccacagaccttgggcctaccccaaagcctccatctgcagtcaggaacatcagcctggagtgtctcttctgccatgccactgtgcctaatacaaagttctctggtccctggaggcactgaagccattttacattcctaagacacagtgctctgtgctctctccatgggcactgtccccatgatggtctcactggccctgggagtgtgagagggccccccctctgctggcaggttcctgatgggggtgagtgggtgggcttcctcagctgcccagaactggattcagtgtgtttgcccagactctcagaaatggggaaagctgctcccagtagcatagctagcaaacagctagaatttagcccagacacaaggtgtttcacaacccttagagaatgctgatggaaccaatgcccccagggcacttgaaaatatacgcctttaatcccagcacttgggaaacagaggcaggtggatctctgtgagtttgaggccagcctggttttcagaacaagttccaggacagccagggctatacagggaaaccctgtcttggggtgggggtatatagatataaatgtaagatgtagtatattttaggggatcttagtgcttacagtttccctcactaaccattttgtgtgttcatgtgtaaacggaggcctctgggatctgtaacttggacaaagtcacatagctaggatgaaaagtgcctaactctgcaatgtctttctactctgctgatgacagtgtaggagacaaaatatttttttttaagattttatgtatttatttttatgcatgtgagtacactgtcaatgtcttcagatacacggcagagggcatcagatcccattacagagggttggaagccaccatatggttgctaggaattgaattcaggacctttggaagagcagtcagtgctcttaactgctgagccatctctccagccccaggagacaaaatcttaacttacaccatttctattctaagccaacaaatggctgcagtttttctggtgcaataaagatccgccagaagtcagcacagaaagcaaaaatcaaggcagattcatctccctggaagtgaagttcaggaagatccaggcccaggtcgctccttgtttcactaggcaaacactgctgctagaaatctacaaaccgttacacagaggaaccctgtcttaaaaaacccaaaagaaatctagaaacctctgcataactgtatccccagcacttgtgagtctgaggcaggaggatcacagtgagaggttaatctaggctacctagtgaaacggattagcacaagtgtgaggctagcctaggctatctagtgaaaaggagtatcacaagtgtgaggctagcctaggctacctactgaaaactgcctaaaaagcaaacaaaaaaatgtttaaagcagcttttaagatcccaagatagccattggtttttcggtttttgggttttttttttcttttttgcttgtttgttttggattttttgggatttatggagatagtttctttgtggagccttgactgtcctggatctctgtcttgtcctggaacttggctggtctctctgtagaccagattagcctctgactcaaagagatccacctgcctctgcctcctgagtgctgggattaaaggtgtgtcctgctaacaagccactgttataaatatgttttaacaatattcttctgagcacagattctgtagttgcacaataaataactgtgagcaccagccagtaatttcttgagcacaggagggagtcacaaaataggaagaggatagtggtcctatgacagccgggccaaattgctccaagcatcacctgtgtgtgttttggagtccatctgtgcggtgttgaattcttcaccaagggtttttgttattattttgttattccagtgtctcacgtagaccaaattgacttcaagcttactatgtagccaaagctggtcttgaacacctaacttcctgcctccaatttctgagggctcgaattacaggctcctgccactatgtttatgttcaactagccacgtccagcttgaacttcaactgtacccaagcccaaacttcttccagactccatttagcactgtctagctcagctcccctctcaggtagtagccatgctgcctcccacctccttcactctccaagcccaggtggtccccaagactcactgagttgtctttgaagcccctttcccccactctttctgctcagagagaggtataaggagggatcccccgagcttctctagcccttcagttttacattgcaagttccctgtgggaactcttccaatcccagggaatcatcccctctacctgacaagataacttgctctagactcggactctaagcatggctgccatgtggctctgccctgctttttctgccttgttaccctactgtgtcctagagagcagtgaacacagtggtccctgctgtgtcttcacatgtggcatcgtgccctgtctctccttctccctgaaagtttctttcttcttcttcttcttctttttttttttttttggttttttgagacagggtttctctgtatagccctggctgtcctggacctcactttgtagaccaggctggcctcgaactcagaaatccgcctgcctctgcctcccgagtgctgggattaaaggcgtgcgccaccacgcccggttccctgaaagtttcttacccagagttccgcatctcctacattcaggatggcggacagaggacagtggacagcaactgggccttgctgtgtgctgagtgaactctcctcaggagccctagggggtggagttgggggaggggggagggtcctttacaggctttggattccccaaagcattcatctcctttgcaggctgaggcacatcctcagaggtgggtagatggccctggggcttctcaataccaaggctgaggacaatctgaagattgtgttagcagcccaggctgggggaggtgaggaggatggaggaaacactagccatctctcagaatcctgagaactgcagaccaggccggcattccagtcttgtctcagcctgtcccattaaaagccaccatagatgcttctttctttctttctttctttctttctttctttctttctttctttctttctttctttctttctttctttctttctttctctctctctctctctctctctctctctctctctctctctctctctctctctttctttcttttttatatttccccctcttggcatcttcttttctccattttgaagctgttgctctgggtgcctggtcctaaagtctgcctccctcagacgtcctgtgttccctgagagcccatacgaccacctctgagaaggttcccaaggaaaactctggcaggcttgctgatagcttccctccaccccgccccaaggttctctctcagagggaggctgtccccaactacgccccactgggcagaaggacctgtcacacatgcagctgcaagttagcctgctctggactaataatggtccctcagcatctgaaccattggcgtctgaggctgaaagggtcctgtgagggttgtgtgttgcaatcacagcatatttattctctgtccctcatctgccagtcactcttccttagccatgacagccaaacccttctctagaccctgggacaaagttattcccagtggcctgaggttcctcagcttatacacgcgtgtgcatgcgtgtataagcacacacacacacacacacacacacacacacacagagacacacacacacacacacacacacacacacacacacacacacacacatgagctttcagttacagctgttagaaaagcaggaagagcccatcactgtgttcttccggcctgctgtgtgagccccaggccttgaacagacatgcttgtcacctgtcctcgctgtgaacacacaacctcacaccccatcacatcctcggcatcccttctcccgctcagggcttcgggagtttcatcagacgtcagtttgaaacctcatttccggtcctacaggttgattgccggtctggggtcaaagctcctagatggtggggcatcccgagggaagaggaaacattctaaacaatacaagctaatggccatggggcacgtgctttagggggaatggctcacactgagtttatcaatcccaccatacctttgctgcatttcaaagcacttggtcttgtgtgagccaccttgtaccctctgtctgatcttcatagagcaggggagctttcggtgtgttctttagtcaacagcaagaaagctgtgtggctggaatgacatagagaagggaataagaagggatttgaactgtactagctcccacatctcatctggtcccatcctgctgtgacagaggctattgccgtgtggcacagtgctgcctgcaaagagtcaccccagatgctcagccttcagtgagacctggcaggcagaaaagcatgccagcagtacaggtgccagccataatggctgggcatctctcaggagcaggctggcagtgaccgctagctgatggtgtgtctctgtctgtacaggagtcagagcggctggagctcatgaacgcagagctgaagacgcagatagaggagctgaagctggagcggcaacagcttatcctgatgctcaaccgccaccgccccacctgcatcgtgcgcacagatagcgtcaggacgcccgagtccgaaggcaacccactgctggagcagctggacaagaagtgactgaaggcctggaggaggcatcagaggaagaggaggaaggggaggagcataaaagagaaagaggacgagcaaggtgacagagggcccctcccaggcacgtgacaaactctatgatgaggcttagcataactagcctccagctggctcttttttgaaactcagccctgccgcgcaagagcaagagcggactgaagaaaccagagggaccaggtgctgagaccaaggttgacccgcagataggggctgtcccactccagggcccagcttgaagagcacctgagccagagaggtgccaaaccaggtagtagcctcaggcactcctttggcctctctgccaagacccccacccaggggactactgagcagccaagaaaagccatgcattgcaaacacagtgtggcccgcggatggaactcagcatagactgcaatccacctccccagccctgcccaagcccagtggaagggggtgcactgtggggctgcaatggcccagctggagttggctgcggcacagaggcgcgggcgcccttccaaagcacatacttaatcaatgaatgtttacagactggctgtcctggcggggcttccaactgcacacggtttttatactttctttctttttctttctttttttttttaatattttttacaaaaaaaaagattttatacaagcaatatatatatatatatatatatatatatatatggatttctataatcactcgatgtgacacagtacaaatatgctatggtctgttatggacatccacccaccagttaaggccattgtaattcctaagtactgtaggctctgggtgttggggggtggccaggcgggtgaggtacatttccatccttgtaaccccttcctagtacccagtcctgtatcgttcagtaaacattgctcttaattacccagctgcctcgagtggtgtctgcccaggaagagggcatagtttccatacctgcccttccaggtaagcctacatatggccatttcacagatgaggagcccaaggcctagagatgttaaagaactctgcatataccattttgagagtacttgcttcatttatttaggccaagtttttttttttttcttttaatagtttgtgtctgggtgggggtggggtgagtaaagcatgagtgtctttgtgtagatatgtgcagaggttagagaatttggatccctaggagctggagtttcaggctgttgtgagccacttgatgtgcttcctgggggttgaacttgggtcctctcttctccagtttccttttgagtgtaccaggcactgcagtgagctggggagtaaaccagccttggtcttgcacggtggatcccgcaataggtttattttgtgcttgcttgtctcaaacctgtctcccttcatctatctgcgtggcagccttttcaaagggcagctattgtctgtcccccagttcatggacggggatttagaaactcagggagaagaaatgaagtcactacttgttgaagccttaactgacaaattcgagctcccgtttgctacctacagtagcacagagcagaccttctcttgtacaaacagctcaactaaagctcggagagagcatgtgtgacttacccaaggtcactcagctagcaagaaacagagctgatatttgaactccacctccagagaaacagggctttccccatcaccggctgtctctgctcttacaaatggatgtcgcctccctgagaacaggaagtgtaggggtgaccactataaatataaggtgggagaaagccctgtagactctagaacagtggctctcaaatgtgtggtcatgacctcttgagggagtcacagatcagatatcctgtatatcagatacatacattacgattcatgagagtagcacggttgcagttatgaagtagcatcggggatgattttttggttgggggatcaccacaacacgaggaactgtggtaaagggtctgtagcatgaggaagcttgaggaccactgttctagagagttctggatgtgttgcccgagatggtgtaatgaagcagcgatcccagccaaggagtacatgacctggggatacacatatctcttatctccacagtcagacttcctgctctgcagagctggaacagctcagagtcattcacacagtaacctgcctttactcagcaagctaggtgtgttatctcaggttctgtccgggctccgtgggacaggcaaggtagttgtcattagctgccttctacccagaggctagcccagcttcaagtttacccagctgcagagaaacgggatgggagcagactcaaaaaatgaaaacactgcttcctggaaatgtacttcttcccggggctgggtaacttcttgatgttgaagtgatctcaatcacagatgaagcctggctgggggcggggatggagcagatgtggaaaataggtcactgataaacagttggtccctctcttcttctccctgagttccctccatccaatctgcgtggtgtggtctgtctacacagagtcccaacctggagacctagcctggccagcttacagtctgccatggcaacacacagttgcctgtgttccttcaaccctctttagccaggagaaagagcaaagtgagaatcagtaaaaagcctgtagatgcccctgcagggttactgttcacccccggctgtggctcttctagttccctgctgggatgccaagagctggccttttttggagccagccctctttaggctacatagatggctgcttccccagaccggtgacctgaactgctgtccctgccatagtttcactcactggcttcaccatcagagagccagctcaagggtgtttccttgtgtcacacactgcctgtgttccagctggctgacatggccttttggggggggggtccgtcctgcaatctcagaaagccgagacagagagaggaggacctcacccaaggtcacagacctgctaggtggcagtgccaggatgctattgtaaactcctctggtagatagcagctgggcctgcccctccctgggaaaggaaaagcactcgccgtctggtttgtctgtaatgagacctcagcagctagaggatgattgcaggagccatggcacaaagcttcatgtgctcacagcacactccgagtctccagtgatagcttatttctctgctgctaaagtgagccaatgtaagccatattagatgatagtaaaggcaggtttattgggaagctgcaatcgagtgaggtcactcaccccaaggaccaaggccagggaagtcaccatgggaagggggtgggagagaagaggaggaggaggaggaggagagagcaatatgtctggattataaatatagggagaagcctctaggggaagggcagctcagccagccctggttggaaagttcggggttgggggcagggtgtaccaggtaggaactgagggatgctgggagaacctggaagccaggtctgtttggtatgtaaaatattcatctcagtcccttgtcctggggtctgaaaccaaatacccagctctaatgcttatctacaaatgagagcttaatgtgaatacacacacacacacacacacacacacacacacacacacacacacacaatctataaaatgggtcccagtcttgggtgggggggatgtcgtcaggatcaaagaagaaatggaagtaagtggtattatcctaccttctgttagtgatgctagttggtatttaccgcatagcattctttgaatacctctttgtcttctaaaggcaagctgcacagagtttgtgttctgaccacgacttgtccccatgacgttacagatgcctaaggcccaagactccacagctcctacagctgtgtcaggttcatcattcctgaatgtccaggacaaagcaaatcaattttgtgcagtcacacatcctgaaaaggataacagagacacagtcactgtcaccagagtaggatggtcagggtgtcggctgcaggaagtgtccatcttccctctgcccatgggactctggggagaggaatgtatgtatcgattcagtgaggaccagggtgtcagaactttttctctgacctagtagttcctacctgagaatggacttagcaggagctctgtcacagactcccccaaaatgcccaagaatccactgatgccctgtttatgcccaaggaaaactggaggtaacctaattccctgtggaggtaagacaaacaaatgatagtgtttcacaaaattgagtgttagcccttagaaatgagctgtccatcattatagatgaatctcagaaacagtgggagagtgaactacacatggatgtcatgccgggaggtttttttttttcaacacgtaaaatggtacattcgttattaaggacacacagagatccgggagcaggcagaagagcaaatgcaagaatgctataaataccaaaatcagtgacagggactgactgtgggggtgggcagggaccagcagtggattctacaaggataagtaggacacgggtttcaactgtacctgtatgtgtgactgttcctttcccttttagtatagtcattaaaagtagagtgaccccagacttgtcagaggcgggctgtgtgctcctaggcaaggtttatattctgcctttgtctggttggtgtttcctgataaaagagagcaaattgcgatgcaattagaagatttatggttgttggttttttgggtttttttgtttgtttgtttgttttaggattttttttcctgtcttttgtttttccattctttccttagcaaactcaggaaataaaagccactctgaaattacaatggattgcaacacttgactttgtgcaagttcaattgcatatctggagggaaagggaagcaattcagagtgtgggacttgttggccttgccctggggaggtgttctgagggtgttaccctggaaagcatggctgcgctctggctcagcagctcctgatgcccgagcacgggggtgggaggagagctaaggtgcattcaaggttaatccctgctcactagttcataccctattcccctaatgctgatttcgcaacccaagcctgtgtgcaaagactccaaagtatccttccctagagatgccagggtgtggggacagcttggggaagacaagagcccagtggatcctgctgcaccgcttcctgccgctgctgtgacattaccacagggaggatgacttcgaagagcatgtatctcatcaactctcagctcaggacttcagaagtgtaaaatgcgtatacctggctaacgccaaggctttggaaggattgacctttctgaagactaagggggagaatccttggtttttccagagctgatgctcacagtccttcattcagagcctcttccctctccaaagcctgtggtaactgctcaagtccttgcatgccctgtccccctcctccgcccccagctccccccccatcccccatgccttgttcttgcatgtcaattgcagtcaacccctctgctgagttatgggggggggggctctacagtttaaggaacctcgtgatgacatcgtttccacccagatcacctaggagaactattttaaaggctggttaacagccttatctccaaatgcaaacttagtttctcctggtttttgacaataggctccaaggattagaatgtggttccctaatcattgtggccagaagggctggctattattctgcctaccactgaggaaatgaagacttggagatccttcctgctgccaggaaaaataggctatactccctgtaagtaccacaaatatgtggtatagctccaccccacccccaccccacccccacgcccctagtgcctggcacacagacctgtgcataaactgacaggtgtgtgaaacaatgcaaacccgggcatggccccgtacagagataaacatgtgggaagccgttgcagagtggcagttggctactgctggccaccacacatacataggcagtgaaggttcttttgccaagacaagttaaccaatcagatgtgagacacgcctctcctaggcctatataagcagcaccagttctgggctcggggtcttttcgtctctacaatcaagctctcccaataaacgtgtgcagaaggatcctgttgcagcgtcgttcttcctggctagttgagcgcgcgcaagataaacacacagaacaccaggacacccagggttgttcacaggaaataccaaatgatgaggctctcctttcactccttcatgttaccttctgagaatttgaaaacaagcctctttatcatactggcatgacttcatcatttgagaatgcctacatttggttggttgagctgggtgcgctgtttcagattaaaagctgtgagacctacacaaaaccaagccattcaatattccagcacggagcagagaggggctcagataactctcacccctagctgaggagcagcttttaacagttgctttgaaggcaggaagccatcttatttaggattgtggcccctggtaggttggccatgctccagtggctgcctgcacgcatgtgtgtatgggcgccaccaactttttaaggacttgaagcgttgggagtgaggggcaagtggatccagaggaatgaggaaggagtagaggcttgcatatggcccaaaaatgttatatgaatatgtaacattctcaaagaataatataaatatattaactattttgagagactgacttcttgctaggcttctaatacagcaaaattggatatgctctatactgttctaaaggacagcacaccctgggccgtctcttggacacctagtgtttccagtcctgactctgcttttttctataacccactctgagcaggtatgaacaactccacacaggcacatgcagatggcgcctcctacaggtgcaggccctaaaagtcctgcttcctgtcctggaagtcatctgtgacacacacacacacacacacacacaccctacaaatccagggagtcaatgcttctagagccttctgtgattgctaggggtgaagagagtgtggagaactctcttccctttcatcctccagatacctggtcctgaggaccctcccgccgtccctggggaggtcttacagggttaggaaaggcctgttacaggttgctgcagagaggagatgcagagggaaattgtagaggggaggtgcagaggggagctgtagaggcgagttagccgtatgacatgtgtcccggttgtctctctctttgtcctactatgtccttcctgctccccctctgcctcaccctgagcataaggctttgtttcaggatgtgctttgcaagggccaggctaagctgtcagaagtggtgggcagtggggagcacaacacctgacttgtgtggagcacagctgcttggatattctacatggactgacatgtgacacaggtagtaagggcactcgtggcacagtgctctgaaggccagtgacaaagctggggttgatggttaccttttgtcaactgttttggaagtcagctgcccataagtctacaatttccatgaaagccagaattcaccttggtagtgttcaagggcgcccgtggctatatagcatcgtaccatgctgtgctgagaactaagcccagagtcagattgtaaaggcaacagaccaatctatgaatggatgactcttgatgaagttcctttcaagaagccactgggtgtggtgatgacacctttaatcccagcacttggggggcagaagcaggcagatctctaaattcaaggccagcctggtctgcatagtgagttccaggatagacgggaatacgcggaggaaccctgccttgaaaacactaaaatctaaaaaggaagaaaagcttatttgtttgttgtctgtcttcataccacagtttgcttattgagctcaaagaacagcctaaaagaatctgttttcttccaccatgtgggtcccagggatcaaatccaggtggccaccctcagcagtaagctctctcacctaccaagcacatctccccgtccccttgatgaattcttttatacccaattcagggccctaaaaacaaacaaacaaacaaacaaacaaacaaacaaaccaccctagggcaacagaccctaacacctgaaattaggagggggtgtttgggtgctatagaaagcaggcagaagcccagcggcgtggtggcacatgcttttaatcccagcactccagaggcagaggcagaggcaggcagatttctgagttcgaggccagcctggtctacaaagtgagttccaggacagacaggactatacagagaaaccctgtctcgaaaaaccaaaaaaatagaaagaaagaaagaaagaaagaaagaaagaaagaaagaaagaaagaaagaaagaaagaaagcaagcagaagccatgaggaacaagtcagtaagcagcacccctcagtggccactccatcagtgactgcctccaggttcctgccccgccttccctccgtgatgaacagtgctatggaattatacgctaaaatgaaccctctcttcctcaagtcacttttggtcacggtgttgagaacgacagtgtcacttttgagagggatggcgcctggccccagcctgccccacagtggcgagttacagtcacatccttcctgtcagtgcttgccaaactggaaggtgtgcacttgggatgaagactcttggggactgcagagtcctcacgttcgttctccagactcagtggcttttggtgggaaaaagctgactagactcatttaaaaccgttccatcccagcaagaaatcagaaatgataccacaccctctgcacgggcaactgcagagaaagagcgcctgaagccagaacccagaggatgcgggtgatcgtggtcccaacagacccccattggactcactgacccctgagaagggtggattgcagagggtgatggttgactactgtgattctagactactgttggcagtgtgctggggggtggtcactcaggcaaggcattcttactctccatcaacaggtaggataaataataatagtagttcactttaactggtaccattgcttggatgttgaacatcttccaaaggcccatgcgttagtgacttgaacctcagcctgtggtgctgttaggaagtggttggactttagagaagtatagctatgtaggaggaagttagttcactagtggtgtgtcctcaaagaggatattgggaccccagctccttcctctcttctttgggttttctggttgctaggacatgagtgacttcctgtgccatggtctctggctcatcacaggtccaaggccacagggtcaagcaacttggaaccaaagcctcagaaataacagactaatcccaagtgcatggttatcttggatattctgttggagcagtggaaagctgactaataaatggcaactgttttcagttctaattggtaaatgtattcttctcctgtttcaccaatgggagggtctaaatcagcttcctctcacatgggaaagccagaagcatccgttcagtgtctagcttaggggttactttgactctcccgctctccatcctactgtgactcatgggaagtttgggcctcttgacactccatagtctcctgaggctcccactggatgggtgtcattatgctcacgagaccctcagagcaaggagtggcaatcaccagacacctagtaagcacagaggtgagagacaatgggaaagaaaccctaggtggatgtgtcgacctgccacgttgacaacattctcaggtcgccattggtctgaaatctccaaagcgtcccttcaaagcaagactcaagttactgcatgttatacctgccacagagaaggggccatggccttagcagacctctgggtttggagacaacatagtttaagtattggggatagtgctctagcccatgccagtgacttggaaacctgacagtttccaggctctgcagattgtccaccctgcagctgtagctcatccgtcatctataccatataactaatgagacaccagagccaaaaaggccatggcacatttggcctcctctagatggttccactagacagagcccagggtagtccacactaacctatacctggtgttgggaagtcctttgccatctcttgcccagagacactcaggatttaaatggaggccattcaacccaacagtttcttgaaatggcctcctcctcctcctcctcctcttcttcctcttcctcctccagcttgggcaggggagggggtcatgcagaaagcagcagcccctccctcatgctggggtaagagaggatgtggtcccatgtggactctgttttgctttgcaaagctgtgtctattcctccatgctcagattcccaaaccaggtaaaaggataatcaccctaaaaacagctctttctgcacatggtgacctgctgcaccttgctgtctctgtaaatgcctcaatttaaaaactcttatttttttttaagatttattattatttttaagtacactgtagctgtcttcaggcacgccagaagagggcatcaggtctcgttatgtgtggttgtgagccaccatgtgattgctgggatttgaattcaggacctttggaagagcagtcagtgctcttacctgttgagacatctagccagcccctattttattttattttattttattttattttattttattttattttattttatgtgtgtggatgtttccttccttcttacaacgaacatgtgctgtagcttagggaaatttgtcgtgtgtgtgtgtgtgtgtgtgtgtgtgtgtgtgctaacattccaatatttgtacagcagctctggtccctgttccccccatctctacagtacaggtgccatcgtccctcagctatcccagagctgtttcatctagggacc

SEQ ID NO: 318 - DNA, 1558 bp, Mus musculus
gcttccttcgcttaagagcattgctgcggcgggctctggctgggttaggagggaaccacggggcagtccccagttcccttgggatcccgtcaggcacatcaggttatataagaagcccctccaggccggcctgccactcctcctgctatgatgcctgggcagatcccagacccttcagtgaccgcaggctctctgccagggctcggccccctcaccggacttcccagctctgctctgaccacagaggagctgaaatacgctgacatccgcaacattggggcgatgattgcgcccttgcacttcctggaggtgaaactgggcaagaggccccaacccgtgaagagtgagctagacgaggaagaagagcgaaggaaaaggcgccgggaaaagaacaaagtcgctgcagccagatgccggaacaagaagaaggaacgcacagagtttctgcagagggagtcagagcggctggagctcatgaacgcagagctgaagacgcagatagaggagctgaagctggagcggcaacagcttatcctgatgctcaaccgccaccgccccacctgcatcgtgcgcacagatagcgtcaggacgcccgagtccgaaggcaacccactgctggagcagctggacaagaagtgactgaaggcctggaggaggcatcagaggaagaggaggaaggggaggagcataaaagagaaagaggacgagcaaggtgacagagggcccctcccaggcacgtgacaaactctatgatgaggcttagcataactagcctccagctggctcttttttgaaactcagccctgccgcgcaagagcaagagcggactgaagaaaccagagggaccaggtgctgagaccaaggttgacccgcagataggggctgtcccactccagggcccagcttgaagagcacctgagccagagaggtgccaaaccaggtagtagcctcaggcactcctttggcctctctgccaagacccccacccaggggactactgagcagccaagaaaagccatgcattgcaaacacagtgtggcccgcggatggaactcagcatagactgcaatccacctccccagccctgcccaagcccagtggaagggggtgcactgtggggctgcaatggcccagctggagttggctgcggcacagaggcgcgggcgcccttccaaagcacatacttaatcaatgaatgtttacagactggctgtcctggcggggcttccaactgcacacggtttttatactttctttctttttctttctttttttttttaatattttttacaaaaaaaaagattttatacaagcaatatatatatatatatatatatatatatatatggatttctataatcactcgatgtgacacagtacaaatatgctatggtctgttatggacatccacccaccagttaaggccattgtaattcctaagtactgtaggctctgggtgttggggggtggccaggcgggtgaggtacatttccatccttgtaaccccttcctagtacccagtcctgtatcgttcagtaaacattgctcttaattaccc

SEQ ID NO: 319 - protein, 173 aa, Mus musculus
EAPPGRPATPPAMMPGQIPDPSVTAGSLPGLGPLTGLPSSALTTEELKYADIRNIGAMIAPLHFLEVKLGKRPQPVKSELDEEEERRKRRREKNKVAAARCRNKKKERTEFLQRESLELMNAELKTQIEELKLERQQLILMLNRHRPTCIVRTDSVRTPESEGNPLLEQLDKK

SEQ ID NO: 320 - DNA, 61739 bp, Homo sapiens
agcatccaggcagtcttactgccagcagcttgtcccttgaaaaaagtttcagcctctcctcctaggcaagcagcagcctgagactctgagccaggctgagttttaggagccatggctggacatcttgctgggggagggccaaaccacagcatccaagagctgccttcctgagcccttactatgtggtaagcactgttccaagtgggcaggaactcattaaaccttcatgacactcctatggattgggtattatcatacacactccattttaatgatgatgaaattgagcatgtagaggttaagtaacttgcccaaggccacacagctagtaagcatcggagacaggatgcacacagaggcagtctagtcccagagtccacactctttatttgccactgtatcctactgccttgtatgatacattaatcttaaaagaccagacatgcgaaaactgtgtaaatggccaatctgagacaccaacagggccagtgggtctggaagaattatggctgggcagtggagtctgaaaagaccccctctagctctgaaactctgacctgtgggaagaaggaaaggtagaaggaatttctttgccccaaaacaagttacttaggatgactttttattctttttttgccccctaactttttaaagtttattttttgtggagacagagtcttgctatgttgcctaggttagtctccaactcctgacctcaaatgaccctcccaccttgacttcccaaagtgctgaaattacaggtgtgagccactgtgccaggccatgtaggaagagcttttaaaagggtaactgctcctgtgccagtggagtgggatagtcccagggcaccaagctgatttgattaagagtttccgacaaagggaggaaggctggttccaatggtttttatttatttatttttaactattattttttaatttttcttttcaagtttccaatgatccaattgtttttctacctgtctcttaacacccctcaaaactcccttttatgcttataattatttagttaattagctaattattcatccacctaaggactgggccagtctttctcatcatttcatgatgctgtgagccctgcacatagaaataatcaaatatttattgaatgaatgaatgaatgaatgactgaatgaaggaatgaataaaaatccaactctgtggtctgaaatatactctcgtacacggcagggcacaaacataacaagctggcatttgaggaagtatttgaaaggaaaggctggctttaaaaaggaggaaggagaggattaggaaggtgtatttaagagatagagaaacgctggcgggaggagatgggtgggggaatcgtgggcacaaaacctgaaaggaagcctgtgaacctggccagggctaccaaagaagcccttgtcccaaggtcccctccagaggccttctgaccgccctcagcgcccacctcccacctccagctcacccctgaggccagcgcagaggtgtctcctcttacaggagtgcattctaattgcaaaatcatatcctcgttttttaaggagagccaattcctccagttccgagtgtgggggccttttctggtctatggggacctattctggtctcagggggtgagtttccaggagcccagggactcagcggggagggcggctctctagaaggtacactttggctgacttagggcagggtgctgagacatgcaggtgtcaaaacctggcccggattgcctggagctggaagagccttccaagaagtgaaaatcccacccctcccccgcctaggcccacacaacagcccagtcataggggcctccttggctcctccctacacctctctctaccacaccaccaaattgttgagtgtaagaggaaacgctacctcccgcagaaaacctaaagggactttttttccccttcaataaacatttgctgaaataactttttattggtggttgttttaaaatgcatagcagaaaaagagtcctgagaattatttccaccataacttttgttcaatgagatctgtgtcatcagtggggacctcaatttcctcatctgtaaaatatggcctcttccttgctttaatattctacaagtttgtgctgcataaggtgtgactgataattacatctctgctcaacaagcatctgttcaacaagtattctttaagtgccaagagcccagactgctttcaacattatcagggacacaaaagaaatgatttccttccatttttatttaaataaatgcaatcatatatttggcacattgagtgccaaacataagctcagcacatggtaggtgctataggagtttaaaaattttaagatactgtccctactgataacttcaagcatgttggaatgataatgcatatgtgaaataaggagaaaaattttaaatggcatatgattagatgttagaagggaaatgctagttaaggtcagaagagggagaaatccctgtgggtttgacccatctgagaaggtgacaaagtaggggacttgagctgactgaaccataatgttgatggttatgatggtgatggtggtggtggtgacgaacacagccaaatgtattgggcttgtggcaggtattgatatggtgcttcataagatcgtatttaatcttcacataaaccctctaatgtaggcaccattattgtccacatttaactgttgaggaaactgaggcccaaactcttttttattttttttgagatggagtttcgctcttgtggcccaggctggagtgcaatggcgtgatctcatcccactgcaaccttcgcctcctgggttcaagctattctcctgcctcagcctcccgagtagctgagattacaggcacctgccaccatgtctggctaatatttttggtatttttagtagagatggggtttcaccatgttgatcaggctggcctcaaattcccgacctcaggtgatccatccaccccagcctccaaaagtgctgggattacaggtgtgagccaccacacccagccccaaacattttatggaagaatctaaccaacctatatagcaacatcttctgggagtgggagacggggatgaagaagaaagaaaaaagtggagaagggtcttcggttttcctagaagcagcattgtgtgagtgcaaagtgaaaacatctttgtagtataatatctaatgcatgtattttcagattaaaccctctcttaaaaataacttgaggcctctctagactgtacatttttatagctataatgtactctttcagatctgagcaaataccacaaactcatctcagatcttatctctgacaacctggtttgaccttcatgatagttgggaagcctgtgttaaaggagaagggatttgaggagacttgcgattttgtgattgtgcctttctttctttgatcttctaggacaccttttgtctcctaactcctttatctcctaagactgagttctagactagcttctgtttatttatttatatatttatttacttatttatttaaagcatagggtcttgctctgtagaccaggctggagtgcagtggtgcaatcatagctccctgcagcctcaaactcctgggttcagatgaacctcctgtctcagcttcccaagtcgctgcaactacaggtgtgtgccaccacacctggcttgtttttgtttttgttttttgagacagggtctcactctgtcatccagtctgcagtgcagtgataaaatcttggttcactgcaacctccgcctcctgggttcaagtgattcacccacctcagccttcccagaagctgggattacaggtgcgtggcacaatgcccagctaatttttgtattttttggtagagccagggtttcaccatgttggccaggctagtctcaaactcctgacttcaggtgatccacctgcctaggcctcccaacgtgttgggattataggcgtgagccaccgctcccagccacgatgggctattttattttcgtagaaatggaatcttgctatcttgcccaggcatacctcaatttcctggcctcaagcgattctcctaccgtggcctcttgaagtgctgggattacaggcatgacccactgtgcctggcctcactcattcattcatttattaacccaagatttatttgttaatcacctatgatttaaaatttaatatgactaaaacatcatctttcatctaaaaaagtttgatcaggatttacgatcctggtgtcaacttcaggaaccccctatatatggatgacctacacaatgacatcctcaacctgggccttttatcctctctccatgtgttttcaggacacattttaaaacataatattctggaagcagaatgcatatgcatcgggttttccctaaatcactcgtgtcctcatttccccattttttatgaatattattcatcttcttgggcctctagtctgtcatcctttatgggcagggatgatctcttcgtttttgcttggcctcctcaaatagggtggcacgtggtgcatggctcatagcaaacttcaaacaagattgtctgactaagtcatttaaatgactaactgaatcctgagcggtgagaaggcactcagtacagttctgtatttagtctcgcagaggttgagtggcatgtgatagatgaggcaagaatagcaaaccgataaaattccatggtgtcagttgagcactcctttataagcttgactttgggtcattttattcacgtattcttcagcattcttttattgaccattgtcagaaaacctgactcaaaccaccttagcaagaaagagaaaggcgctatattaactccaatactgtgaagttctaagaccaattcagcatgttttcatggcatattagagattcaggaactcaaatgataatctcatgcctatttctctttttccatgtcttggctctcttttactctctgtgttggtttctttctcaggtaggcttttgtcacatgacagaaaaaatggccatccacagccacaaactaccttcatacactggtattttaaaggaaaggaacccctctcttccttggtatttagatgtcaaatctcaaggaacactctaattggccctgtttgagtcatgtgctcatccctgaaccaatcactatggctttggatatggactactgtaattggccaattcaggttgcacccctcacatctggatgggggcaatgacgcccctccagggccacagggaagagggagagaagtggttctccaaagaaaggaatgctgagaacaacatatatcaactatactcctcctctccctaaatccacctgccccagcattttttttaatagagatgggatctcactgtattgcccgggttgctcttgaactcctgagctcaaacaatcctcctgcctcagcctcccaaagtgctagggttacaggtataagccaccatacctggtcttttttttttttttttttttttttgagacagggtggtctcactctgtcacctaggttggagtgctgtggagtggtcacagctcactgtaacttcagaccttcagactcctgggctcaagccatcctcctgcctcaccttcccaaatagctggactatgggcacatgtcaccatgccccatttttttgttttttgtttttaataagttttgttttgttttgtttttgtttttgtagagacagggtgttgctatgtttcctaggctggcttcctaccttggccagctaaagtgctagatacaagtgtgagccaccacactcagcctgctccagcattttaaccagagaagttaccatttcttcatcctccaaaaactttattgtgttaggagattaaagagaagacactaggcttttccaagagatggctgcatttgtatggatgctgatttattcttaaacctttagacatattttataacattctcattggtggtcattggaagagaagccttcccattcctagctcacaagttttcttctcaaatattttagccttgaatatttatatagacacacacatctatatatatgtatattcatatatatatataaatgcttcaaaatgttaaattagacatccccccgccccccttcccaagtcactaccactccagggaagagcttgggaggcttgtttctcctggtgggtgtttgattgatggagggaagagcaacaggaagaaatcaccataaacaggtttatgtaatttgcagactacaataacagctagtttcaacttcatgtttgatttcatgataccatcctgcttttcattgtaagaattctgcatgtcataagtttttgtctcaagcagagcaaaacatttgtttttgaaaactgtgtgataactccacggatcaccagggacatctgaaagactgatattgagattggctttatctttaccaggacttgcaaaatcaaatgcccccaagggctaggcaggctgggtggagactgtcaaactgggtgtttaagtcccatttcaaggggcagcttctaatgggctccagcctattgttgccataaggaagcgcgtgccgtggcagatattaattgtttgctattttctggttcctttctcctccatggtccatgggaggactgagattccttgcatctttgaaattaaggatggccatgtgacttgctttggccaatgaaacgtaagctaaagtgatgtatgtcacttcaggaggaaagatttcactgctagtgttcggccctctctacttctttttctctgccatggtggctgtaaatgcacttgttgatatgaaggtataaatactgaggcatcatctataagacagctgccctggagaatcacctcaatccacagttgtcttgtgtgagtgggaagtagcctttcttttgttaagccaatgagttcggggggatatttgttactgcagcaaaacctagcttatcctgactattacatatgcccaatgttgcctgactttgatatttttaaaagagaagtttgaaatctagatttttttatatgaaatctttgctatattaaaaaaatatttttttctacaattatttttttgagatgggggtcttgctatgttgcctaggccagacttgaactcctgggctcaaatgatccttctgcttcagtctcctgagtagctgggactacaggtgagcaccaccatgcctgtcttttttagaaaaacaaatttaaggttgaagccagaaaagccagattttcagcctgccagctacgcgtttgcaattttggtctatacaatttgagtagagactggagcagcaatcctgtctgaactcctacagtgcttatagcctgtgtcgcatcattagctcttagctactctttgtcttgctattcattagtttgtaaatcatttttcctaattagatgggacatagaacaggtgagaaatcatgtcttaaactttgtgtaccttaaaggtgcacaataggttttcagtatatactaggataaagactaattgattggctgattactcagaactatcactttctcctttgattttggaggagcaggtctggggaattcattattttacctcaccatttcagttttcccctctttacaaagagctcgggattcatcaatctccattaaacttcaaaatgaaatagtccacataagtcagagatgcaaaacccactgtattaattaggacttttctaattgcaagtaataggaaacccaaattcaaactgccttgggtaagacataatttactgattcctatagctaaaacctgcagaggtcaggatgatgtcaggcatgactgaattcaggaactcaggcaatgtcattggaacttgatctgtctttccctccgtggcttggctctacttttcctcccattagcttcactctcagtagttccctttcacgtggggcttctggcagcttctctttccagcagatccacaaaattcccagtcttgtgagattttcttgggatatgtgacgatctctcaatcagcccattgactagggctgggcgtgttaatcaggacttttctagttgtgataggaaacttaaattcaaactgccttaggctgagtcacttgtctgtccctaagagccagtggtaaatcagctccatccagcatccaatgtctgcataaaggacccagtttatggcttctccctctagccactcccagaggcagtgactacgtagaggggcctagtagggagtatgtggcggaagggaggccttgaagctgtgttcttatagcgtcctatatgaaactgaaaagcatcaatagcaaataacagagaagatctaatggagattatagagaggtagaggggactaaaggcctcccaagtcaccccttggtgccacccctgtaacatatttaatttgtgggggaagcaaaggcccagtaggactgctggtggcccagccacagtccaaaacaggccctagagaggacgcgctctaaccacacaccctaattattagtccctgaatatagatcagtttagtttatccaaagccccagctgaagacacatcaagtactattgcctctgttccatgttttgttccatataaacatccagacacaggtctcatgggagaaacatcatgaggcagtttcacagtccctggctttgatctttacgctgtagtaaaggtgtcattggcctttctggggcgaagagtcatgctcttccacaagagtatcaaattactgctcattttccaatgtatattctttcagggccttgctttcttcttacctgcccacaccaatgctgtgagggagactgctgatggcgaaggtgaaaatggtcaggcaatgtcattgggacttggtctgtctctccttccattagcccacttcttttatccagaaagatttcactgcactggggaaataaggagaataaagtctcatgcactcactcacatgagagagacatgcatgttcgggtttgctcaatggcacccatctgtctcaagtcttgttgtttctttcactctgagcatctgcactccaagaaggcatgaactttttctttcacttcctttcttctatgggtgatgacctgacatcactctcagaaggaggccgaaagtcgctgagtataaaaatcgtcactcctatctggcttaggcagaaggtagggggctcgatgggtacccaggagctctggaggtaggagatgccatctagggaaccccgttctacctgagggctctgtgtctctgcctttgtatactggagggcaccatggatgtcgccttccctctggagtccccttcaccatttcctctctagaaggatggaaggtgggagtggggttggctattgaagctggaacggggaagaaggccacttggggtctgctgagggctgggtctgctcactgctgtgtccggagtggaaaggagaagcccgctggagcagggtacaagcccaagggtcaaactgcgccagcagtagagcaagccgcggtctcaggctgcagccctagcagaggtcaggctggtgcagccagccgtctcggggcctaagggcgctggcgggggccggtgggtaggggtaggagtccccaaatgccttcatctcagcccatccttctccaccgaaaaataaagcaggctggcgagatcgcctcctcacccgctcagtcctgaagtgtccaaggatgaaactgtgcggaaattctccctgtcgctctcagtttgtgggggaagcgccgggactgaggtacatggttaacacaggctgtgcgtgaaggggcttttgacttttcccccggctccggcctctcgcgtctctctcctagggctgcggctgctgctgcctggcgggcacaagccgggcggcggtgcgcggggggtgcgcttacataaccgctcgccgcgtcctgctttctcgagcgctcctgcaccgtggggtggcggagccgggggactgcatggaacccgggacgcccccgcggggagaggagcgcgagcggccgcgggaggagggcgcccaaggcggcgggggaggttaaggtcagtgggtgtgaagcgccggctccacaccccctcctccccggtcccctccttcccttcctctccgtccccctctgacgtctggagctggcagctcggccggttccgcattcccgacccctccccgccgcccaggggccgctatatagccggggctgatgcaacccgtcccgccgcccgccacagcctgcgggagggacgctcggcggccgcgacggggggcgctggcggcggcggacgctgcagcggcggcggggctggcgccgcggcggctcccgggccgggacaggcctgggcaccgggcggagctccgcggccgggcggcagcggcgcggagcgggcacggcgcctgcagccgggccccggccccgggggcgccgcctccccccgcaccttctgcacggtgggtgcgagggcgcgcgctgggggcgccgggacgggcggggcggggcagggcgcggcgcgggcacctgggacggccgcccccgcacgggcggagcgcgaggagccccagcccagccccgcggggaggctcccgcagcccagggacctcgagctttccccgcgccgggcgctgcagccgggcccctcccgcgaggcgcccggcagcctgaggcttccttttggttcccgccccgggacgggaggctccgtccgctccctggacagccggggtgctccctccttctccctcccgcgctctcctcccccgtccgtttgcagggaggtgctctcctcgggcggcggggaaggcggggtgagtggggagaaaagtgcccgcggagatgggctgtgcgggtggaggtggagggtgaagggccagggaggtgcggggttggggtcggggttagattgtggagggatgacaaggacctcctggcagtgaggaagcgcgactcccggaggacccggacccggaggagagtattgagaagggctcgggatttccatccaatgaaggcagcttctctcatggccattgcttcggagctctgggctgggaggggatctaggggtggccggggtcccctttgggctctcctgtctcccacgccaggttatataaggaggcaagcaggctcctgtaggtaaccagcctctcccttgcccagcccagcttagaaggctctcctctgctcctcccttcaaaggaggttgtcgaggggtaggggtgcagtggggggtgggagagtgtaggggtggattgggccttccacctggatccctggaccctgggatggcagagccaggctttgcctgggtcagtaggaggagcagggaagatgaggaggctggggaagatggggaggtcctggctcttttgcagggatggagaggctggtggaaggagaaatcagccgacccccttgggtcatctccagttgcaagatggcgtggcccttgcccagggtgctgccctccctgttggaatccagggcatggggctatggcccgaccacgtgtgctcagggcaaatgtgctcaggtctatatctcagaaagggcttgcagcctgcttaggcgtgtgtacccaggcttaaatcttggtggtctctccctagggtcttaattggaggagcatcaggaattgggaagctttgaaccatgtttgggtacatttgtacccaaacgtcctttaagcccttggtagaaactgcattcgcgtatcatctcccttccccccaaccttccttccctgagggttttaaaaaacacttcccattgcttttacctttccagcaaatctggctgcagcttggatggatagcttatcttcctttgcaggtttctaggggagagtttaaccaggtatcaggtgtgagcatggctctgattttgtataaacctgaggatcgaggaagagaagcaaaatctattctcacacctctgggtggttaaggttttgccttgtttagagcagggaggatggatttctcaaagactcttctgttcccttctactttggctttggttcagagctgcaggcagctccagaatcttcctgaagagctgggtgctgtgtgatttgaagggctgcaggaagtcatgggtgtgtagacctctggcttttctcctaggtgggctgcaggaagtcatgggtgtgtagacctctggcttttctcctaggttggctgcagccacctccaaggagatgtgttgcaaagtggtgacaatgccccctaggaagggtttggataagggtctccccactcatccactgcctaacttttgcagctaccagggaatgctcctcctgactccctgggtttgttgtcatctccctacctgtttgtaggatgtgtgggcatttttttccaacctgcagaatccctggcaggaataggctctctgggccttgtttgtcgtggggctactggtgttgcaatgggctgtctctctcgagtgtctgtttccagctccactctggaaagaaaggggccaacgccgactctaggccggcctgctctgtattcattcagctccagctcaacttgagcaatcagagccagggttgagggcaagctacattcttttctgcctttctgctgcaggatgcagtttgctttttttccatgcgaatgaattatgtttgaaaccgaaatgggaggaagagaaaaatggagtgagtgtatatgggtatgtgtgtgtgcatacctatataggcaggggagggcagcaggcacattatttttccattttcctttaattaaggctctgtggaggtgtgtttgaaaacagagggtctcctatgcctttgaggagggtgagaacactgttttggctgcgtcccgggccatatgcagcgtatggtggccaatgaaaccgggcctggctcattctgttgcttgtcttggcagtcggttccgtggcttgtattaccagctctggaacttaggggctgccaagctccatgtgcctgtgtatgtgtgtgtgcgtgtgcatgtgtgtgcacatgcgttcttgtgtgtgtgtgtggtttggcctctcggaactcagcagagacaaatgccttagcgacccagtcttggaattttcagactgtgtttctttacttattgctggctgtgggaggcctggccagagcccaccattcttagttgttgttgttttttagtctgttttcttgctgcagcccacgggatttagttgcagagctccatttgcaaagcttcagctggccagtggcattttttaaaaaaaagaccagggcgattatcacaccttgtgtgtgtgtctgtattaggtgtggtagtgttaacccctgccagccaccaaggaccagagctggcgtgaagtagaagggaaaatagaaagcttgtccaatggttgtacgctcccagcttcctcttgctgcctgggttaaagattcctggcagagataacttcatatgtatttattgagcgcctacattaggcagaggacaaagcgatgttataggcaaggccttggaagcatttctctggtctccagggaagagcaggagttccctgggggttggttccaggttcttctatggctgggatggctgtgcagggatcacggctgccagtgttcagtggcttctcttgaacccagctaccgctccttgtcttcttatgaagcagtgcagggatggagtagagggcacaggagatgctggctgtctgccttggggcagaaatggaaacctagttcttgatggcaccttgttgccagtgtctgtgcagctgtgttctggcctgcagggtggaggagaccttagaggaaaccgaggccgagggcaggtgctgggccccatttctgcaccttctacccagccctgacctggcaccctttgtttctgttctgcagtcaactgccaggatgcaagatggtcctgcccccttggggtttagagctggaaagtgggagagcggagaatcctctggggagaatcctcttcatggctgcaggaaagagagactagtccagaagggaccttgaggggtcatctggcactagtgcccctccaggaaggaaggccctggtggccacactgacttcactcttactatgtgcaggcactgttccaggtactttccaagtattaactaatttaatcctcttgacagccatacagggcaaataacattgttattctttacagctgaggaaagagaggcacagagaggttagggaacttgcccaagggcacacagctagtaagaagggacagagctaggattcacactcaggtgatctggctccaaaaccgccactcttaacccccccttcctcttggcctgcagagctggggacagccatctgaagagggccttttgctgctcgccttcactctcagtcttggggccttccccatcatcttgcttctcgccttctggatctcctcgacttttggaagccgcgtgacctacgtcattcagattccaagagagaggtcatcctgggtgattccttagctccaagaagaggcttggtggttgattctccaagattcatggtagcaggtactatgcgccatgacccctggcctggcacctttctgaccttctctgtggactcctgccctccgcatccggttctgtcctgggaatcttcccaggctctggctcccaaggtcccccacttctcttgttgagtctcagtcgccattgcccatgccctgccgtcgacttccaaccccttatttctcatggggcttgcccctgtaaactccctccctccttggcttgtcactctcacctccgcattctcccagcaccaaaccttgaaccttagaccgcacccacgtgcacacccattcctattcctcgtggcagcccaagccagctgctggcccggaggggagcttaccttctcaaagaggcccaggagttttatagcctccttgaaacctttgtttctatggacagaaagttcatgatgcagatgctaagtttctcttaacctgtttctttttatttacctttgccattctggatgaaaatgctgatcgttgggcactttctagcaagaacggcccttgtacctttgacccataaaacaagactgttatcatttatagacacttccattaaaaaaagatttaaggaccgggcacggtggctcacgcccgtaatcccagcactttgggaggctgaggcgggtggatcacctgaggttgggagttcgagaccagcctgaccaacatggagaaaccccgtctctactaaaaaattagccaggcatggtggcgcatgcctgtaatcccagctactcaagaagctgaggcaggagaatcacttgaacccgggaggcggaggttgcggtgagctgagattgcaccaccgcactccagcctgggcaacaagagtgaaactccgtctcaaaaaaaaaaaaaaaaaaaaaaaaaaaaatgtaaggggttaggttggtgcaaaagtaatcgcgggttttgccattatgctcaatggcaaaaaccgtgattacttttgcaccaacctaatattttacagatttacacacaaaaaatgagagaggaaaaccagaggaaaaagcttaataagttacctttagcttttcttttctctgaaatgacacttcatgttagtatctcccaggagggtctattttctagacttgacatgttttgtggcttttcttctgcttgtacaatgcagtgtcctaactgtgtgcccacaggtcactgaggaagagtagggagtacagctctcagaccttttttttttttttttttcaagttctttcctcttggatccatctggtccccattttcttcaagttggctttcagggagctgcatcataatcttaggatcaacaacagcttagggtccacggtgaccttctgaacctcgtctgtctgattcatgccttgctagtcagtcgccatcttggatgtgtgcttcacccagctttccttcattggctggcttccaacttattcctggtcagtgtcccgcattgccagtcttcttggattccaggcctatattttgaggcataagccccttttcccaatgttggtgttctgccaatggatagaacttaatccttatttatgccccctagttactcatggagacactgaggatgtttatctgcctttcagacctcctgggccctgaagggaaaaaactctgggttcttctgaagcttttagtgcgtagttcttcttttcctactaaattgtttccgtatggaacaaccagtgtgggagatgatttcacctcttgtcatctttcctaagtcttccttgaagtgggtaagttccttctggctgttactggttccttggtgctgccacctccactgccccccactcccccttttttatagatccctaaatcacatcaaattgttttatttttcaaatcactaaagttgcctttctgccttagatcgtcagccagctctttgcagttaatgaggatccaattatgaaaggcagctgctcagctcctccatcttctatcccccacccccagaaatgtttaggatgacttctggctggtgaatatcagctgttgtggttgtctcctaggaatggcatggctgagggctttgtggtttatatctgagcagttaggggctcttttgcagggggaggaaagacagggggacttttgcttctacaaaggaaagactagtgccttgtctcctgggtgaggcttgtcattgggatggattcacaggcgagcagaaatggcaaaatttatggggcccgtgctcccagggggtggccgctccttcagggggttccacagtagcagaaaatgcattatattttgggatcatttgttagtgtctcatttctaccatctgtatgagaataaacagaagctgcaaacagagcctatcattcccggaacagaatggggtctggcttccatctcccagagatggaaggcttaggcagggaaatacacagaagcctctggagtgtttttcttggggtctactgtgggaatgaataacttggaggtgaaattacagcctgataacgagcatctaagcttccagagatggattcttacaccatttgctgaattttgctctgctgtgaatttgctgtcatttgttcattcatttattcacttagttattatttcaacaagtattattgatgatgctttctgcgccagaaatgatgctaagcactggggtcacccgggcaacaaccagccctgactgctgcttaccacctggaatcacagcgctgctggccgcgtggccacatggtttgttcccggcacagttttgctacaaggaataggtcttcctgctggccccttccctgttctccttagaggaggccaggggagacgtgcagctcatctacagggccctggagcggcctcctagcgtggcaggctgcagccctctctgcattgcaggttccattccagagggctgagagggagctctcttactgccactaggctccagtccagctcagagtttgggggatcagagaacattgaacacccacatgcgagaggtctcaggggctatttctgtgtctgggctcccatgcaggctaccgtggagttattcagggaacttcctaaacctggatctccatggggggtggagggtcctctgtgcaagacaatgaccctctactgtgggctggtgtctgaaagcccaccgtgagaaagtcattccttctgctgaaggcgtcgttacctattggaccccagaaagggaaacaaagaaggaagggtgagaaagctttggtctagaaccctgggaccaggagtcgagccctggctccaatcctctccagctgtgtgaccttggggaggccatttagcctctctgagctttagtttcctcctgtcaaaatgaggatgtggtttagatgagcacagggcctccttcagctctaaaactgtaactcaatgtgattgagcctcagatctttttctgatggcccaggggacacggggtgaaggaaggagagaaaggatgtgagtgggaaggagtgctaagaggaccgggtatgggaggcacagtaggtagagcacagttagaggagcctgaggacaccaaataaaaactctggggcaagccagggagctatgggcagaggctttatgacagatgcagcaggcatgctgaggatgaaatggcgggtccacttcccattcccaggcacctcgctttagacaccttgctttagacaaagtgatggccagtggaaacctttgtgcttgagggtgcaagttactcacatgctttttctcttagagaaatagaacttattgggaaatagactctggacttggacagggaaccaaatttcaccttcaaaagtgaaatgtagatggagaatatggcttgcactcttggccaaaacaggttcacaaatgcccctctctggaatgatctagacctgggaagctgaatgggggcaggtggttgtgggtcaccctccaaggccactcctgcaggagacagagagcccaagaaccatgtggccatctgagtacattaactgcccaacggagaagtattgtccgatggacatcagatcttccctcttctgccaaatacatctctctccatgggaagagacaggtaaagatggaaggataggccaaagattttccctcaggagtgctaagccagcgaatattttgattttatggccctgggcagaaaggtgaaaagagggagaaatgatttcctttccaggactagaatctaagagcagttttgtactaacatgctacttaaaaggctgcttcaaagctaagactgcacatctgacctccatattcctagtgcctgctggcctatagtaggtggtcagtaactggatggatgggtaggtaggaggagccctttaagggactggctttattggcagaccagctttcttcactgccatctgtgccttgaaatgaccatttcttacccatgagcttcccccagtaaagggaaggaagaattcccttggtgttgacctgtctaatttacatccttcttccatgtctgaatctgtcttcccttgtacacctttttggttgggcagagctggaatatgtgtttgctctgagaatgaagagaacatggaggtagccgggcgcagtggctcacgcctataatcccagcactttgggaggccaaggtgggcagatcatttgaagccaggagttcaacaccagcctggctaacatgatgaactcctgtctctactaaaaatacaaaaattagctgggcgtggtggcaggtgcctgtaattccagctactcgtgaggctgagacaggagaattgcttgaacccaggaggcggaggttgcagtgagctgagatcgtgccactgcactccagcctgggcaaaaaaaaaaaaaaaaaaaagcatggaggagttttctggtactgggttccacagggaaagcacatgctaattaattccacctgctttgcctcagtcccttcctcatagatagcacacacactcacctttaacttagatttgcttcatctcctactcagggtgtcttaacaaatatgcagaataggatgtgtgattggaggggaggcaccatgccagaccaaaaatagcttcctctgaaacaggtgtgaaggtgcttgaggttctgccgttataattcgctctcttcagagactgtatgctgccattgaaatcccagctccaccaattttaactgtgtacaaccttaagcgaattatcattctaagcttggctacttcctctgtgtaatgacctctgatccagcctaatgggactgcaggattaccatggggcctggcacataccaaaggctgaatacatgttgcctatgattgggtcaagcattgccttcaaaataaaaaaggcagacacttctggcagtgccaagggtgaccttggtgtgagttaattgagcaacttttcctctataacaggaaggactttacggcaggaagagcagctgggtgggaaagggattcaggggaacattggtgaaagaagccacagtcctggcaagacgagggacttgagccctcctggagcccccaacctggctgactgtcctgctcttttcctgcccactccaggctggcctgccactcctcctgctatgatgcctgggcagatcccggacccttcggtgaccacaggctccctgccagggcttggccccctgaccgggctccccagctcggccctgactgtggaggagctgaaatacgctgacatccgcaacctcggggccatgattgcacccttgcacttcctggaggtgaaactgggcaagaggccccagcccgtgaaaagtgaggtgagcgagccttttacccctggcagattccaggtctggccttaaacccaccatgggaccttaaccttgctgttcaaagtgtggtctgaggaccagtatcatccgtaccaccctggggttatcagaaatgtggaatcccaggcctcgccccaggccttctgtatcagaatctgcatcttaacaagatcccccagggattcgtggacgtattaacacttgagaagcactgggccaggggaggatgtttaacctgtctctggttctctggggggcggtggaagagtgataataatgacagtaatgaatagtaatatcttggccatctctctggggtggtgggaggattggggagataatgggaatgggaatgtgtacatgttttgaaaagtagacaagagaatgccaatattaggttatcttttaaaattgttatcattagtcacatcgtgacctccacccctcttggccctttctgcagctgaaccagggaacttggaggaagagtagcgtggcctcccttcccaagcagctgccagagctaggcatggcctcggtcagccagcagtgtccgccttagatggcgtttgcccgggacccacacgtggagcacccacatgtggcatttgcaaggaattcctcctcaggtcccttgcacctgcagctctcatgagccctttttctcggggcactggtgagcagcagcagtccccggcatggctgaggatctgtgcagggcatgcccccggcgacttgcccagggctggccgtttctctgaaggcctgtcccagcaaggttcccagcagcgccgtttcttcagaggcctgccagagtagctgccccctggaaaggaggagcctgtggtgggaggtggggaagaggctgggatcgggagggcgcaggaagcagctgagcatctgggaatggtagctctgcttggagggagagttcacaggcaaagatgagcctggggggagctcggagggctgaagtgctggaagtgctggagagaggactttcttcgtggagaagggtgtctgggtacccgtaggggagagctggggatattaggcaactatctctcagctccccttctcctgataggtacctaaaaactgcagaggactgctgggggcttggctgtggtggcaaactggccgtggtggcaaactggccatttgcaggctggacctggctctcagatgtattttgtttggccggctcagtgttttaaaagaaacgcgaacccccatttcatttgaaaattttgattaaaaaattgtaagatctcatcatacactaccctgttctggcatggtaatggctaagtggggtggacagaggcacttcactgtttcctctttccagtgggccacaggcccctgcacctccctgttattcgtgatcctacttacattgttggttttgcttttgctactaccatctgccttcatttacctctactgcctggtccctgttagccatttgtgctcaagacacgtggataaggtccatcataggtgcctactaaagactgtggattacaagctgtgagttgatggtgattacattcttctgaattgatcttgtaagccaatgtgtcgttggggcacatcccggcttatatagtgttctgtcttcacgatggagggtccttgtcttttggccctctgctcctcaccttcccaggtctgtaacttgagagcatctgtttctggatcattccacagtaaaattgccatttagagccagtagctgagcagtttcatgggggcactaaggctgcgcatggggttgatgaagagccaggtgtcttgggcagaggtcgtcaagctgggattcgcctggggggctgagttaacacctctctcctctgcaaaaggcactggaggaactcttccctttttttattttttatttttggaaaagccacttttatttgggttgggtatttttacattttacagccacccccaaattggtggcatctgccctgtacccgacagtgacgtgctgtcctcacaggcacccacagacgtgcaccatccaggccgcaaaaataacaagccgtttttagggcatatttgcatgtcctctccctcgctgtcagactgcagtgttgtgggggcgaagaggcagatggagctgcgagattgtaccgatgtagagagatgccagccctgcactgcgaaccgacctccaaatgcttcctaggtcagaccccaggggcgggaagagctaattcttggagtaactaaaacctaaagcggggtggggaaagaaacttgcagctgaagaatctatggtctgaagatctatttgcatatggcaaactgccttgagcggattttcatattggcattttagactagtaaaagtttctttaataataatcagatactagctcattaagcatttaatatgtcccaggacctgcacaaagtgcttaacatgcatgacttcattcattccttattcagtcctggagtccaggttacccccatagtagagaagagtttgaggtctagggagggggttcagtcactcagggtcacactgctgggaagtgatagcgctggggcctggtgtggtggacgatggctgccgttacagccgggtctcacttgtgctgagctaagccctaggcacggtactaggtctctttgtgaagtaccttgtttaccctgcacaagtaccctctgaagtaactagtgttgttgctgttgttatacccacattacagatgaggtcaacaaggctgagggaggtccaaggtcactggctgggaaatgagctcaggcagtctgccttgagcccaagctttaaccacatgccgtgtggcctcccatgcctctataccccttccaggcttctaaccagagctctgttgagctggggaggctggatgaacctggccgcagaatgttcgatcattttgatgacattgtctgatgagtgctgagccctgcagtcctgcagccttactgtctcctagttccgagagagagagagagggagagagagagagagagcgagagagcgagccggctgagccgctgtgcgggcagctctgtcagagctggttcttgggttgtttgccttgcagaggccagcagtctcctgggctctgtccaaacgcatggagcaattcagtaaaagaaaatgggaggaattaagttcaacgacaggttttgtgaattataaagtgctttgtgctgatgtcattattattacatggtcaacacatgacgttaaactgttttggtgccaactgcttgcctgcagtccctttgttcaagccatatttgttaagcatctactatgtgctgagcactgcaccaggcactgggaacagagctacagataaagcagtcaaagccttacatctctcggcaccgtatattgcagtgacggcatccaaaagtaagcaaattaatacacgatatataaggtgagttagtggtcagcaccacgaagaaaaattaagcagaccaaggacgtggcagtggtaggactgctcattctgatggttggccagggaccctgggaacgtcatttcctgggttgtgggatttttaaagctgttgcttctttctcctttcttttctagtattcgctttcaggacagctttgctctctggctttctccagagctttccttccttgacttttcctctgtagcccctcacagctggactcctccaccaaccagtccctattggcctgaagatcttggcccttcccaggtcatctcccagcgagctgtggctgtggtgatcacaccctgcctctgggtctggaatgcattttcagttgggaggggagggaggcctgaagccccacccttgcacacacacatagacacaccagacacttactaatcaacctgctagacaggacccctcaccctctcgccacgtctcggtgctctagaggggactcaagagttcaagggagactaaactggatgacctttcaggaaagaggctgcacactgtcgttaaggggcaggagtcggcctacagatgaatcttgttcacagggtggtttgctttttctttcttttttaacaaaatcacagtgtggttttctttttcttttttaaaaaattgaatgaattgccatatttaaaagccgggaaatgtggactctctggcttcttttaaaaaaccagaatatctacccacttaaggccacacccttatacacaacaagaggttggagctgaggggcagatgcctgctgtatttgtatacagccttgagttcaccgcattccccactactcactgatgtcttacccccagcccgcttcataccatctgtgttgccagcctgattttgagtctgtgtcccatgtttatgtcccacagaccttgcttgtttgtttgaacattatgagctgtgtcaacttggcaagtcacttaaactttattccttgatcgctctacctcccaattcttatctccagccattgttcattaggttttgctatttccaaatttcgttgacttcaggcagaaaaaaacaaaatacaacaaaaatcaaaccaatcattcccaaacgtggctggtcatcaaaacaccttgggaaacttcttaaaaagtataaatttctagacctcacccaaggtccatggaatcagaatatctgagggtagagtcctgggaagctgtatagctagtaggctcagagatgactcagctacttttgggaatgtgactctttgcggtttcttcctctcctcaggctcttctgatccttgtcagggagctttctgggggtgtcaccccgaggaatcggtgcatacgtatcattgtggactgccctttccaacgtagggcagtttcctgtgtgtattccacatggggaccggatccgtgtcctcatcattttcagagctggagaggagacttaactgtctgtggatttcacattggcgatttcccatcttctccagggtccctggagaacattgagagggttttcccgttttggatgaagtgtgaataggaatccatggaccagagagcggccttggaagccatgttcactcagccccaggtggtcttcccagactttgttcataacagagaccaagacgtgcatccatgtttagcctgagcagaaaaagttgccccaaaccagctgatgtgctgggtaaatgttggcctaagcatgcttgtgtttttagtgatttgaaacgtaaaggcagcccactgacattttttagcaagctttgcataattggtttttaattgtggctctttggaatagcattggccttcttccccctgactcagatgctttttttgtctcatacttgtttggcagagaggtccaatctgtcctctcttggaacagaatctcccaactcatctttgaaatccgtaatttccactttagttccgttactttgttagcacattttcgaaagctgttagcttaaaaaaaaaaattaaatttgagggagaatgagtgatagttaaaggcagctatgagtgtgtttaacattggcccctgtggtgttgagtcttatttgataccatatccagagcattcacaagggttctgaagcttttatttaaaatcagaagtcggtcacacccactgttatcctagcacagggtcccttggagaggtggtggtgaggacgtggctggatctctatgtccttagcagaaatcagacacctctgaaaagctcaggaagtcttacagcttcttaggttttctattaatatcttaaagtgaggataataataatacctacctcttagtgttgttatgaatttttttttttgagacagattctcactctgttgcccaggctggagtgcaatggcatgatcttggctcactgcagccttgacctcttgagctcaagaaatcctctcacctcagcctcctgagtagctgggactacaggcacatgtcaccatgcctggctaatttttgtattttttgtagagatgggggttttgccatgttgcccaggctgtttttggactcctgggctcaagcgatcctcccatcttggcctcccaaagtgctgggattacaggcgtgagccaccaacccctgttgctgctatgataatgaaatgaactaatgctgctaaaggtttcacatgatgcctggcacttagtaagacacagatataaggtaggcttgtgactcacttttcaaatgtgttgatcgtgcaaagtagtttttataattgaatcaaaaacctgtttcttgggcttgtattgacctgagggtattttgtcctcggagatggtgggtggtctgaggcgttgcaggagcagggcacatccaggcttcctaaccagaggggctacttctggggcctgggaagagttctgggcttgggtgcaagttctgggttcaaagtctggctctctcgctcattcccagcacaaccttgggaaagttagctcgtttcctcatctgtaacaggagaaaatccaaactgccctttccaaagtagtacagtttcctgcacatactgcacatggtgactggatccacatcctcatcacagagcttcatcgcgaagattaagtgaggtgctgtgtgaaagatgaccttgactgcagtgcagtatgtccgtaaattacctttgttagagactgattccatgtgtagtgaactacctattctgacagcactaacctttctgaagtattagcctatgacctgggtttcagggaagcaagcagactttccagtttctggttgtttatgcagtttagacgcagctggagttttaattatcataacaaactataaatgagaaggcttttcaagcctctgttttcccctaagctgccttctgtgaccccttatcttgtttcctgtggtgttaatgtcatcgttgtattcccatcaaccaacaatcttttagcagccttaagaagggctgtcaagtcttctgtcaatcctaccatcttactttgatgtttccaggtccaccggcaacatggactcagagttgggaaactgagtcctctcctgggtgaggctcatctggctgaacaactatgaagccatttaagtctgttttccttctactgtgcccaaaaggcacaaggcaacctggcctgaggttggagcatggagatctagaggaactcatggatggattcaggcgggatgtgaaagtgctgggagtgagggcctgggcctcctctgggtttagccacccttccaggttgtgtacaacctgccatatgctggggctcattgactgtgctctgctctgtggctacaggatccccttttactgagcgtagtgcatgtgtatgctctgacaaactcctccgtggtttgcctctgtagtcctccctacaccctaccaactccccagtccccgcgaataaaaacccttgcctttttggaggcaatgtagcaaagcaggactgctgcattggaatagtttggctctggagagttcactagatgtttgaaattcagtttcgtcccttgtaaaaataggggaaatagacccctacctagtacctagtaccatatacatatattatctcaaaatggatcgaaggcctaaatgtaagagtgaaaactagaaaactcttagaagaaaacagctgtaaatctttgtgaccttggattaggtagtggtttcttagattttatgccaaaaataaaagcaacaaaataaaaaaaataaattggacatcttcaaaattaaaaactttggtacttcaaaggacacaaagtaaaaagaaaatccacagaatgagagaaaatgtttgcaaatcgtagatccaataagggacttgtatctagaatatataaagaatgattacagctcaataataagacaaataacccagtagaaaaatgggcaaaagatctcaatattaatttctccaaagaaaatatataaatggcaactaagcacatgaaaaaatgctcaacatcatagccatcaaggaaatacaagtcaaaaaccacaatgagatactactttgcacccactaggatgactatagtgaaaaaaaagagataataacaagtattggtgagcatgtggagaagctgtcgtcatgaattgatcgtgggaatgtaaaatgatgcagccactttggaaaacagtctggcagttcctcaaatggctaaacagagttcccatgcgatccagccatttcactcctacatatatttcctttcccaacagaaaggaaaacatgtccacacaaaaacatacatgagagtttacagtggcattattcataatagctccaaagtggaagcagctcaaatgtccatgaattggtgcatgaataaataaaacatggtctatccatacaatggattattatttagccataaaaaggaatgaagaactgatacatgctgtaatatggatgaaccttggaaacattatgctgggtaaaagaagccagccacaagagaccacagagtgtgtgggtccatttagatgaaatgtccagaataggcaaattcatagagacaggaagtagagccagtactgtggttacctaggggtggggagatgggaggagtggggagtgatggccaagggatatgaggtttcttttgggggtgatgaaagtgttctaaaattgtagtgatagttgcacaactctggatataatacaagttggtgaattgtatactttaatggacaaattgtatggtatgtgtgagtttgatctcaataaagtgcttttaaaaatggagaataataatatctgccttacagggttgtggggaggctgaaaaggaataatgtatacaaatcccccagtatgtaacaatgttccagaattagtagctagggttattaaaacccccttttagaccagcggcagtgaagaagccttttttcctttttattgctagtatctatccaggagcaaggagaacaatctgataggatttaatatagaactagggaggatatatggtatagaatagcagtttctaactctgactactgattagaattccccggaaagtctttcaaaaatattgatcctgattcagctggtctgagtggggctggcaggtgttctaacctgtagccattagctgaaaacctggtaatccagttaagaaaccagcccagttctttgaaggagcgaggacatctgtgttcaggtcagaagtcatacacaagcaatgcactttatagtttgcaaacttcttttgtagacgtcatctctgatctgttccaacaaccctatgaggtggtgttagtagtatgagttgttagagagctgacgctcagaagattaagtcacttgccagggtctcattttttaaagcataattttatctattattaaaaaaaggcaagatccacacacatgctcatacctattagttatcagacctaacaccttggagagcactgccaaggtgacagctggtgccaggttaatctattttacatagacttcagcacaaagctcttcctgctacttcgcattaactgatgagcatcctgagagtggaaagcaagctgatgaggcactatctattatctatctatgttttttattttttttgagttggagtctcactattgcccaggctggagtgcagtggcgtgatctcggctcgctgcaacctctgcctctggggttcaagtgattctcctggctcagcctcctgaatagctgggattacaggtgtgtaccaccatgcctggctaatttttgtatttttagtagagatggggttttgccatgttgcccaggctggtctcgaactcctgagctcaaagtgatccacctgccttggcctcccaaagtgctgggattacaggcgtgagccactgtgcccggctagctagttagctagctatcacctacctaccatttgtaactaactactaaactgaatgcgcaagaaaaacaaaagacaggaataatttggatacgagattatcagaaacctgcaactatctcagataacctctgagttaaaggttttgcaccagccaaaacatctttttgttctcattgaatgactataataaggatatgatgcaattgtaagcccttaagtaaaatatataccgccttaacctgttgagtattttgtggtatcatttgaacaagatgtttctgttgctgaaaccaatagatgctacttaaagtggggtcagcatctgggagcttgttagaagtgcagattcttgggtcttaccctaaacatactgaagcacactctctgaagggtggggcccagaaatccatgatgcaataagccccccaggggattctgatgctctctgcacatgtagagcatgtctccatggtcaccccttccagctctgactggccatgattctatctgagaatggttaaaggatctaaaaccacatttttctcaacacctatctcaagcttcctagatggatccacctgccattggatactcattaatgcttatggttccccgaatctgtgtaaggcaggggttgctttctgaatcagcaaacaccttagcgtttccaaaccagttatttccatgtcttgagatgctcaacattgccacgtccacgccctaagggacttcccaattaattacgctgccgagcttgtcaataggctggttccttcattgttttagaaggaagaatcagagaagctgttctcatgccaaaggaaccctcatttgctgccactgacccagagttctcagcagttctggtctgataactgaggatccactccatagccctggcaatggggagctctgtgtcccactctatctgcctcagtgtggcaaagcccttccataccttctctctgcacctaaattgcatccatctccttaaataaatcactcttggtaaaacccctcttccatcctccgggccagatatccctggctgtgaacggtttggccctttcacctcggtagggtttatattagctggtgttcagtattcttgatggggaggttgcctttgctgggagatttgtctgttatctgtgccttgtgcttgaaagaaattggatgaaatgcatgttttagccacacaccctgcatacagattaaatggaactgccttggtagagaataattaagccaaggaccttgtttttcaccttcatgatgaaagacaaatgacttccaaaggctttaataagatggaacttgaaatgttctcctactttggccagcttgggactttcagaacagccttgttcataaatattctgtgcaacgactgcattttcatttaattgtagatagagtcattttgcaggagctcttgtctccatttttgacccagtgtaatcaaggcatattacaccatttgttgttgttaaagagtcagtttcagctgtattattaactctttgagaagaagacagatttttccctgccagatgcattctgcttctcaccagtcttttgggggtgatgagggtcttgtgggggccaccatttctctccttttctcatcttttgaagtgactgtcaattggacaagaaaacagattgattgcctagtgggaaactagaccccactaagtcataaatatgaaatgggcctgaaatagacatatttcagcaaaagacatccttccccaaatagctcttctctagcaaaaggatttcctagcaatcatcatcgctttttctcttcagtgttaggttttctgtctgtgccaaggtgatttttcctgtgtctcctggattctttctcacttttgtaataacagtgtttgctctttccttagcaaaaccggctgtaaatgggtgtcaccctgcctagctggctttctcaggctttgttccaaacacaatgctgtcttttcttagccgtggaaatggggctgttctccactggtttttgagagaatggccttttcctattctgttcatataaaccagcctcacacctcggcggcctgttgtttttggggttctcttaatgcaaaagaaggtttttactatggacaaggggagttgggagggccctggtcagagacatgctgcatctggctgagatacgaggagactgaggagtcagtttggaaggatccacctgtgggctctgatgccccacaaagattgtagggtgtcaggctttcagttcatacagaaggtgtcccctgcctcttcccagaaagcagtagccttccagttggtcctgtcactgtccgacccaggaccggggcacactcattccccttctctgaccttgagttcctggcctgaggatgcagccaggatctagggtctctgggtcttctcagttgcagaatctaaggctggagcttagtttgcagccctgcttcccacactgtttcctgcagatgctgtgcacacagggcaatggcttatccacccgtgcccccagccatgggagccgagtgactcatcttggcaggtggagccattgcctctgccagctcttgttcagagccttcacctggtggttggctgagctgatttgagtgagcacagcgtccagtgtgtgggtttgttcacaggtgaatgtgcttgattacatcctgctgttgggggcagctgaagtgaagtggaaagaaccttggacttggagtcaggagtgtctgggttcttgcccaggtcaccagctctgtggatcaggcctcccttcctccctaaccacgcaaggtgctgagcacacaaaaagtcaacaagatgcagactttgccctcgtggaactcccagtttaatggaggagtcagaaactgtgaatagaatataatacagtaggggccaggatacgctcagagcagagggacacctcctcagcctacagggcgtgaaaatcagggagggcttccagtgggaggtgatgctccagctgcatgtacaggagacatgagaagtaagccaaggggacagcagggcaaaggcatgaaggccagggaagtgtatggtatatggcacctcagtgtttcaggagcatagagcggaaccctgggatcaacaggtggtaagaccacagcaggtggggccaagtcccagcaacctcatttgacataggagcttgggcctcatccggagggtaaggtgcacagtaactgggccagatttgcattttagaaagatccttccgatggctgggatggaggatggttgtgcaggatctggaggcctcctggggggctggggcagtggtcaaggagagacagtgggcctggaaagtgacagtgggggtggatggggggagcaaatctgacgaagatttaaaatctagaattggatggctggcgtgatcaaaattggagataacaagagggacgggggtgtggggaggcaggtagtgagccctcagggacatccacgttgagcgtctggcccagctggcacttggatatttgggtctgcaaatccagatttggttggcattagtgtatgggtggtggctgaaaccacgtgagtagatgcaaacggagatccacaggccgtgcgtatcgagtgaggagagtagcaggccaaggatgggacctggaaaacagcccggaagggatgggaaatagcaggagactggaaaggcaaggtcagaggatgggcaggtgcaggggagtgggtccagggcatggaaaattcaggaaagagggatgatgcacagtcaggcagagcctcccaggaggatggaccaagcagtgtcctctgggctggtctgtgaagacccaatccctgtcttgaagagcaagccatttccttctctgggactcagtttcctcatctgtaaaatctagggattagccttggtgcttccaagagcccctggcactaagcgtctgtaaaagcagaaacttcttttttctttttttcgagacagagtcttgctctgttgcccaggccggagtgcagtggcacaatcatggcttactgcagtctcaacatcctgggctcaagcaatcctccagcctcagcctcctgagtggctgggactactggtgtacaccactgtgcccagctaagaaacttcttataagaaattagggggcacccttcctacatccctcaatcaggcccacgctgcccttgaaggctggatgaatgaaaacccagagaagtcagagctggaaaggactttgcggagattttagtccagcccaccgtgtggaaggtagcctgatggaatggagtcaatccctgtcttttcccagcttggcagccttgggcagacactccacctcgctgagcctcagttttctcacttgtaaaataaggcccctgagacccaccttgcagatgtgtttgaaggtcagtgagaaatgggagctacttgtgcttattaaagatgagccccaggaccggagaggtgacctgattgactcgaggtcacagagcagggcactgtggtgaccagagcccaggcttctgaggacaagcccactagggtcagctgactgccagaggtcataaatcagcagccgtgggccagtgcagcccacagatgtgttttgtttggctcatgcggtgttcctttcaaaatggaatttgttgctgacattcaaaattgggagattttacttcaaaaatttatattttcttgaaaacttggaagaattagcagcactgagcctgcatcccactggggctagtgtcccctcccatggcaggaggggtggccaccgccccatccagccctcccccctcactaatggtgagttacttgcttgacccctgaggtgatgtgagtctgcaaccccagccttagactgaccatttgtcttgaattttctcctaaagccctgcccgctgttcactgaaacagctcaatatttcacagctgaggcccagaccttggccactgagtaagaaggcctggcaagagatgacgggagagacaggagggcagagagtttccaacagctcagccccatgggggatgctgggagggcctggcccctgcaggctgccgggggtcagcaagggagttggctgagggcccctggggtttcctcattcctccctcctggagtgggaggaggctatgggcctagccggctgggcaggctgagatcttgtccctgaattgccctactttgttgatgggggttgggggagtggggagggactgcagcccctggcttagtgcagccctgtttatgtaggggaatgtctggtatgtttggtatttgggtgtttacttcccagggtgctcatgggtccctggtgttgaaatgtggctcctccatgcagggggggccctggtgggcctggctggctgtgtgaggcctgaggctagatttggaggctgcggggctgttactccaggcctgctcactgacaactcagcacgccctgaactccccagcctgctcctccctctccgcagtactcctttctgtgccgcattctgcccggaggcaggccagtgtgccgctgctgcaatagcaccacctccgccttgcctgcgaaggaaggcagggaagctggcatcacggaactcttcctgtgctcccggctctgggctggaactcagtcctcattactaccatgtgcggcagggctcagtaccttcctgtacaagtgaggaatggaggctcagagaggccaagtaacttgcccaggagcacacagctggtctacagcagagcttctggaggaactcaggtcttaaagaccaccccccaaccccaccaaccaaagctcacactgtcaactctgatgccacaagtctcagattagcctggttctgtctgcccaggcaacaattcttagtatgagacagaaccctcagacttgggctactctggttagtgctgggggttttggtttttcttttgtgtccatttttgcttatcacttcctttatttctttgtccatgtgagagtttctgtattttcagcgccttgggttgagaatgtaatttctctttctcattctgtctctctgtgggtcctgcaagctatgtttttgaaaacgcttatgaaaagtcagaattcaaaatcacatctgggctgctgtttgtcacagtggaaatgccgcgccacctgcagacggggcctgagaaacacggaaatgggtgagggttaggcccgagaggagctggtgacgtcccctcctttaagccccctcctttaaaccatggagcttgaatgttacaccttcatgtaaattgtgcaataatgttttttaaaacatgttaaaaacttctaactctaaaggcagtgatcatgatcagaccacccaccccttgaagagcaggacgtgctcaggccctgcggcccaaagacctggatacgagtcctgcgctgtcactgagcatctacgcagccttgatgttcttagtttcctcatctgcaaaagtggggaagctgaatagagctgtgctgggtgacttactgagatggcaaattaaatgtagttaatttagttaataaacacccattctgtgccatgctcagctctggtggctgagtgacagtggtgaaggtgatgatagactgagatatttatatagattaactatgaatagattaaggttctcatgggaaactgacaacgggcaggcaaacatgcatgtgaaaaagataagtgctgttagtgaatgcaccttgaaggaaatacacagggagatagtaacaggacagggcttttagtttggggtggtcagtaaagacgtcaagaaggagcagcaagtacaaacccgggggacagggaagaacttgtcgttttgagggagaggaagaaggcccattgttggagttgaggggtagaggagggcgatgtagtggaaggtcagagaggcaggaggagccaggttttctcggttctgtgggccacatgtgttggaagctgttggagggttgcaagcagaggagctgacttgtgttttagccaagggagagccctttggagccactgcagccgtccagtgcagaggcgacgagggcttggaccaggctggaggcagcagggatggagaatgtggtggacaccttagagatgtattttgcaggtggaatcatgacaacctgctaaatggactgtgtgagtccttaatcggctccagggcaaacttctctgggcacacaaatctgcgtgcgcatgtactgcatacagatcctgattcagtaggtctgggtggccttcaagactgcatttctaacaagagcttgggtgaggctgattgtgctgttggccaaccacactccacagtgcctgactcctggcaaacgtccaggaagtgctcgctgtggggatgaccacgagccctgtaggaatctctcaactgttgctgtcattgactcctgcctgcaggccgtgactgggtccaggactgggggtggacttatgtaaatcacagagatagattcatacacgagatagtcttgtttgcctatcagatccattcccgttttaccctgctctgtgccccaggtggctcatctcaatggaccacattacccaggagtccttccactctggcttctggttgaacttggccattaggaggtaccagccttagaaaagaatttgggatattcattcccctgatccctccctgctgggcacccattgggcagtggtgtgttcctctaccaaagagcacagctcctgtctggtgaccctctgccatggctaagtgacagctctccctgggttccaatcatcactcctgaccctagcctcaggccggaggtgttcgtgactccactgctgctggtcccgggttccctaagctctgtccaccccctgtaagtagttccctcattaatttcctttaaataaacccctgtttcctgctgggatcccctagtccaggggctttggtaccgaccgaggtgacccacctctgccttttattggcggctgcttaagggcccttccgcatccaggctctgctgctttctcagcggttttaggaatgttgctgagggtgggatttcacccctggtcactggggaccatcttcagctcctccattagcccctggcatcacctgacctccaagggtagaagcttggtgtcccaggcatctttcagtggcatgtggcagaaaccttctcaaactcccttcaagccaagggaggaattttgacagattcatagtcccaatgacaaggagcatagtcagtcctcaccagggtggcatcaagaggaccaagacagcgtctttctctgtgtgtcttctgttgattgttcctctgtctgtgccgttggcttctgtccacatctctgcatgtttctctccctgtggcactgcctctgtgtctctctctccccttcttcatctccgtgttctgtgtgtttctctgtcccactgtctctgtctgtctgcctgtttgtcgggagtgctctgtctcagggcctggtgaggtgagcaagcctgggtgaggtgcccgggggcgtggcatgtagggaggtgcttcctctttggtgctgaccctgcacttgcttaaatgtgtgccttgggcaccccacctgctttcccctgctccaggcccggcttttctctccatccccctttccctctctttgcctgtttctttgtctccctgaccccgtcttggagctgagtggttgtttctctcttggtacgtggtctctggtctctgctcaccctaaacttcacagcccgatcttcctgcctccctgtgcctgggggtgaagttggttgcccggccctgcatgacccctcagtccagcactcaggatctccctgtccaatttaaaattccaggagagtgagtacagctcggctcagccattcatgcctcgtccagtcagctgtggcaggggcttgagagcaggctgtctgaggaggggtctgggtgaggcggggctgctctgcacgagggccctcttggtcctgagtccccaggtctctccatccaatgtgaagtgtggcacagcagtacccctcactgccaggacccggatggccttgcccttgggccttcctgggaaactgcaggaaaacagagccaacactaagtttgagaacagggaaaagcatgctcccctcccaccctcagcccgcatctcatggttctttaaatgtattgagcgtcaagctgcctcctcttcaaacatcctggttcttccagctgtatctgcggaaacaaatcattatcacccagtttggggttctggtttcagatgtcagagccatgtgtggtacaaatactctctgccgtctttctcccacacatgggcaaatgctttagagaattcaagaagcaccaggaaggaggaggcagcagccctgactctggggacgaaggagccccaagaagggctggggagagtctccaagtggtccctgtctaggggtacagatggcacaggccatgttagctgtggggcatgaaggcagaggggatctgccaaatgcctgtcttgtttctggtagggccttaacagctgttttctacacctctgggcagctcttaaatagcagtgcgaggatttaggggtgatgcagcacagtttcaatggggaaggtatgaggatggggctttgggatcacatcttgcctcattgggagataccagccaaggttgggggcatgggtgcaggaaaggcctggggctgggcttggaagctggtggtggctgtggaactgggggctctaggcctcagcacacaccctaagttttttcctggcctgcttagggctcatgcagacttgccatagctgtcaggggcctgtgcccccaaatctaaactctgccttcagccagtgtgcttctagggaaggcaggctcccagctttgctggcctactacaaacagagagaagaggccaccccggcagagaaagctcccgtgagcgctggggaaaaggccatgcagatgcaaacgggtgataagtcactttgtaatgaaagaatctaagcctgtagcatctctctctggaatcctgaattccattcattcatctgagtgacatttgttgagcccctcctgagtgccacactctgtaccaggtgccgggaatgctcaggtccggttcttcaggctagcagggaaaacaggcacccacacaaaccgacgcttgtggtaggatgcgatggagactcctacagtgctgtagcagcaccaaaaaagcagcggattctttttcttttttaacttttaagttcaggggtacgtgtgcagatttgttatataggtaaattcatgtcacgagggtttgttgtacagattatttcatcacccaggttctaagcctagtagccaataattattttttctgatcctctccctcctcctaccctccaccctcaagtaggccccagtgtgtgttgttcctctctgtgtgtccgtgtgttctcatcatttagctcccacttattagtgagaacatgccgtatttggttttctgttgctgtggtagtttgctaaggataataacctgagctccatctatgttcccgcaaaggacatgatcctgttcctttttatggctgcataatattctattgtgtaatatgtaccacattttctttatccagtctatcattgagcattcaggttgattctgtgtctttgctattgtgaacagtgctgcaatgaaaatacacatgcctgtgtctttatggtagaatgatttatattccttggggtatatactcaggaatgagattgctggattgaatagtatttctgtttttagctaaaagcagctgattctatctggggagtcaaaggacccttcctggaggaggtgatgtttactctcgaggttcagttaagagtttaccaagtgggaaaggaaggatatctcactcaaggctgagagggcctggctggcttggagaagggtgagacatttggactagagggtgatgcaggaggggatgaacgtggctggagaggggaggaggagcggcccctgacctgggcctcagcctggcccagttgatctcttaaactttcttccagctctgaatctttttgcattgctgctaaagcagcttctgtctgcttctgactttctgtggaataaggccctgtgcaggatgggggtagggattgaagccttggagggcagaggttggttgctcaggggaggacacaaggccttgcagtacccaggctgcacacatcaccttggcagtttgtgggcaaaccctcctggccgaagggagattgcaccgccagccacttcctccagttccttccctctgcctgtcgtcacggttaccttggccttgttgggggtgaggttaaggttgggcggaatcaatttcagccaggtttctattttcccagatgcaggtcagccagaggagctgtcacttctggttcagtttcaaagaaggccaagggactgggaggtgcttgggtgtggcggtgttgacgaggcgcctctgcagctgactcccaggtggggtgggagtggggcagggagaagctcagaggtggtgaggaggcagaaagggggctgccctgccaaggcctgtgccgatggccatggtgctggtctcgggcccaggcgctctgtcctgagcccccagagcatgctgggagcgtgcagagagaggctgtttattttcctggcctatagccctttgggctgagaccttgttccaggccttgggctgccagagtcaccccccacaccctcctccctggctggagaagtgagagagttggcaagcccaggacaatccaacggcttctctaatggcctatgactctggtctgtccccagcccagctggtcctgggtgtccttcagattttcctggtagatcacctaccaggtaggtaggcaagaggcagcaagaggtgccacatcaaagtgctcctgatggactggggctgtaagggctggtggtcaggagcagggtgcttgaaaccagagaaatctgagtttgaatcctaatctgctattttgtagttgtatggccttgggcaaattgaactattgagcctcagtctcaccatctgtaaaatggtacagtaatagtaacttcctcataagactttgatggtgaggattaaatgacatgtgtttaaagcatttatcaaagtaggcaacaaatggcacctcttgttattattactaatggagcaataacaacagcaactttgattcgaagtctgtgctagtgggcagtgagtctccttctcccccattccaggggtcgtatttcacgcatggtgagtttattaacatgtcctgagggagaagcaagcccggaggctcaggaggccccttgcttgttccccagggtccttcagctctcccacaggtgggcatcctgggggaaaggattaaagccagatgaggaggctggggagactgttagtgacaagaggaaatggatcccagcatttggaaagggccaagaaaggaacattgggtatggaggagcggggaagatcttaaatcccaacagaaggtaagaggagaggacaaagatagtcaaggaggtgggaaggtggcagtggaatgtggaacctgtgtccatgcccaagacgtttttaaaggaagtgcctgggaaccactggcctggaaaattgtacccagagggcttgggctgggcaaaagaaaaggtcgtcaccgcccgttgggtgccacctctgtgtgagtagatttgccaggctcctggcctcctgaactcctcatctggctttaatccttttctctgcttttgcatattcttcccccagaatgtccacctgtgggagagctgagggaccctgggggcagaagcgaggggcttcctgagtctctgggcttgcttctccctcaggacatctgaacctggatatctgtcttagtccattttgtgttactatcacagaataccaccaactgagtaatttataaagaaaagaaatttatttctcacagttctggaggttgtgaagtccaatatcaaggtactggtgtcttgtgagggccttcttgctgcatcatcctagggcagaaggtgggaaagcaagagagtacaagacagcaagaaagggccaaatttccttttataacaaatccccttttctaataacaacattaatccattcattaatattgttactaaccacctcttaaaggtgtcacctctcaacactgttgcattggggattaagtttctaacacttgaagtttgggagacacattcaaaccagagcagaatccctgcccgtttgggctactgactcctccctgggatgctctgagaggatccttggactggctgggaggtatttccaactctccaggcagtgggctggcagaagtgatcacttgttcactgccgagatgtgggttagaaaggcgaagttgtccctctgtctatgtgtcaggacagaaactgtactccaagcctgcctcagtgtctaatcagtggctctgtgccctcacagctagatgaggaagaggagcgaaggaaaaggcgccgggagaagaacaaagtcgcagcagcccgatgccggaacaagaagaaggagcgcacggagtttctgcagcgggtgagctgaccgggtgggtggggaggcctgccattccttggagtgagcttgtgtactctggaccaggagaggccatcagatgtctctgtagtcaatgagcatctgctggcagctgccaaagcagccttggcccctctgctctttcctacctcctgtttcctccccaatctctgaaccaagacaaccaagggcagccttcagcagttcctgcccacacaacccctggaagcccaagaaggaaggaggagccaaattcccctccactgaggttagacccttggtgctgattgacccagatggcccaggactgccactatctattttggttccctggtggctaccaaagtcgtctagggtgggtgccaatgaagctaggtagtaacatcctgcatgtgggcactggacacagcctctggcctggctaactttgcacagagaaaagctccttcccttagctgcaggtgtcttatccagccctgcatgccatctggccagcccctcagctccactgaaggtgacctccaagctctttgctgctacctctgggaataagaggtcagctctgcatgtagaggtcagccaggggttgcttttcctcctggccctacctgccctttcatttggaatgtgccaagcaggatgtttgttctttttctcccaagtcctgcctctcagagcttccctgcatctcagaaatggtggctggcagtgagggaacatgaccagaaagctaatcagtccaggccaggagtctctggtctttccacccctaatcattggttcattgctgaataataataacgataatgtataataataacataggggcgggtcctattctgtaagtacacagtaactaacaatagttgccactatttgtaaagttgggtgctgtgctgaatgctgtatgtacattatctcattttattgggataataaccatatgaagtgggtaccttcattagtctctttctacagataaggaaactaaggaagtgtggggctgagtaatttgcccacatctctgctatattggcattcattcatttgtttgctcttttgttcattaattgattcaacgggtatttttaagcatgtactaaatgtgcatccgtgtgttgggtacactgggggcacacaggaagcagcagacacggtcctcctgtgggagctggagagacaaggctagattggcctggtgtttttggactctggagggtctatgggcatcttctcacacttgcaacaagcagagagctattctgtggtcatgggtgtagacagcatggggccgtgtatctacctccaggctgtgagtgtccagtgcagggaatggttattgtagattagagttagattcctggatctgggagcccgttggaagagatggtgctacaacattgggctgggaatcttcaggaagtttctaagacacgagccttcaagatggatgaagtgccacatacctcatttccagcaccaagtgcctgccatgagcagagctggatgagaaagcagggactagagaagcttcacgtgagatccctgccttcaagagcttgtcagccagttaccaggcaagatacgccctagcggacagcatgttagtgacacaccagtgcaataaagagttggtgcccaatgaatggcactcactgcccatcacattccaggaacactagctgagcacctactgtgtgccaggcatttcccatgttttatttaatccttataatattccagtgagataatattatttatccccattttagagactgacctgtagctcagagaggtcaagttacttggccaaggtcacactgctagcgagtggtgggcttggatgtattcatcctttgctgatccacccgtccatttagtaggtgtttagtgagtgcctagggcacagagggcaggcaggcggtgtcggcagtgggatgggaggcaggaaacaaggaaagtgacgtgtgccgagcgttatgttgggcaagcctagccagctgtgagaacacacagcaggggccctgtcctggtctaggctaaggaaaggctgcttcaattcagacataaaagaggagtaggagcagtgagatggaggccctagggggttatgaggaatggaagggttcaagcaaaggcaaaaggtgctgtttaaggatgtgtttaaggcattgaaaaggataccagctggagtttagagtaccaagtagtggggtggagaggcaggcagggcccagatccctcataatagggtgatgctagatgctgggttgcctgaggcatgcccattctgtgcctgttgtcctggcctaatgattagtagccccttccttcactctcacaagtgctgctctaggatgatgaattatatggtcatggagagtcactgaagggctgcaggaggggagacgcacaccttcaaaagatccctctggcggcaatgtggggcacagattgaggtagaaggatcagttttggaagtgtcatgttgttccagtgagacagaagtgcgcggccttggggtctgggaggagatttgggcagcattgtctgggcccaagcccagtcctcccctcacccctgtgttctcctcctcctccccagccttggaagcagaggtttggtgtgaagtttagggcatgaatgcaggcggctgtgttgacagtcagtgcctgcagacctgggggattctcttgtagtttatttttaataggtaaaatacaaggctcagagatacatatgttaattgttaataaatagtaattatttaagtaaggggatatatacagttgggacaaatatctacaggcggcctttcatagccaagggttctgcatctgtgatttgaccaacagtagatcaaaagtattcagaaaaaaaagcatctgtactgtttattccctaaacaatgcagcatagcagctatttacatagcatttacatcgtattagtcattataagtaacctagagatgatttaaagtatacgggagatgtgtataggtgatatccaaataacacgccattttatgtaagaaacttgagcatcctcggattttggtatcctcggggagtcctgggaccagtcgcccatggctactgagagacaactgtatatatgtcataggtaaaaagccaccgtcccacccttgacccctggacaaccagatccacacctggaagattcttaactgcatctcagagttcgcctgcctagactagccgaggccctgaaccccggggaaggggcaggccttgggaggggtcaggtccacaccccacaggccctggggctgcctcagtacatcctccatctgcggtcaggagcagtggccctgaggcttctgccttgtataatgctggcagcttctgtctctctgctgtcctaacccaggttctctagatgttagtagcaataatgctatctcacactcccgtgatgccctctggtcttcatagccactctctcctgatggtcacagtggccctgggaagaggaaaggcagtcctatccattgatgaagttcaaggtcacccagtggccgagtcaggacgagaacctggggcttcctctgtgccccacacaatattcaggttgcccagactcaaaagaaattaggaaactcgtttgtggaagcatagctagcaagtagcagagtcaggattttaatccagacaggtctttcaggctcaaaggggcatatcaggctgcttctcagctcttacaaaaacttagtggaaatctattttatatgccttagaatagctttttaaaaatatagattcagatggtcttttgttgttgctgttgctgtttttgagacagagtctcactttgtcacccaggctggagtgcagtagcatagtcatagctcactgcagccttgtactcccaggctcaagtgatcctcccacctcagcctcctgagtagctgggactacaagcacacgaccatgcctggctaattttctgtttttttgtagagaccggggctccctgtgttgcctaggctggtcttgaactcctggacacaagtgatcctcctacctcggcctcccaaagttctgggattacaggtgtgagccaccatgcccagccaattcaaacaatcttaatgcttaaagtcccctgggccaatcatcatattttctgggaggaaactgaggcccagagagaggaagtgacgtggccaagttcacacagccaggattaaaagccaggacacccagcccttcaccttgtattctttctactgcctttgccgaccacagtgtaggaggcagaaccttaatatgcactaattctattctaaaacaacaaatggtttcattttctctggggcaataaatatctaacagaagtcaaaacaataaacaaaaatgcagccggaggtatatgcttcataattaatgtgagaaagatcttcgctcagttccttcattaattaggaaaacaaattagataattgttgttataaagtcacaaaccacttctacaatcatggtttaaaaaaaaaagattcttctgaactcaacttatatttacacaataaataaatatgtagagccaactaataactctttgagtgtggaaggcagtaaaactaaaaggcagttagttacattctggctgggcgcggtggctcatgcctgtaatcccagcactttgggaggccgaggcaggcagatcacttgaggccaagagtttgagaccagcctggctaacatagtgaaaccctgtctctactaaatatacaaaaattagccaggcgtggtggcacatgcctgtaatcctagctacttgggtggctgaggcacgagaattgcttgaaccttggaggcagaggttgcagtgagccaagatcatgccactgcactccagcctgggtgacagagtgagactctgtttcaaaagaaaaaaagcagttagttacattctgacagccagacagtcagaattcaggatattcaatgatgtaccctaacatttaaaacccacagaatataatgttctttgtatgatagctgcatgagtaaagcaagttaccctacactgcactgatctttgtgtgtgatacagacgctcccacatagagttggtttgacacgtggtaatttctaggaggcagatctatgtgtgcagtgctgttgaattctgcctgtcagaggcttccccttgcatgtccagttttaacttcaaactcactgtacccaaaacaaactcctccttttccttcccaccgctttccagaacagctgccctcccaggcttcattcctcagaccctccattgggttcatagtcagctctctgccctatctccttccttctccaaatccagctagtcaccaagatcagctgatttttctttgagacgtcttccttctcttcctctctttcttctttatgctattctcttgcttataagttacagtaagcctctctggtttacagagtgctttttccctgtgagttcatctaatccccaagagcctcacctgtctacagaggagataactgaggctcagagaagttaagaaacttgcttctagactcagattctgaacccacaagctttccagagctacaggctggctctcaacccaccttctcactttctaccctactaagtcctaaagcgagctatgatcacagtggagtagttttcccttctaaacccatcctaagctttcccatgcctgggtctttgttcactcagggttctccacccgcaagtccctccttccccttctcaacccagcctgagtcaacccatctttcatgcccaaggtcagacccgctctttagccctctctaaggtcttctgaaccctgggtggctgttggtcacacagtagtaagctctgccttgttgcacagattgcttcttccccttacagtggaaaggccacaagagccagttgggggctcatggctcttggattccccagggcattcactgtacatagcagggcctcagcaaacactcacagatgggtgggttaccctgacaccccttgaggcaggggctcaggagagtttgaagatggaactaagcccttgggctggggagaccgtgatggtcagagggtttgtgagaagttcccaaggtcaccagagagtcaccagtgagcagggggctgacattggcacctaactgccccagcccgagggctcacaggcttccatggattcacgaggggtctctcctggccctccgagatgcgcctctcttggaattctcagaacagaggaccaggccagcttcccagtcacgtcccagcctgtggaaccaaaaaccaccagagctggtttttaatattttccccgagcatttttttttcctttagtgaggctgttttctctcagcgtctggtcacgaggcctgcccgtctcagagttcccgggcactcatgctgccacctcagagatgagccaaggaacagttcggtcagaccagctgtgggaggaagacgggacccctggagggagagggttgggcccactgagggttctggggaccccctggggaggccgctccacctgtaccctgccaggaggactggcaggcttatgggcttacgggccctctggttgtcacatacgcagttgcaactactgcttgctctttgactgatacaagttgctcaatctcttacgctatcgccattttggactaaatacttgtggggctggcctgtgcattgaagggtgtttagagcatctctggcatctacctgctagatgctggtagcacagctccctctgagttgtgacaatcaaaaatgtctgcagacattgccaaatgtctcctgggaggcaaaaatcagtcctagttgagaaccactggtctgaaactttgctggccctcgaataaatgccaagtctcaaagttttcagacataatccaagaaaaatcattcagatgctgttttactgttcaatcccccaagccttgaatcgatatgcccatctcccatctacacgatggacatgtaaccctcgccacctcccgaatcaaatcgtcaacattccttccttcccctggaacctctccagctgagccggaagttccctggaaatctcactcaaggtctattggaaacctcatttgggatccagcaggatgactgctgattccctgtctgtgggcaaagcttccagattatagggataaggaagaggctattgaaataattatagactaatagctaggaagcacatgttttaggaggaatgacatgactacactacactcactgatcccaccggccaagatatctcccacatgtgtctgtcacacatcaaagcacgttgccgttacactgccatctgggtcccctcttgggcccccccatgcttgctccgtagacctgctctaggtccacctggcctcctttctttgcccaccctttctttcttgtgcaaaggccctgaggcggcagagtatttggcatatttgagcaacagcaaggtggtcactgaagctggggtggattgagggaggggagagaggtgggacgtgagtctggctggccctagaatataacctggacatgacacaggccagtgtcaccgctgtggcaggcactgcctgcagaaagtcagttagccaggggctcagtagcagggtctgtgcttcttcctgcagaaaacaggccagtgccagcccagcgtgccctgtgcctaaccacaggcagagcctctccccagagccagtccccgtgaaactcacagcgtgcttctgtgttggtatacaggaatccgagcggctggaactcatgaacgcagagctgaagacccagattgaggagctgaagcaggagcggcagcagctcatcctgatgctgaaccgacaccgccccacctgcatcgtccggaccgacagtgtcaagacccccgagtcagaaggcaacccactgctcgagcagctcgagaagaagtgaccatgggctgggaggaggtggaggaggaggaagaggagaaggaaaagtgacgaagagagaggaggaggggggccccagatggcccttcctttggtgcatgaaaaactgtacaatgaggttcagcacagccagcatcagccgagcttttttgtgaaactcagatcagccacccaggaggaagagcgggctgaggaaacccagagggaccaagcgctgagaccaaagttgaccctcgggtagggttgtcctgcctggggccccacttgaaggaggcaggacagaggcaccgaggccagggagacgcccaacgaggcagccctgggctcttctctggcctcttcaccagggcacccatccaaggaacctccgaacagccaggaaaagccatgagttgcaaccaaaacgcggctgaggatggaactcagaatgaaactgcaacccacctgcccccagccctgcccctcgccctgatgcgaagctggagaggggcgtgctgcggggccctgatgcccccacccacctcggtccagcgcggccctgcccaggaggcggcagccgggcgcaccctcgccagccctgctggagtttgctgtgggcactgaggcgcgggcgcccttccaaagcacatactcaccgaatgtttacagactggctgtcctggcagggctttcaactgcacatgttttttatactttcctttttttttttttttttaatattttttacaaaaaaaaagattttatacaagcaatatatatatggatttctataatcactcgatgtgatacagtataaatatgctatggtttgtttgttatgaacagatagccaccagttacggccgttgtgtgtaactcctaagtactgtagtctctgggtgtcgggggtggccagggcgggggcggggtgcatttccatccttgtaaacccttcatagtactcagtcctgtatcgctcagtaaacattgctcttacttacatagccgccttgcgtggtgtctgcctggggaatgggtgcaaggccctctcagggtcggagactgtttggagcctctgctataggcctgttcattttcacaacagctctcctatttcacagatgaggaagctaaggctcagagacattaagccacctgcagttactattttgagagcagtcagagtgttcgctcactctgcagatgttttctgagggcctgttgtgtgtgccaggccctgagaattcactggaggatgaaacagacctaagtcttgcccttgtggggcctccagtaaggagtgaatcctgtgcttgctccataagttgtctcatttcgtcttcatggcagccttgccagggaacagcacttgtccccaattcacagatggcgaattagaggtccagggaattaaactcgcagacaccatttgttgaagacttattttgtgacaagcagacatagtctcttcccttctcacaagagcacaaactaggcacgattcttctcattttacagatggtttaactgaggctcagagaaggtaagcgacttatccaaggtaacccagctagcaagggatagagctggtgtttgaactctccctccagaggcctgtgactctcctcctgtcaccaacccactatgattgtcctcatggttgaataggaagcttatgaggccacagttatagatttagtttctgggaaggctggatagagttccaggttgtcccatgatcacagagtgaaccaactaccctggtcaatgtgtgtctgacccagggaagggtgtggatggcttctctgccccctcacctcgacagctgaatccctgccacccagggccggagcagctcagtggcattcactcagtgcctgctgtgtacctggcactcggcagttctcaaggcatgtcacgcatgaggaaggcgggagaggtgtttttagcttccttgtatactgaagcttgcaaaggctacagtttacccaactaaacttgactcctgcattctaatcatgtgttctttctcctccatccctggacttaggataactagttgctggtgatgacttcgtgtcaagaacagcagtgaacctgggttgcttcccaaattgtggacgaggccttctgggatgggcagaagtggagaatggtgattaacacacctgtgatccctccctcgctcactcctctcagtttccctccacccaacacacttggtgtggactcccctgcaccccgccctagaaacaggacctggtcctctcactgtcagctgtggcagaaggttgtggcagcgggttgccttctgtctcgggggtcttgaggctgtcggtccggacgatgcaggtgaggcagtgtcagttctgcatcaggaacccctcgcgctgtaatcctttgatatttttcaagccatgagaaaaatgaagtggacttaccagggtccctccagtgacctagtggatgttcttacaggactgccgtgtgccactggctgtggcttccctggtcctgtgcttggccaccgggagctggcatctccaaaatagagcctccttagcctgtgcaggtgggctgtcttccaaagtcaccacaccagtgacttgtgctgtgcggagccttcctcaccaggaccactggctgctcctgtggctagaagtcacaattataggcttcattgcaagagccagcatttgagtttcttctgggcacctgccactgtgcatgtgtgacctcaactgctttgtgcaccctgactggggggtaggtgctagcgttccaacattacagatgagaaaaccgaggcacacagaagaggtaacctgcccaaggtcacaggtgttaggtggcagagccaagatgttattgtcagtctgacttcaggtgcataaaacctgaggctgagcctccccatgagaggaaaaatgtgtttgtggtgtgacctcagttgccagggaacttgtgcaggaagccgggagagatggcacagacccacctgtgctcacagtacatgttaagaattcccaagtctcaggcaaaccatctccaagggtgttcacagaagacacaccttaaaggcaaacgggttcatgatgtaatcttctattgactagctgtgaacctcatttttcttatctgtgaagtgggaacagtaataatccaagtctttttatggagttatcaagatcaaaaaaggaatggatatacaaagtgttttgtgaaataaaagctccctaaaatggtaattattttgtcctctgttagtgtcggtagttattgatatctacatagtacaggttatttaaatatgttttattctgtaaagatgggctgccaagtttgtgttctgaccctgtacgtggtccctatggtgtgatgaatgcctgggatcgcagactcctggatctgttcagctcctgactggtcacaaccagccatgctggatgcatcattccctccctgggcctcagtgtgccctcctgccaggtggtcatacataagacctgtgccacctctgcccagggttcctatgagaatcaatcgagttgatgaatgcaaccatggcctgagaaagacaagacgctttagctatcagatgggcagaaacaagtatgtgttggtaagaatatggattaaaggttgggaggccaagatgggtggatcatgaggtcagaagattgagaccaccctggataacacggtgaaaccctgtctctactaataatacaaaaaattagccgggcatggtggcacgtgcctgtagtcccagctacttgggaggctgaggcaggagaatcacttggacctgggaggtggaggttgcagtgagccaagattgcgccactgcactccagcctgggtgacagagcgagactccatctcaaaaaaaacaaaacaaaaaaaatgtggattaaaggaaacttagatatgctgccagtgagaaactgtgcaaagcaatttggaaataaccagtaaaactaaagctaaacgcatcctttgacctagcagttttcctcctagtcttgggaggaactctagcacaggggcaaaaggaaatgtacaagaatgttcactgatggctttgtttgtatttttaaaaagttgaaaacaacctaaatgatgatcagcataagaacaaataaattgtggtattttcctaaaattgaatattactcaacaggtaaaaaagaatgaaccagagctatatgtatcaatatggataaatctcagaaacctactgttgagatggagggtaggggagtgaactgcggaaggataccacttatgtcatatttctaactaaatgtatacgttgatactttattgtttatggctacacacacatctgggtaatagaggtataaaagcctgcacaagaatgctgtcaatatcacaatcagtcatagggagtgctcctgggagggccgcggagaggagggaactagggatgccactgcaagggtaagtaggacgctggacttcaacttcaactatacacataacatttcatttatttttttaaaatccccatcaaatgtagaatgacaggatttttcagaggtgggtgatgtgtgcacagatgtgggctatcttctccacactcctctgtatatttgatattctttgcaataaaagagaacaagccacaatacaaataggaggttttgtttttattattgccttagcaaactcaggaaataaaaacaaatctgaaattacaatgggattgcagcatatgctctttgaatttatgcaaatttaattatatgcctgaagggagagagagagacaattcaaagggtggaaagaggttagctggttgagccctgcgggagggtgccccggggtgaggacaccttgaggaatgttgttctgctctacactcagtggatcctggtccctgctctctacgggaggggcaattaaggcgtgttcaaggttcatctggactctagacttcttccttacatgctgacttttcaatccaagccctgctcgaaagccaactgtactgcgcctacaagtggagctctggactggaaggcaagcagaggggaagcctttgaagatgggaacccagttttgacaggtatattcgttttctgttgctgccataataaactatcacagatttaatcccttaaaacaacacagattttgtcttgcatttctggatgtccaaagcccaaaatgcttcttactgggctagaatcaaggtgttggcaggactgctttctttttggaggttctcggggaaaatctactttcttgctttttccaggttttggaggctgcccgcattctaccttcaaagccagcaatggccacacatctttctcacccattgctatgacgctgactccctgcctccctcttcccaaccttctccatcctttttttttttttttttttttttgagacagagtttcgctcttgttgcccaggctggactgcgatggcacgatctcggcttactgcaaactccgccccccgggttcaagggattctcctgcctcagcctcccaagtagctgggattacaggtgcccctcatcacaaaccgctaattctttgtattttttagtagagatggggtttcaccatgttggccagactggtctcaaactcctgacctcaggtgatccacccgcctcggcctcccaaagtgctgggattacaggcgtgagacaccgtgcccaaccttccctattccatcttttaagggcccttgtgacaacattgggtctaccccgataatccagataatctccttattttaacgtgtgctcattagcaaccctaattccacctgcaaccttaattccccctggccacgtgacatattcacaggttccagggattagaaggtggacatcttggagagcagatgattctgcctgccatagcaggatattcagaattggaggttcttaactattaggttggtgcaattgcatttgcaccaacctaatatgacccttctcactactaggcaagacaggctatttcccatgtaagtgccatgaggatggagtccctgtgtggtgcatccctagtgcccgtcacggtgcctggcacatagcagaaggtcaacacacactatacacagacatataatctacagactcacaaactcacagatgtgtgacatgatacagacacaagcatagttacatgcacaacaaacagatacacatgtagatacacaaatacatgtattcacagatacaagcagacacacattaaatgcaaagtaatgagattgatgcaggtcctattcctttatattatagttctgaaattctgaaatcagcttgttcgtcatactagcatatctttgttctttggaaatagctaacttattgttaataaggaggttaggtaaagtgcacatactgttttggctttaaaaactaaatattgtgagactgattttttttttttttttttttttttagatggagtctccctctgtcgcccaggctggagtgcagtggcacgatcttggctcaccacaacctctgcctcctgggttcaagagattctcctgcctcagcctcccgagtagctgggactgcagccatgtgccaccacgcctggctaatttttgtatttttagtagagacagggtttcaccatattggccaggctggtctcgaactcctgacctcaggtgatccacccgcctcggcctcccaaagtgctaggattactggcataagccaccgtgcctggcccgggactgatttttttttgtttagctcgtaaactgactctttgagtgattcctaaagaagcaactactaatgctttggaacatttgtgaagtaattacatgttcgtgtcagcctctacctctctgaagcagggtacacccctgggtggtcagtactggacacctgttctgatccacttaaaatcctctgactctgttctatgaccagttctgaacaggtgagcaactttacacaggtgtaacctgacaaagcctccctacaggtgcacaccctgtacctcccacttcctgtcctcgggggcctctgtggccgcctccttggcacttgcccatatggaaagctggacatttggggagttaatgcctgtagggtctcccttgactaattgagaggtgggaggcagagacagtgaataaatgtttttcccttttattctccaggtggaggatttgtaactcttctactgccccacattgtgtaatccacaggagctttgatctccttgacattccacagaatcctgctcccattgcgtgctgcattgtgctaatcagacctacagggcagcagctgcaagcgctccagaggccctagtggcgcacgagcacgtgatgtgggcaaggaggcctcatgaggattctgggcctgccacgctgaggatgtttacagtggtgcagtgtctgaggcattctgaagcatctcattccaaataaagggcaggttattgcactttactccctatcactaagaaagaggcacgggcccagcggacctctctggattttggaggcagcatatataccacactaaggagtggtcctctaacccatttgtcagtgccttggaaagctgccagtgttttgttttgttttgttttcagacagggtctcactctgttgcccaggctggagtgccatggtgtagacccggctcacagcagcctcgacctcctgggctcaagtaatcctcctgcctcagccttctgagcagctgcaaccacaggacaccaccacacctggctgatattttttgtagaaacagggtcttgccatgttgcccaggctggtcttaaactcccgggctccagtgatcctccctcctcagcttcccaaagtgttggggttacaggcatgagccaccatgcctggccaacctgccagttttgagtggggcctagagcaaggaagggctctgtagcagatctaggcttcagtacaaactgctctgccactcacaccttgtaagacccagtagagctagaggcatccatggtccataaggttggctatttcaaatgcacaactcacgaaaaattaaaataaactttatatgtcattccccactttgaaatgtacccaataaggatcacctttcttgccccagatgaaagttccagcaacttttctgctcactctgtctgcttttctgcagacagtcctccgccatactaagcataatttattaattagaagctccagtctaagactcaaagtcccaggttttattcaatgttcaaatcttccccactccctagcttgggcctgcagcaggctagtggcctgcagtggggcagggagaacccactgtctcttctctatttctccccttgcccatctcctcctcctcccttattcccttcctccctcccaagctgtctggccagtttctgacccctcccaaggatggagcaggaggtgagagcagtggcgagggtgcaggaatggcctcatgacattgacctgttgggattctgagctggctttgggtgcactggagttggcacatataaagctgatcctttctttcataggtacctttgtgagttcttctgaggcttctatgttcaggaacctctttcctgtatgtcccaggagactgcctctcacttctagcatcttgctggtacatcccggcatcctccacgtggcgctactggacagaacccaggacagtccagcgctggctttgggaagcccttgacatcccattttctgtcccttgcccagagacatacaggatatacagacttagcccagaacaaccacttcttcacatggttccatggaggtctccttctcacagggctcaagaagaggaggcagcagcccctccctcctgcctgaaggaagtcagagactcagcaacgcaaggttctctcgaagaaattgctctaaaaatgtccccccgacctttgtgcttggagcccttcttatctcctcaaactgcagaagggtccaatcattatgtaaaaagttctttaaaatgtgtacagtctgcaagtggtgatccggcttcacatctaagccttggtgtctccatcaatactttaattcttggccgggcactgtggctcacgcctgtaattccaacactttgggaggctgaggtgggtggattctttgaggtcaggagttcgagaccagcctggccaacgtggtgaaaccctgcctgtacaaaaaatacaaaaattagccgggcatagtggcaggtgcctatagtcccagctactggggaggctgaggctaaggcaggagaatcacttgaacccagggagtggaggttgcagcgagccgagatcgtgccacggaactccagcctgagccacagagcgagactctatctcaacaaacaaacaaacaaaagccacaacactttaattctaatatcctgatacattgttttctaggctaaaaggtagatgatgattataaaggtttatggactcatattacctggctgtgaaaaagaaactgcataattgcagctaagaggatggcttccttgggaactaagggacaggtactagtttttattgagtaccaaccatatgctgagttcttgtgaggcgagtcttatattaatatttactgtcgaagaaactgaggcttagataagagacttgtccaacatcacacagctggcaccactggacttcaccgaaagtaactgagctctttccaggctggaaagcaaatatagacccaacaaaatccctgccttcagggagggcacagtctctcggggaggaagaccggtccctgtggtcagtgctggactggggcaggtctggggcgacaagagacttctacctaagctcgggtaaatttccttctaaggtgaaataaagccccactccagctgggtgtacctcggggtttggtgaccatcttattctgttcccccaagggtcactctcatgcatgtcaacatttttgtcttttgatggcagtcctggcctcccccaccccaatcccagtggtcagttcaacaatgcgtgaaccactttcttcttggccatttcatagttgcctctttcaggtgaccaagaggccatcc

SEQ ID NO: 321 - DNA, 612 bp, Homo sapiens
gcggccgcgggaggagggcgcccaaggcggcgggggaggttaaggctggcctgccactcctcctgctatgatgcctgggcagatcccggacccttcggtgaccacaggctccctgccagggcttggccccctgaccgggctccccagctcggccctgactgtggaggagctgaaatacgctgacatccgcaacctcggggccatgattgcacccttgcacttcctggaggtgaaactgggcaagaggccccagcccgtgaaaagtgagctagatgaggaagaggagcgaaggaaaaggcgccgggagaagaacaaagtcgcagcagcccgatgccggaacaagaagaaggagcgcacggagtttctgcagcgggaatccgagcggctggaactcatgaacgcagagctgaagacccagattgaggagctgaagcaggagcggcagcagctcatcctgatgctgaaccgacaccgccccacctgcatcgtccggaccgacagtgtcaagacccccgagtcagaaggcaacccactgctcgagcagctcgagaagaagtgaccatgggctgggaggaggtggaggaggaggaagaggagaaggaaaagtgacga

SEQ ID NO: 322 - protein, 116 aa, Homo sapiens
MIAPLHFLEVKLGKRPQPVKSELDEEEERRKRRREKNKVAAARCRNKKKERTEFLQRESLELMNAELKTQIEELKQERQQLILMLNRHRPTCIVRTDSVKTPESEGNPLLEQLEKK

SEQ ID NO: 323 - DNA, 771 bp, Homo sapiens
tctgaagagggccttttgctgctcgccttcactctcagtcttggggccttccccatcatcttgcttctcgccttctggatctcctcgacttttggaagccgcgtgacctacgtcattcagattccaagagagaggtcatcctgggtgattccttagctccaagaagaggcttggtggttgattctccaagattcatggtagcaggctggcctgccactcctcctgctatgatgcctgggcagatcccggacccttcggtgaccacaggctccctgccagggcttggccccctgaccgggctccccagctcggccctgactgtggaggagctgaaatacgctgacatccgcaacctcggggccatgattgcacccttgcacttcctggaggtgaaactgggcaagaggccccagcccgtgaaaagtgagctagatgaggaagaggagcgaaggaaaaggcgccgggagaagaacaaagtcgcagcagcccgatgccggaacaagaagaaggagcgcacggagtttctgcagcgggaatccgagcggctggaactcatgaacgcagagctgaagacccagattgaggagctgaagcaggagcggcagcagctcatcctgatgctgaaccgacaccgccccacctgcatcgtccggaccgacagtgtcaagacccccgagtcagaaggcaacccactgctcgagcagctcgagaagaagtgaccatgggctgggaggaggtggaggaggaggaagaggagaaggaaaagtgacg

SEQ ID NO: 324 - protein, 116 aa, Homo sapiens; identical to SEQ ID NO: 322

SEQ ID NO: 325 - DNA, 204803 bp, Mus musculus
  misc_feature (1)...(204803): n = A,T,C or G
aactagcaaggacaggaagctgcttgtctcctaggaaagataaaagaagaggtggggctgccatagccaattgctctccaacctgtgggaatgaggccctgttctagatgcagtgaagtctgggaggagataaggatgtgggtgggtaccctaaagcacaaagggaatatttcctgctatctgcatcctcccatcctagcagccactgaggaggaccaaggagaagcaacctccttggcttgaacaacaagaggcagaaccccatgcaatagtcagggattgagcccagggtcttctgcatgttaggcaagtgctctgccactcagctgccctcagatttctcctttacacactggagctacgacaagcctcagcctggatgctcaaagggatctagagctaactatgttccccaccaaacctgctgcttcctctttaatgattgcttaaacagtctgatgagctcaagtcagactactatccttggttcactttttcttgtgttgatgatcaagtttattgctcaagaaagcaatcaagagtctctttggcagcgtcagttcaagctctcactattgtcgcctaggggaaggctgctttcctgattctaaggccctgtcttccttgtctaacttgcatacagccgtcagaaggaccgtctaagtcttatgttgaaccacagaccttacctgctcaaaattctagagttctttccacaaaattcaaaagcctcctgggacaagtggcttctgaatccctatggctgctgtgtgacaagaagccaaggtggcagcaacaactgtcactagggagtagttggagctggctactgaagctatgagaataatggggcttatatgcagaagctggggggacatgcacctgatttcagacaactaagaatcatttgttaaaaaaaaaaaagaatcatttgtaagtaacttttccactcacagtgaaacatggagatctctaaagcttctcatccaccctggcacgtatgggccaggaagacatccgtctcccaaggtttcttaaaagctgtaagtgtccttttgttgtcatgcctgtatatatgaaggggggtgggcaagagagggacctgtaactagtgtaagtactcctcattgctcacagttcttgggagcacgcgtatctgcatgtgtacatgccttgttctcgggagcatgtgtatctgcatgtgtacatgccttgttcttgggagcatgcttatctgcatgtgtgcatgccttgttcttgggagcatttgtatatctgcatgtgtacatgccttgttcttgggagcatgcgtatctgcatgtgtgcatgccttgttcttgggagcatgcgtatctgcatgtgtgcatgccttgttcttgggagcatgtgtatctgcatgtgtacatgccttgttcttgggagcatgtgtatctgcatgtgtacatgccttgttcttgggagcatgtgtatctgcatgtgtacatgccttgttcttgggagcatgtgtatctgcatgtgtacatgccttgttctatttcttggcttttaagactcttgtaataggttacgagatttcatttatgagatcaccccacccccagcccaacatagcttgagagtaaagtaacaggaactaagatgatgtagaaaaaaagtgccattgagagcacagagcaaagactgagagtttctgatatagtagccgtcctcaaactggacaatagcctaactggggcctggtgcaggtgataagtgggaattgttaaaaataggccaaacattaaaccaaaccaaaccaaaaactcaaacaaagaataacaaccccccaaacaaagaaaccaaaaaaaaaaaaaaatcctcaaaaaccataagccaaccaacccaccaacagcttttcaagagtaggtggtgtgaacacccagtgatggatgttcagactgagttgcagtaaaataccccgggtcagtcagtctgctccttcagtagcccagcgagagtcacctacaaacggatctgggaagtctgtgcttgcacggaggccctagccccgtgtagctctccggcttaatgaaaaggaaatagatgtaaattcagttgattattcatactggccacagttcaagtgctctacaacaccatgtggctgatgattggccactggaattgtgggtggccctgatacaggctaattccatcactgcaaaaagagctaccaggtgagccatctctccaacgcttttaaatatatcaaaggagccatgttggaaagcattgcttactagagatattatgatgatgactaccaggttcttttttgaggtttatctttatgagtatgaatgtcttacctgtacatatgtctgggtaccttgtacatgctaacacaaaaacatggatcccttcgaactgaagttgcaggcagttcatgtgggcggtggaaatcaagtccgggtcttctggaagaacagtcagcacgcttaaccactgtccatctctccggccctatacttgttgttataaaagtataagaatactatgttgtgatagagggttatttgctaaaatacacaggcaggcacgtaaccaaaagctaagcgagtaagaccacacctggaacgtgtatgtaatctgagcatgcctcctgagtgccacatctggaacgtgtatgtaatctgagcatgcctcctgagtgccacatctggaacgtgtatgtaatctgagcacgcctcctgagtgccaggtgcactggggcacacctgggaccactgtgctcaggggtggagaatggagtgtggtggctacaagccagccaggagcacttggtaagaccttgcagtcctcacgtaactgccctctaggagacgctgttaccctctcatcactgcaacaacacgccccacaaacgcagcctaaggggcaagggcttgctttgcctcagtttgtttctctgaattatactgttttttttttttttctattttatttttgaaaatgtaactacatcatttctcccttccctttcttccacacacccctccctgctctttcaaattcatggcttctagctttcactaactacatcattatttgttacatggatgtcctaactataacttgatcatctgtataatggtgcttggatgtatggatgcagggctgaccactcggtactgaagaaccaactggggtgctctccccgggacagactcctcccactgttggttgccttccttctttggtaagcaccttcttgctactccttagggaggtggctggaaagagtcagaggcctttgggtcctgtatctacttttcacttctgggagtgggggttgggagaggacagaagcaacagcctgcctattgtgggagtctctgtacaaccaaggagtcgaggagtctcaggcctagtgttgtttaagtttttgttgggtgttcttggaccctgggactggcccgggttttgagggtgtagtccatcatggtggagagatgaagggagcaggagcttgcggcagctgtcacactggatccagagaggagtgagaaggctgctgcccagctctcatgctttttatgcagtccacagctcggtgctgcccaccttcaagaggggctttcctcctcacttgatcctttcgtgaaaagttctcccagacacacccacaggtgtttccatggtgatgataaatctatcaggctgacaagatttacccgtcacaccgaataacacattcttgtataaggaaataatattagatcagaatgattgaaacatagactttacttatgaaaaaaagaaagaaaggaaacaatttaaaagacaagtacagaggataagcttgcacaccactataaacaccggggagtaagggcaagaattttggggggcattcagcaaaggaagggggaggaaggctgggaagtgagcctaaagacgggggaacatgacgacttttaaagacaggcagcaaagctagggaaacacacagttaaaacaaaaggaaaaccgagcaccgagctgaacgtttagtgtagaatgagcatgcgtgcgcctgtggagaaaaaccttcactctgctggccacgtggacagaggtcagatggatctgtagactaggaagtaaaagccgaacaaaaaagaacttctccacggatcccaggaatcgggtgaaacaagatgggtctgatgggagtgtgtgggagagtgtgaagacctgtgtgactcacacacatgcaggcacacctccagtatcaggccatgagtccaggcagctctgtcaggaatccatgttggacaatccgtggagcacatgtgcacacactcattccactctggcactgaccacaggagaatccctgagcagggtgctgcttcctctacgaagattggcagggtagggtcacatgcagcccaacagtgcaccctgtggtgaaaactccactctaaggatctctgagcttattaagaacttatttaatacgcatgggtcttttgcctgcatgcatacagtgctcatggagggctgcagttacggtgtgtgagccaccatgcaggttggctcccctgggagtggaacccaggtcctctgaaagagaagccaatgctctttaactgcagagccatcttgccaggccctttgttaaacatttgactggtgccatctgggataaggccctaagtttttgtgtttaagccttttgctctggcttcctgtcaggttttacatggtcatttctcagagtttatgaaaatatatgtgttctcttcctgacaatattttcatgactttctttgtcatggtacctctagaattcacttacaggttacatgtcatctgtgagaataaagctccaccattataaagttggttggagcaaaaagatagtgaacagaaaataaagtcaacctggcaaaacagctgtgctgcagtcagctttgggaggggagtgacctttgtcctaattgtatgtttcacattatagatagaactataatgttcataagagttagcggcttggcctgctcttcatgtgcccagtaatcagtactttctttacctggcttggtgaagggcaccctactgtattccacacgtggccataagtgtagcctaggacgacgacgacgacgacgacagaacccattcacggcagcagacttcccgaagtactccaggaagtctgaaactccccacccctcatcacaagactaagggtgtggtcccagtgtctgtggaccctgctccagtggagcagacaaagggacctgtgcaatctgagcaaggcagccactgtgtcttagttattttgtggatttgattcaagaaagaattatcagggaggagggaaggaaactcctctatcagatggcctgtagacaagtctgcagggcgttttcttgataaacacttggtgagggagggggcccagcccactacagcccacctcccctaggcaggtggccctacattatctcagaaagcaggctggtccttggtccctgcttgaattcccgcctccagatcctccagttcctacctgactcctcttcatgagggactacaatttatggttgcttatggtccttgtgttatcacagcaagagaaaacaaagcagaacagacagaaatgcaggggggcacaggctagctcccctccacttcaagttctccccggctcagctgacctgtggctgatttccctgctgtcgacctcctccctggcctgcccaggccatgagcagcactctagtcgctgcattgcactgggaacgctgatgaaaacactgacaggacgaggaagacagaagcttcaggactatgcaagtcactggtagtaaagatctgccttgctagactaagcactgtgtgtgcgctctgcagatagggagaccagtatgatcaaatggaccaatgactgtgcaaatccaccaggcatctcggcactcagcaaccagtgaaataagactatagccatcaaaccgtaattgcctaaattctgggtccccaaccaaacagggagggccatgaaacgaaaagtcattttcctagacacagagctaagtggttggagttagagaacacacaacctcaagtaaattgatgaatgtacatttgtggcacatattgggttttatttgtgacggctaatagtgaaaactgctccatctgaacatgtgtcatggttgataccatccactatgaaaatggggagcacatcttagccactgccaccctaacttatgaactcctcagagaagggggccttaatgaatatcacatgcagagtccaagttaggtttctagactcctggccagatgttccttatactgctgtctaaatggcaaacaaagctgcaaatcacacacacacacacacacacacacacacacacacacacagagcaaatgtggagtggagggatggggaaagggagagtaatataggactccgcccccaataacaagtcttcagggggcgttacttagaactcaggaaagtacagtgttgttgcagagttgaatcgttcacaggagacctgtcacatcttactttcataacctttgtaaaggccaaaaacattacttttcatttaaaaatagtttttagaaggagctacttcgatcaccagatctaactacttaaggttgctaaagaccatgctatcagtggtaggtgaggctgctgtgtttctgcataggttatgcttagactttatgatttgggaactatgatttctatttttctgaatcttaaaaatattgaacaaaatgtgaagttgagccttgttttcttcaatcattttttaaacacatctttttgcatctttggtactcaaatgtcaaatgtttaagaatcgctgtagatcacaagaaaccagacaggagatggcaggctggagtgtccctgtacatcgataccatcatcaccctgcccagagcagactggagcacagtctataggacagagacctgggccatggcatgttctgatttgagtcttacgttgtgttccatgcctttcttaagtttgttttgacataaacataaacacacttctttctttcgttgtgttcatgctgtgatgtgtagaattttgaagtccagcaggctggccttgaacttgtgatgctctgatctactgtagccttcatggaccagcaagctgggaccagcatctctgtatgttaaagcactgccactctactcctttctgccttctctagcactcaggacaccttttagccatgttcacttgtctttcccgattgttctctacgtctctctccaacaagggctcagcagctcaccgtgcacgccaacctaagccttccttctcctggggcttggaggagaggagcaggaggctgagtttgatccctgtagccctgaggggaagggtaggtgtggacgagggagtcaggctattaggtaaaggtgctagctgagcaagcctgagcttccaagttccatcccaggaacccatggaatgcacaaaaaagcaggatgtggctttctattaaactgattacatataagactctaaagatgactgtatatattaactcattagtctacaaaataagagttctttgaaactttcatgcaagctattttgataatattcacccccaactcttcccttggtctccttccagatctccccaccccaactttgtgacctgtctaaatttaataacccatcaactttagcttttgctgttcataaacttactcctgggtatggggctatccattaattagagtgtggctgacctggagtcacaccattacagacaactgccttttcctcccttagaagctattacccgtccataccttctcagggctgcaaactcagcctttcctgcttctggaagaagcccttgcccatattcctgtaagtgatccagtaacactcattcaccaagttcaccaagatggactttgatggcatccaaactttagtgtgtcatggcttccctatctggggtaagttgataggtgtgttttctctccccaggagaagttttgtcatgacatagatgatgaacacagtcccactaaaccccttagggagcagtgactttattgggcttacttcgaaacatgaaggaggacttacaagaacatgggtgagcccaaagcagttgtgccaccagaaagtcttacccagcatgaatgatttacccacagctgcagagattgggggggggggtgtctccccttcagttaaccttccacactctgtaatccagcatctctgctgggacagagacaagtgccactcgggcaaaattccatacaagtggctgggggacaggctgagtctcatggagaggctttgtgcccactcctcctaaggacagccaatcagcccgatggcatgcaaggatcacagctgttctgatgaccatgacagctgtgctgttagttgaaacagtcgataagatctcttctgcacccctcgtacaggtccttgagccacctgcccacctctgccagagacccatatacttagctgcctctctccaaatcatctcatgagatcaaccaagccactatcttcaatctggaggagagcagcttcgctccttgcctggggctactctttctaggctcacggaaacaattcacttgcttctgggagggtctagctacatccaagacacacccataaattacaatgctccagttaacaaggtttgctcattctaatttcctgaacaggatatttacagatgaaaagttcactagaaacggtgtgttttgaatgcactttgagggagataaattctggggtggtatctgaagtggggcagggagtgcatgtgtgcacacctgcatgtgtgcacacctcctcttcagactgtacgcacttccaatttcactgtggggaggtgttagcagagctttgggactcgaaaggaagggctgacggaaaggcatttcagaaaggacggacaggacctgtgggccagtgcctcacaggaagtgagaacaaggtggctttaaaacacaccactatttttggatgtgattacttaaaacaggcattttctggacgggtgatcagtttctgggaggacaaagttcattttagaatccttgtcctcatccctctttagcggttggaaggtaccccaaataaacatttaatgagccccatcacatgtctagcaagccacgtgatgttcaatctccaagaacaatgggccatgtggacacccttttactcaattgttgatgaataaggccctcctagccctagccaaaacctatagaatttaggggcatgatctggatgcagaatgtctggtttactccctccgaaagcagcagtcattcataacatggcaaactggccttctgctagcttacatatataaaaagctgaaataacaatcttgaccacttggtgtgttgctttctctagactgggacagtgccagtagaccaaaccaagagcagaaagaacacttttggaattcggcccatatcatatcaccaggtaaggacctcaggtggaaactggaagaaacacataggagggccaaacctgcacagagctgagaacatgaggcaaggcctacaacctggtgctcaaaggaacctggtagagagggccagggaaatgttgcaggaatctccatgactgaggactcaggctgggaactgaccccaaacctggggttggcacacctggtcgaactccacttgagcaccagtggtcgccatctgagaaccactcttgagcaaatctcttaagcaaacaccttcctgccgtctaaacctacgcttttcccaccagagggagacatgggcccaggggcaagggtggcctcagtgtcccagccaactgctgggaagccggcagattttcagagagcgcgggtctggggaaaaaaatccagtccgggttttgtctgaacggagaccaggaaggcagcgaggactggggaagagggggaggcggtgaagacacgacacaaacagctcgcgcccaggacaccgcggtaggccctgagcgcgcgggcgcagggcccggagaggcgcgcgccggcccgnnnnnnnnnnnnnnnnnnnnnnnnnnnnnnnnnnnnnnnnnnnnnnnnnnnnnnnnnnnnnnnnnnnnnnnnnnnnnnnnnnnnnnnnnnnnnnnnnnnnnnnnnnnnnnnnnnnnnnnnnnnnnnnnnnnnnnnnnnnnnnnnnnnnnnnnnnnnnnnnnnnnnnnnnnnnnnnnnnnnnnnnnnnnnnnnnnnnnnnnnnnnnnnnnnnnnnnnnnnnnnnnnnnnnnnnnnnnnnnnnnnnnnnnnnnnnnnnnnnnnnnnnnnnnnnnnnnnnnnnnnnnnnnnnnnnnnnnnnnnnnnnnnnnnnnnnnnnnnnnnnnnnnnnnnnnnnnnnnnnnnnnnnnnnnnnnnnnnnnnnnnnnnnnnnnnnnnnnnnnnnnnnnnnnnnnnnnnnnnnnnnnnnnnnnnnnnnnnnnnnnnnnnnnnnnnnnnnnnnnnnnnnnnnnnnnnnnnnnnnnnnnnnnnnnnnnnnnnnnnnnnnnnnnnnnnnnnnnnnnnnnnnnnnnnnnnnnnnnnnnnnnnnnnnnnnnnnnnnnnnnnnnnnnnnnnnnnnnnnnnnnnnnnnnnnnnnnnnnnnnnnnnnnnnnnnnnnnnnnnnnnnnnnnnnnnnnnnnnnnnnnnnnnntggttgtcgaggtggtggacggcgacgaggacgacgaggacgctgaggagcgcttcgtgcccctcggacccggccgtgcgcttcccaagggcccctcccgaggcgcggtgaaggtgcgtgcgaggtgccggggatcggtggggggcgcagcgggctcggcggggcgccggggcgccggggaggccgagcgcagcggcgcgggccgggaggggtgtgtcaggcggcggtgggcagcgcgcggaactgcggctcagcggctcagcggctcagcggcgcccggcggcctgtcggtgctcagaggccgggcggatgcgtggtcccgcgtgccggtaggcaaggaaggagcgcttctctgggcagggtggggaacttgggagctggacgaggtcggagccccgatcggcctggcattgatattttattctgctctggggaggcaggagtcttccttctcttgttcaagcttctggaaactagccagcaacctgcaacacctcctttcacctgagaacagttgttggtcggttccatcacaggcacttgtgaaggagttgggagcctgtgcagcaacaacctagaccttggtttccgcgagctttttgcccctcccccatccccgtgtttctcctcgccctccttaaactggacatcctaagcacttaccctccgcccccttaagattacaaaagaggaaggcggggaaggtgtttgtgttgtggggagggagaggggtagcatttaaaatgaatgtgactttcagctgaaaaatttcaccaggtcctcatccgcgctaccgcaacgagcgatctttccgtttttttttttttttttttttttttgtatcttcagaagataaagggtttattattacacaactgtctggccgagcttctaagcacgctattggacaaaacaaactgcgttgaggttcatgcaccgtgtatgttgctaagaagttttgagggcagcgagtggcaagcaatggagagtgtttgctttttcgccagtgttttttttttttttttttttttctgttttctgttttttcgagacagggtttctctgtgtagccctggctgtcctggaactcactttgtagcccaggctggcctcgaactcagcaatccgcctgcctctgcctcctgagtgctgggattaaaggcgcagtgtttcttaagatagcaggataaccagaaattcttggagtgttcagaagaaaatatatgtaaacaagtgaacttgatagaggtggttgatgttgttgtttttgtttaatatctccgtgcccgctctcaagtgtctggaagcttgtaattatatttaccaagaaaagttaaacagcagttagcgttgccccgcagtagatgtgggaatgtttctttcctagaccaccctgaagtatgactggctctctctcggtgtgagacttgagcaaatggtcatttaggtgattgtttttgacagctgcttgttggaatctggactgtgcccacactcattactgctgcctgctgaaaagcccgctttgtgtggcaacaggatatagcgggatttgaattaagttccatagcatcagtgacactgaataagacagagtgccccctgagcagtgttgttcatacacactcaaaatgtgtctggggtgattatacaagttgagacagaaagattaatatgttatgctctgtaatccaagtaggcccagtgtaggaaagaaatctgttctttaaactaggaatatctagggtgtgattgttagcattagcagagatttttcacatctccaaataaattcaaattttttcaaatttctaacacattgctttgctcacaaattttatagtacattgcatacaacttcttagaagttacatgctgaatatactgtggtataatttatcttcttttttttcatcaccttagagatatcctgacactgtatcccaagagattttttttaatggaacataacaaataaatttacatttctatatgtcatgtgttcgacagatacttattgagcacctactttgtgccaggtgctaatctagaacacagtagggcatgactttggaattcttacacataattcactgcgtcacagcagctgacaaatggataaaataagcatgacacaggggccatgatttgtgcatctctcaccggccttcctgagtggagccagtgaccacaccagagttgtttaaagcacagagagtgaagggcaggctttagtggctggttcagcaggtctccctcctttgtcccctcttagcaagaactgaggctcttctgactcaaaatgggaagagtcccccagattatcagtgagcagatatcctttctttaaaaaaatactaaaatcactttgtgtgtgtgtgtgtgtgtgtgtgtgtgtgtgtgtgtgtgagagagagagagagagagagagagagagagcgagcgagctcgagcgcacgctggagccatggaacacttagggaagtcgaagaactttatatagtgcctgttgtacactcacctttctgctttccagagttcaaactcaggttgccatgcttgcatgacaaatgtccccactttctggaacatctcagctggtcctatctatgacctgcaggaaaatacctccaagaattctgtttcttctttcctgccttttcctgtgtttgtctgatgtaggagctgtcacagaaattgtcagggagctggtgtgtgggacatgtgctatgggtgtattgccgtgagagtgtctgagtgtggagggcagccaggtgtggagatggcagccaagtccgtttgagtctgcctgcttcttctgtccactgcatctgtcttacagatgtaaatcaagtggacttggtgcctgaactgatcttgctgaggtgctgggagtaaaggagtgggggatgggaaaaagaaaagacaggaccgcctggcaggcctagggtaacagcaggagggaaatagtgctatttttagattctagaaagaaaagagaaggcttcttgggagggacctttgatcttccagcccaggatcagaatcaggcctgggccagtaaaggaaaccagtaaaggcagcccttaaagatggagtctctgggaggttttcatcaggaaagcctgcctgctccttggtctttttcaaagcccataccgcgggggagaacagaggccagcagcgggagctgagaaagcagaggggactgcagtagacacagttctcaggggtgggagaggtgctcagcaggcaatacagagtggagcgcctcagggtccgagatgctggatgacgcaagggaagggagagagagattcagaggagctactggcacagaggatgacctggtgtgccatttgctgaggttagggagatggccaagttaagggctctgtttgaacacactaggaatgagttgactgggccggcaggcttggggtgtggatcagaaagggggaacttgaaaaccaccagcatgctgaggtcagaggtcatgcagtaccaggctctgaggcacagtgggttctaggagaagctggtggagatagttgaagcagcatcaaatatgtacagattgtaaaggtcagaaaccgagagaagaaataactccagcaattgaggaataatgagcaggacaaggactgcggctgttcatttagtaagagacatccatgtgtgctggacagcaggggacttagtgctggtctttttaacattcattcctattttaagtgtatgggtgctttgcttgcatgcatatgtgtgcatcgtgtgtgcaatgccatggaggccagaaggtgtcagaccccagatgactggtgttacaggtggttgtgagcttctgtggcttctgggaattaaaccaggatttctgaaagagcagccagtgctcttaaccactgagccatctctccacctcactcctattattattgatagaagtttgtgtagttagttaagtggactgaacagtgacgtgaaggtgaggttgttagggtcttccattacagctctttttgctaagttttgttcaagggtctattttgtcttttccagaggagatgaaatgagctttggaatagtaaccagcatatgaggccttttccaaaagaggtcatacctgttagtttagttttctattactctgtaacagattacccctcggagagacagcaaagtcttctatgagttcagagtagggttttagcctggacttttgtctgttgctgagactcacaaagccgagggttagatgggtcaatttctcatctggagtttggccaagaaagagtctctcctaggttcagaatgcgtgggcggaattcagtctccctgcatatggaagacccaggacctcagcttcttgctgactgtatctcatgagtgctccatcactcctggagttcttttttccaggccctacctcctacctcattatgtgggtctcctcagcatggcctcttgctttatcaaacaaacaaggagaatcttggggccaccagttgcgtagggctatcttccatgggcagaaatggactccaatgccttagccatactgtcttggtcagaaacaagattatgtgttccacccagtctgaaaggcagcaattgtacaagggtggacgtgtgtgagggtatgaggatcaccgggtattcctgggtggcctgggaagtacgaaaggaacagagagaagaaggggttgctgcagactgcaggtcccatcgtgactgcagcccgggtggaagagggctgctctttgaactctttccagtgaattggctaaggtagagaagatggagaaagggaagccagctgagggccattttctgtacgtatgatgtcaggtgacatagtgcatgcccaatatcctctcttctcccgtgcagcagaagaccaggcgtggatgatggcagtttgcaagcgagttgaagacctgcccacaggtgtgaagtgattgatgtatgagagagcaggagagccagtgtgctagggagacaaagtggagttgccagaccatagagagcccatctggggtttgtggttctgtgtttatagagcaagaagcctgctcgggtatgtggtttcccggcttcttgctcttgtctccggcacagaatggtattcataaaaggaatcctagttagtacacatggactgattcccatggccagtgcaattgcaaggtgcacacctgttttaacctttccacggcccccatagctaactgtgacatgtatgtcagatgttgcccttagttttatagaagggataaacagttagcttttaggacaaacagatcattcagcggcagaccagggactggagttctggcctgtgtccctgcggagctctgcctgtggggaagcaggattaagcagggttggatttctgtgtggaaaggagagggactggttctagctggtgctgtctggactctggctgccaggagggaccaggagacccagaataataagggcgggagagggtgggggagaagtagtgaaaaagttgtggaggaaagaactataaacaatctataaagccatgacaattggattccaacattgagtgttcactgcattcatttgaaacaggagttctaaatatttcatctgaaggaggactttctgagaatgtaaggcttgaattagtgggggccccatctccatctgtggaggagatcagcttaggcactgtcctaccaggcaagtgaaccggaagcttggggaccccgagtccctagacgggaagtaaagccacaccttcaccagcaatgcaggcagcagcaggacccctacctgcactgcgctgcacgtatacctgacttctgattggaagaaacggactaggtctcgctctctttagcaagtccttggtaattcccctttcgggcttagtttccaggcaaacatgtcctagtatatgtacggacgttctgggcatagggcccagtccagtttgaaccagtcggactacatgtacagcaaggcaaactatatcccccaagttaacttttcggggggatcccctgttttttccaccttataatgattaaaagcagatgcattgtgggaaaggatatacacactaaagaaacacttagtatctcaagcctgttaatcaaagcagaaaatcactacactcctccccttagcaacctagaacccataaacacttagtatctcaagcctgtcattcaaaacagaaaatcactatactcctccccttagcaacctagaacccataaaaggaagcccagacaatacctgctctcttggccactgtgctgaacgagctcctgactcctcgtagtggacttctctgtacattctctggagtaaaacaccctgggagagtgagagggcccagtgcgagaaagcccaaaggccggagtgtgatactcaggatcagggttttaaaaaagaaacaaggtggatgtgacatgcttattacttgacagaaggcaaagactctcctatcagccagtaggccagctagcccggatctcctatcagccaataggccagctagcccagatctcctataggccggctagcccagatctcctataggccagctagcccaggtctcctatcagccagctagcccagatctcctataggccagctagcccagatctcctataggccagctagcccagatctcctataggccagctagcccagatctcctataggccagctagtccagatctcctataggccagctagcccaggtctcctataggccagctagcccaggtctcctataggccagctagtccagatctcctataggccagctagcccaggtctcctataggccagctagcccaggtctcctataggccagctagcccaggtctcctataggccagctagcccaggtctcctataggccagctagcccaggtctcctataggccagctagcccaggtctcctatcggccagctagcccaggtctcctatcggccagctagcccaggtctcctataggccagctagcccaggtctcctataggccagctagcccagatctcctataggccagctagtccaggtctcctataggccagctagcccaggtctcctataggccagctagcccagatctcctataggtcagctagcccagatctcctataggccagctagcccagatctcctataggccagctagcccagatctcctataggccagctagcccagatctcctataggccagctagcccagatctccgataggccagctagcccagatctcctataggccagctagcccagagtacacagcatggcgcagacaagaaacctgccacaacaaagtgaagaggaccaataccccaaagttcatctctgacgtccacagggacgcacagtaacatgtacctatgcgtgtgcacgtgcacacaaacacacacacaccaacaccaccactacacatcataatactttttaaataaatgaagtaagacttcttgctactttactacctatgtgcattttttccagctatttgaatatgatgctaagaacctagatatagcaggtccagtcagaccacagggaacaggtgtgattaaaagcctgggctatagccgggcagtggtggctcacgcctttaatcccagtacgtgggaggcagagacaggcagatttctgagttcaaggccagcctggtctacagagtgagttgccggacagccagggctacccagagaaaccctatctcaaaacaaaacaaaacaaaacaaacagaaaacccaaaaccaaccaaccaaacaaacaaaaaacgaaaacaacccccccccccccaagcctgggctaagggtgcaaagccctgcctgctcctgtgtttgcaaccattctgggccccctgcccagaacgtccgtacatatactaggacatgtttgcctggaaactaagcccgaaaggggaattaccaaggacttgctaaagagagcgagacctagtccgtttcttccaatcagaagtcaggtatacgtgcagcgcagtgcaggtaggggtcctgctgctgcctgcattgctggtgaaggtgtggctttacttcccgtctagggactcggggtcccaagcttccggttcacttggctgttccagttgaaacctcctaatgtgcacctggacactacaaggatattttgtgccggattgttgagaaggcagagaaactggtgctactgtgttgtagtcctctagtgctttagtgcccctcccccagttcagtcctaaattgaaagaagagaaactttgtatgtattacacagtgttttcaatttcccattggtcagatgcccttgcatatatggaaccctagcagtgctcctgagagtctgaaaaactactaagtgacacagtgagcaagtcttcaactagtgttttactaacaagcagtaaaagggcagtgccaaacagagaaggctttactaatatctccatttttagcaaagacagaacagctgggagcttaggtaacaaggcccagggtggtgctttctttttaatgctgtgtagaagtttaaccaagcagaacctagcaacctagaaagattgacaatccactgatttaatacattcaagaggagcctggacacacaagatggctgcaagtccaccaagactttctgtattgaataactggggcgagacccgctttcaaatgaggtaatgtgtaccagcattgctgttctcagtggccgtggtgtgactggctgtggtgtgtggctgtgcgccagctctccaggggtggttagctcatcttgcagcttatctcttgaccttcaggtgatgcaaagggcctttggcagggatcatgtgtcccaccttactgccttctcgttttctagcaactgcatgctttgcaaattgtgttggctcacgcagaaagtgtgtgctaaagatactacacaaagttgtcattcacagacttgtagatggctggggttggaaggacatggagattatctagtaatctaactccctgtcttgtctctggaggatacagatcttgcaagaagaaatagctgtccaactctggcttctgctgcagtccctcgggctgcccagccctgcccattaccctccttctgggattgtttcttatgcccaggaatgaggttcacaccgctctgttggaattgtggctagaaatgtcagttttccaaagtgtatccaaagtatctaacaacatcagactttgaaaaggtccgtcttctgtgctgctgcaggcggggccgcctggttctccattggtatgaaaggaggagttctttgtgaatcctgcccgggcctgtccttgtccccttaggagaatgatgacaaacagaaaatgcactgtgactttgtacagtgtatgcatgggtatgtgggtgcagtgtgtttccggtaagtacttactagccatgaactcaggtctcctctcctttgttaacacttgaccatggttgcagagaatggcccacagctcaagtattaacaaaaaaggggaagcaacacaacccaggatctcctgaacccactcaccttttaatggggagggagtgagacacagccactgcacgtgcctgaacttttacccagctcagtcagatgagcatgcgccctgggctctgaaggtcacgagcagagcaggtctccctgccctgctgctcgtggaacatagaacttcaactctgtatgggacagtcttgacccagtgacgcagtactgtttgcctaatttggatcttcagctgcctcttgcagcctcttcttgagacatggtttctgtctggctttctgaagaatttcacagtacttgaaacctctcacaaccagccttattatggcttagccaaatctggttgtcaatcaggatgattgctgtgcctctgctgttgatggttgtgctcgttctctagttaggagatgcttggtgtacacatggaaagaacagggcatcggccacctttactcccagggcgcctgcagtgcaacacaccgaccagatgacgtgcagggaggcgtgaagccctctgctctttttcttttcttttctttctttttttttttcttctttttctttctaataagatcatgactagttcttccaagccaacttactgagtcacaacttggcatgtaattttgatatataccttaaaacaatggcaaccaaacaatttatgtaaagaaaattatatggtctggccaggaggtaattcctggactgaatttggcaagtagcctcagttgctctttagtgggtaagaaggaacagaatataactttgagtatggggtagtacagttagaatgattcactatttccacttcaccgaaggtaatgttttggaaaaccatgttagaatttgatcgtagaagatgcatttatgtgtgtgtgcgtattcatgtatatgcacatgcatgtgtgttctgtgtatggaggctaatggtcaggttaggtgtattattcattatgaaatcaattaacttttaaaaacgaacttatttattgtgttttttttttaattgtgtatattttgggggagtgcatgtatgtctgtgtaccacatacaggggtcttcgatcccctccaggactggagtgacaagccattatgagctgccttctgggtcctgggaaacaaacccaggttggttctcggcaagagcaacagccagtgctacctagctccaatcccagcactttctttttttgaaactatgtacgttactaaacattgagtcagctaaactgactggctggtgagccctagagatcctgtctctgcctcctcagccccgaggttacacgtatgtactgtcatgtaggtgcagcagacctgagtccatgagtgtgaagaaggggccttctgtgcttgccctgtgaggacttggttccgtgcgctttattgaccaggagacttctgggatgttcctgcttccctatggtcttggacagcactggctccattttaggagactgagtagccagtcaaaattatgcgaatgccagacttgacagcattttaagcttattcacccttccttccttcctccccnnnnnnnnnnnnnnnnnnnntctctctcttctctttctacagattgtatatggtaacattttatctgctaaatcttgcagttagggtaactgcatcagtggcaccttcattgtccttttcttagaccctcaggagcaggcttgaggccatgcagcgcaccctgcactacccccactttgtggtgttgcagcgcaccctgcagtacccccactgtgtggtgttgcagtcttctgtagacagctagtgatgtcacttcctcttctagttgttatggctgagagtctctggacctcactgtctgttctttctctgtaaatctggacacagtgcaggacagactctggcttcaagtcttgcctttgctacatgctggggtgtgaccttgcccagtgacattactgctccgtgcttgagtgctatggttgaacatttggggcaatgttaacgttgttatgggatgtggctcatgagacctccccaaagtgggtgtgaatggaagtgttatttctttcatggtgttgcaaaggatcaatttgcaagctgtttttagagtcccaagtcctgctcctctgtactgtgctcctcaaggtggtgaagctacttacccacctgagcagggtgtggcatctgagcagggtgtggcagtgggcttgactttcccttccagcccagaaagcagccagccatttatctatggatctcttgtctgtctaaatgtatagctcttaaaaaaaaaaagatttatttatttatttatttatttatttatgtatatgagtacactgtagctgtacaggtggttgtgagccactatgtggttgctgggaattgaactcaggactttcactcactcaggccctgcttgctccggtccaaagatttattatgtgtaagttcactgtacctgtcttcagacacaccagaagagggagtcagatctcattacagatgcttgtgagccacaatgtggttgctgggatttgaactcaggacctttggaagagcagtcggtgctcttaaccattgagctatctttccagccccaacgtctaggtcttgtactgcagctacccagcagggtggggatcccctctatcactgtgtgttcttgcagccttctgtagacgtcagcaatgtcactttctcttctagttgtcatggctgagagtctctggactgtgggcttgcccttcctaggtttctgtgttggtgtcttgggcttggtaaaggtaaaattctgtgttcatggagaagacagggaaaattagcctaaagtttactggtcctgtctctttttttctcttttgtgggagctgctcgcagggaagaaaggactatgagtgaatcatttctagaaaatctagtaaaaaacagataatagatttcttttccagttacaaaatacttcaaaaataatagtgaattagaagggcaattgaaaactgatatgtaaacaccaatgtgcctataaaggagaaactgaacatgtacagggcccttttcagtttctgaggtacatacaaggtgggtcatttttatattacacattttctttagactgcttgctccttccattcccagagcacttttcctttgaatgggttttgggaaataactgatttataatttcccttttcaattggaaagccagaagtaagtgcttattggctttagataaagagctaaacacctgggccagggagatggttcagcaggtaaaaagggatgctgtgttaagtctgatgctcagagtccaactcccagagcccacgttaaaaacaaaagtcagtgtgttggtgcgcatctgtgatccagctctctatgacaaggtaagaggtagacacagaaaaatcactcggaagcttatggagcagctaacctggggtacacacagtgcagtggcagacgcaagagagaccctgctgtaaaacaaaccggaaggggagaatgacttccagaaattgttctctgacctccacacatttgccatggtgtatgcctcgtcacgcagcactcatgctttatgatacactaaacttaaagtttcttgctgtgagacgagctctcactatagaaacctggcagtcctggaactcactgtgtagaccacacttggctttcaactcacagacatctgactgcctctacctccccagggctgagattaaagacaatgtaccaccacaccctgcaattgtgtgtgtgtgtgtgtgtgtgtgtgtgtgtgtgtataccacatgaatgagggtacctgcaaaggccacaaaaggatgtcagatcccctgaaactggagtcaccagtatttgtaagtatcctgacctgggttttggaaactgaactcaagtcctctgcaagagcagtgcgtgcttctaactaatgaattctttctctggtccgttttaaaaagaggatgaaaactattatcatcatcattatttagaggcaaggtctcggtctcatatatagccctagctagctagaaactcatagagatccgcctgcctgtgcctcctgaatggtgggatttaaggtatgtactcctgcaacctgcttaaactgtgttattaggaaaataaattgtgatcaggcatggtggcacatctgtatacctacctacccaggaagactgggggaggaggctcccgtgagccttggcaaatatattaagatccccctcacacatacttaacaagcacaaagaaatcatttgttcttagtgggcctgacagctgattcagtagagagtttctgtcttagtcagggtttctattcctgcacaaacatgaccaagaagcaaattggggaggaaagggtttattcagcttacacttccatcaccaaagaagtcaggactggaattcaagcaggtcagggagcaggagctgatgcagaggccatggagggatgttccttactggcttgcttcccctggcttgctcagcctgctctcttatagaacccaagactaccagcccagagatggtcccacccacaaggggcctttcccccttgatcactaattgagaaaatgccttacagctggatctcatggaggcatttccccaactgaagctcctttctctgtgataactccagctgtgtcaagttgacacaaaactagccagtacagtttctaagggaatttcttcatctggtactttttgacttttataactataacctccatcctcataactttcttggccagatgggttcaaagatggatctaggatttgagacagggaggtttgaaaagtacagttgtaaggggatctaaaatatggagagcaaaaccacagccatttatatctagcaaggtataattattagtttgtgttcatatcaccaaagaaaatgattgaaattccagggcagcataaatgaagggacttctgctcactgagatgccgattgacgccactctgtcagcactgagcgctgagcaccctgggtacagactcctttccgctctctgatactcaatagttacagctcctcgtggctagcctcagttgacccttttgataaatgcagagcttgataacatttttcttgttttatgaatgtggaaaacaagagaaatggcagcttctgtggaaagaaatacatatgaggtaacttcatatcaaatgacacagatatttgtcaaacatttcagaaaacagttgggaccaacagatttaaaaaataattggaatcggtacctaagcaacaatggaaatttaaggagagaggagactgttttggatcgacttacagattaaaacaatgtgagctgccttgttcgtaagttgtcagacgtcatgtagcaggtgctgtgcaaggcagctccgagtcacttcctgaacactcagttgcccgtgctctattaatttgggtcgagatccaaagtgtaattaagaacatgttcttcaaatgcatgttttggataggtttttcaattagtagattaatgttcttccaactcagagaaaatctaacaaaatattagaaaactaataaaaaatgtgaatgacagtcttaaaacttaaaagacagtgtggattgtgtctattagaaaagaaagcagtcttgttttccatatagtgcgtgtccctgtcaggggcacaggggcagctatgttggtaggtgcttgctatgcaggtgtgatgactatccatccgcagagctgctggtgcttatgtgggaatcagagacaggcggatccgaggctggcgctcagctgcctttgcctgacctgtgagtaccaggtcctggtaaagagaccccactgtgccaaaagtgaggggctggagaagtgaggtggttgctcactgaatgagagcacctgcagttctgctagaaaacccaagtgcaatccagccttccacatggtttttttttttttttaaaacaggacttagatttaaaactgtgtttgcaggttcctgaggaggcctgaagagggcaccagattcacctagagttgtccagtataggtgctgtcaactgaatttgagtcctctgcagtagaagcaagtcttctacttctgagccatctctcccgcacaaagatgacttctgttttaattacatggacacatacatggctatgtaactcactttcgtgctggtgcctatgaaggggacagtgggtcctctggagtgggaataccggggacctaagagaactgtgggtcctctggagtgggagtaccagggacttaagagaacagtgggtcctctggagtgggagtaccagggacttaagagaacagtgggtcctctggagtgggagtaccggggacctaagagaactgtgggtcctctggagtgggagtaccggggacttaagtcctgtaaagcagcagtgcttcttgttgttttgagacatctgccctggcactcccagagatccacctgtctctgcctcccatgtgctggtattaaaggcatcgcatcaccttgcctggcctagcagtaagcactttaactgctgagctgttcgtccagcccttacattttttgagatgaagtggctcactgggaactgggacctgcaggttaggttaggcaagctggccttgagtccttggatcctcctgtcttcccagcattgggattgatgaatgccaccttgactcactgtttacgtgggtgctagggatagatcaaactcaggttcttaaactcaatagtcagacctgcaccaactgagccatgtcctcagccctcagctgtcatgaggatatagtcctggcctcttaatccgaggttgcagctctgaagtgtgtcactcactgcgcagaaaccagtacccatctgcagtcacacgcagggttccctgtagccaccatctagtgattccttttgttttcagtgccactaagtctttatttgttcattgtgatttcttccggagaaagatggagcgaggaggagagttagggtgttagaaagctttagggaccaaggggaaagaagcctgggtaacaaagcaaaccgttcagtaagtgtgctcaagagttacgttcaccgtgactcaagggggtgagtgttgaggacctgagagaagggtccccatttttcttctcaactcaactcttccttgtaaattccagaccaagttttggtgttgagtggtaactgtagaggtgacttacatcaaagctgcattgctttctgatattactgtctagctttaggctggcctcaaaccctcactgcctgccttagtcaccagagtgctgggatggcttgtaagcaccatgatgcctgcctggcttgttggataatcttgtggccatggggatatgaatttcttctgtgtggatcaggtttccatgtggacgaccgatccattcactcttcattttccatcctggaggatttggggtaatgagatctaacggactaatgccatggagacagtcaagaattgactttccccagagggcaatggattgggaacaagagaagagaattctaacttcctgtcgggttttacagaagaactttgggctgtagatatatatgcaggagttacatatatatgcgtaccttgttgctgttttggctaaaggagaggcaggagctttgtgaggggtggggacagtccttccctggtgaagagtgcaccagccttatttcaggtgctttgccatacataggatttcctgacaaaattggtttttttttgttttgtttttttttttaaattggggctggagaaaaggcgcagtggctgaggagcactggagggagcactggctgctctggcagaggagcctcagcgtccacgaagtggctcacaactgtctgtagctctgactcgggggagctagtgcatagttacatgtgggcaaaacattcctatacacaataaaaataaacacatcttttaaaatgctctttagttcactgcaagaagaggtttgtaaaaccaaagcaaacgccctaaaacatgaaaaagagcactgtcactatggtacactgacaccaacttgactgcatagtggtcaccacatccctttgtgatgtaaaaggctcagtttaggcaaatcacaaaactacagtacaaaaggcaaagtctggggaggactgaggcaaggtctgggaggactgaacaatgggattagtacgcagccgtgagtgcatttggtaaatgcttgtcctatttcagcatttggatgtggtcaacaaggcatgtgtgcactgatcaaacatagtcacctctttactagccacccagaaaggggccctggcatcccaagaaaattgtcatttacactttaagccacatgaaacttaaaattaggttttgcttgcaaaaagaaagtcctaagcagcatgggcataaggaaattccattctgagccgggcgtggtggtgcacgcctttaattccagcatcccagcacttgggaggcagaggcaggaggatttctgaattccaggccagcctggtctacagagtgagttctaggacagccagggctatacagagaaaccctgtctcgaaacacccccctccccccgcaaaaaagaaaatttcattcttagacacttgctttacccatggttccttgagatttttatatgaacaagtttatatgcatgtatgtgcatatgctagacttagtgtgacagtgtcccacaattgaactgtttagtaaggaatccttaccatcatcttttaaaaacattgattgattgattggtgagtgtaggctattgaaaggcttgcaagtaaaggtcagaggacagcctccaagagccaagaggataaaaacactaaagatagcagtgagtaaaatcaagctgtgtaaaacattgcgctattttatgactggcttcttttttttctcctttaggagtgtaaagttagttaaatatttaaaagtcagtcagtgaaatttacaatattagcagattgaaagggagtataagcattcatccatgctatacaaaatacttggcaaatggtagaagttctctaagctgaaacatgtattagaaacctgtagctgccataatacatgtgacaaaacaccattcagtaaatgtcaagagtaacttaaagatgtcttatgtaacccattcagctaacattgtcatggaggtcttgagccatcgtgattgataagaaggaagaaaagaaaaagcatgaagattggagaagatgaaaactttgtttgcttgtggtatatgcacagaaaatcctaaggaagtagcagaaactgttaaaatgagatttaaaaaaaaagctacactgacaattgatactaacaacttcttaaaaaaaaaaacaacctatggaaacccaccacggtagaagcttcttaaaatacacacgtatagaaagtttaagtggagttctactgtaacagtgccaggaatgggttccctctttttgaatgttaccatggttcctggataccctccagaattgacagtaagcatctattagtgaagacagagcacacttcgtcataaatatggagacatcgagcaggtcctgacctgggaggctcttccctgctgcctagctctcactgtgtttgatgtgcatattaccctggaggacaaatgttatcaggctcaggctcacccaaccatgaaccctaaaagctacactgatgactgacctggccggacacatccacaggtgcaatatggcatgaccattgtgggcagtaactaaccactttattactggaggtacagccaacaccacagatggaacttatacctggcactgctagagaccaagaactagttagagcatggctagatacagcacaggccctgagggagtgcaggagtgttttgctaaatgtacaaagtattaaaataactcctgatgacttaactgctatacccaaagatgagtacatttttcagtgctcatcaaggctgctttatgcaatagatagcagataacacagaggcctgacactggtcagcgtgcagagaactcacacccttctcctcaagtcttagggatatttagaggagggaaaagagattgtaagagtaacagtgctgggtgacacaccaggaaacagtgctttggatagacagcagatgtatgtacaaacccacagtgattgacagcaatacacacaacctgggtaagctcaagccaaataaagtccagcaaacagcggctgggcctctgtcccacccctagctgaggaactcttggcatttggttgcctctgggagagggagggtctttctttaatggcataatccttcgcatgtcaaccgcatttcaccactccaggccctactcctgagagtaattggatgatacaaactagacctgacctgggttggggaagaaaagagtaaacgtcaggtcgggtgggtaaggatggcgggggaggagctgagggtgaatatgataaaaatgtatgatagccacaaaaattcataaaacgtttagaaaatttacactcatgaatttaataaagtcctttaaaatgttttatattgctggaccttctttacccactaggtgcctaagtaatgacacggagacattttattaattatgaaagcttggtcttagctggtttgttccctactagtttgtataatctaaattatactcatttacgttcagctgtgtgtcccctttccatgtctcatgccatgcctttatagattttcccgttgatatctttcaggataactttttcccttcgttgtgtgtgcagtcatgtctgacacctatgacacctttcctggtgactcccaggccatcccctcatgctgttgacactgactggttcctgcccagcagatgtccttgcatagagaggatcctcacagaggtgggaggggcagcgtgtcctcgtgcattgattgccatttattaccaagtcctgcttttctccagtgctttccttccttagcatttattcttaattccagcggtttcctcggtgcctccctccccacagtcctctccttatttaaggctgttctgcagcactgctaaaatcatctgggctttatgtaactttttcttattatagaagcagtatttgtagcacactccaaggtcctggtaagagtaaaggagctaagaataataataagggatttcgctcctcttccagtcctgctctgtcttccggagcagtgacttcacagggagatcacttctttgctagccactactctgtgactcatcttatagcaaagaaggcgagctaacagtagtgcttgagcaaccaaaacagaagtcaaagcctggcacttgcctaattcaaatcagggtgcttttgtttgttgctacgttatgcaaaactataaaaatctataaaaaagtgcacactatacagttgtactcgtatttcttggcttgtaggaatttgtatttatttctgttgctgtgatgaagtgatctgacaaagaacataaagggggaaagggcttttggtttacagttctataaggatggagtgcatcatggttgaaaagacatgccagcaaggtagggaggcatggtggcaggagttggtcaggttgcgtctgcattcctcgagtacagagaccagtagtcaggcctggctgtacttcagagcccaaccactctcacctcttctagcaaggctccacctcccagaaattcatggtttttccaaacatcacctccatgtgtggaccaagcattcagacgcatgagcctacagacaatagttcatattcaaaccacatagtagatctcagcctattagaaacaccagtgcattctcctggtctcttactgggaactcacttctagcatataatgtatgctttttggcccataacacatgcaaagttggacattttcagggaggaaactagagttctttacttaggatcagcatcctaagagtaacaagcatgaaatgggtgttgatggaaactgtgcaacacacacacacacacacacacacacacacaggtccattttatgtagcttgctacttcgagggttggagtgagacaggtctcatgtagccatgttggccctaaacttgctgtgtggcaagactgacttgaacctcatcctttgtctcctgagtgctgggatgagaggaggttatgtgctatgctaccatatctggctatggcattattaaagacttatttctatttttatttacttgagcatcattgacatggtcttctaacagcagccttaaatgtacgctgggcatataatctggagtactcttttcaggggatagatgctgctggtgatgggccctgctttccattctcaatgttgctgtctctgtacgatttctgtcagtgactctgcaaagttaagtctcactgctgtgtggctgctgacacgtaagatcctgaatgagctcagctgtccttaggtgtttctcttgaaagggaagaggggtctgttttagggtgactatgggggaggaggaactggtctagcttttgttgttggcctacaagcatgagtcacagctgccatctttgtgaactcttatgaaatgtgtgcatgttgtgcaaatgctctgccatcagattagactccgctccttttaattctgtattttgaaacaggacctcactaggtttcctgcgttggcattgagcttgtcttcctttaccacggcctcctgagctgtggggttataggtgtgcaccgccgtgcctggctacgtgtaacattcccctcgggcagcatagcttctttgacttctgaggctcatttgtttattactatgatatgggtatgtcgcagtctgtgccaccatcccataaaggacatctggagtgcttcctgtttgatcttataaagaactgccctgggcattcatgttctgtgtgaatttaagttttcatttctgtcaagcaatatccatgactgattgttaggctttatggtaagtgtaagtgatgtggtggtttgaatgtagttggcccagggagtggcactgttaggaggtgtggccttgttggaataggcttagccttcttggaggaagtgtgtcattgtgggggtgggcagtgagatttcctcctcaccatgtgggagccagttctctcctagcagccttcagatgaagatgtagaactcttagctcctcttgcaccatgcctgcctcaacattgccatgctccggcctcgatgataaaggactgaacctctgaacctgtaagccagccccaattaagtgttgaccttttaagagttgctttggtcatggtgtctgctcacagcagtaaaactctgactaagacagcaggtttacattttgtaagaaattgccacagttggtaacatggtagctatacatttcatcttcataccagctgtgtgtcttgggttaatttttataaaacgtgtgagggttatgttcctgtctgttgatgattagtaagcagtgccacttggtgaactgatgttttactatcgatgaatccccttcctacctttgacagagctcagttggctattgctgtgtggctttgttctggatcttcttccattgaccgattcggcccaggctttggtatgctcgctttgtagtaaacctcctgtagggtggagtgactctgatagctttattgtctcagttattttgctcttatacctctccatatacattttagaataagctattaaagtgctacagaaatccttttattgctttgttctcggagacagggtttctctgtgtagccctgagtgtcctggagctctctctctgtacaacaggctggcctcagactcacagagatccacctgctatatttttaatcaacctatttttcaatttttttattagatattttcttcatttatatttcaaatgctatcccgaaagtcccctataccctctccctgccctgctcccctacccacccactcccacttcttggccctggcgttcccctgtactggggcatataaagtttgcaagaccaaggggcctctcttcccagtgatggccaactaggtcatcttctgctacatatgcagttagagacactagctctggggtgggggtactggttagttcatattgttgtttcacctatagggttgcagaccccttcagctccttgggtactttctctagctcctccattgggggccctgtgtttcatccaatagctgactgtgagcatccacttctgtatttgccagacactggcatagcctcacaagagacagctatatcagggtcctttcagcaaaatcttgctgacatatgcaatagtgtctgtgtttggtgactgattatgggatggatccccaggtggggcagtctctgcatggtccatagctccaaactttgtctctgtaactccttccatgggtattttgatctctattctcaacctatatttttaatacctgctcaagaactgaataaccactccaggaaactgcctgggagatgcaatgcaaatcagctgctgcagatggtggaggggctggggatgcagctcagctgacagaatgcttccctgacacaagacctcagggccgatttctccccacaccagttggacatggcggccacacctatcaccccagcacttcaggtagaggcaggagaatcacaattgatcatccccgacttcttaagacaattggagagcagtgactagcctgtgtagaaattcttcttaaaacaaaataaacccagagccactggaagcaagcatctggagtcagtggtatttgagtggtcagtatggcctggactacctggacagagatgcagatagttgcaaaaggagaaggctcacatggccccacgtggccgatgagcaacagtccctggaaagaaacaaggtattgtgctcaggtgtgtggctcggcatgaatgaagttctggctttgacacactatatccgtaactacatggtccatcattcaaaaacttgaacaatatacgtggcactcagtaatatcatgactaagaagtattttatttagtaagtcttgtttgaaacttataaagttcaatagtgatatagcagatatttggggcataccgcttcttgtagcatttgtactggccagtgccgcatgctttcctgactcctggaggttagtgaacacagttgcttagagcacccaatttcaccatgctttaatgtcattctgagccattcgcacctgaataaactactccacagaacttcgattctgtttttcctttgctttcttggtttctaagtttttccttttggaattttaacattcctagcaagtctttcttcatggttctgtggattgctagctccactttacttatgctgggttcttcatgagttctgcagcgcttccagagccttggtggtaactgtgtgtggtattcctacccttagagggggatgcactgtgcctgccctcctctttatgggctccaagccaggcaaatagagggagaggggagaggagagcagagagcaggccagagcatcacccctcagctggatgctggagctccctaagctgctgagacttagcagcaaggtcagcttctgccctgagaaaatccaagtgtgaacacaggaagtggtctgcatagagctggccttagcagagccccaccaatcacccagtgcattcatgaaccactatagaggcagagtctgtccaggagtggagtgagggaatgtggcctagattctgcagcctttggaatacctgtttctctgtgtcttagtgatggttctataggaaaggctaacagttgtagaagggaacagaaataataaaagcagaatagaataggtcctctataatgtgctcagggcttttcatagtaaacataccaaaccctgaagacttgtgtgtggtgtgtgtgtggtgtagtatatgtgcatttgtatgtatgctctcatcacatgtactcacagggcatcctgctaaatcacgtcttaccttgacacaggcctcactgaatctggaggaaggttgctggccagtgagcctgcagggtcctcctgccttgggtctcccaccactggggttgcaagttgtcttagttggggttactgttgctgtaacaccatgtaacatgtaacaccatgaccaaaagtagctttggggaagaaagctcactcacaattccatgtaacagcttattattaaaagcagagagagaaggaactgaagcagggcaggagcctgtagacagaagctgaggccatggagggggctgcttactggcttgcttcccatggcttgctcagtctgctttatctcaagcccaccagcccagggatggtcccacccacaatgggctgggccctaattaatctctaattttaaaaagtgccctaccagctcttctacagtacagggtttggaggcattttcctaatcgagactccctcctctccagtgacctcagcttcaagttggcacaaagctattcagcacacaggtgcaagcccagtcctatcgggctttttgtatgggcactacaggtttgaaaccagtctttctgcttgtttataaagcaccgtgctcttagccgtcatctcagctgttttacactttccagttttattccaattgattgtctgcgtgtgcacatttaatagcagattgtgtatgtatacatgcacatacttgtgtacatgtgtgtatgcttgtgtatggaggccagaagtcaacctctgatgtcattcctgcccactttgttgttgtaacaagcacacctggctttttacatgtatgcttgggatggagatcaagtcttcatgcctgtgtggcaagtacgtcactgaccaagctgaatcgccagctctccatagcaaacctttaaaacgtaaaatctccaaaatgagatataatggctaattttatttgaaaaacgtgttggctcttgccttagggttttcaataacggttgtatcctgatacaacagtaaattcattactatctctgctggaaagggctatgggtaaatatttataacgctgacaagtttgtatgttgaaatgggggggtggggagtaggacttttaaccaacacagaggggagtctggcagggggagaggagagaaagggcgaagaagagagagagagggagaaagggtgagcaaaaacaatttctctgagattgaaacattctatcctatagggaagctccttcagcaggtagataaagaactccaaatagtttcaggaagttcctgaaactgaccattttcactagacccttcctgccagagtgagcaatcaaagctgagtccttctcataaaagccaagctgcacagaagactccgggaagccagctgagcttcctgcaggaggttagaccagacttatttgggaaggacagttcagtgtgttgagctgcttgcaggctgtgtggtgtgctccaggttcccagcattgagagctggagtgggctttcagtgagcagctgtctgtgagttactgctgctcctgtatgtaaccccagtaacgctcattgattcacctagggctttggtggtatgcatacttggtctgtcacgggctgcctatctggaatgggtagatgtgtggtgttgtatctccccaggaaaagttttgttacactgttacacaacaacaaccattatactctattgccgacaatacccactgaaaatacttattgaatggataacttttcaagtgaacacttttttcaaaggcttataaaaaaatctttattcttattatctctcggaaaaggaaactggtgtgtgtgtgggttggaataaatattcaagctttagaacttttaccttctttgaaatcttctttataatttcattgatggagaatccattgaaaatgatctttaaataagaaaattgagggcctggagagatggctcaccaggtaagagcactgactgctcttccaaaggtcctgagttcaaatcccagcaaccacatggtggctcacaaccttctgtagtgagatatgaccccctcttctggggtgtacacagctacagtgcacttagatatagtaataaataaaatctttttaaaaacaaaagaaaattgagagttgttttaggtgtgaatgaatgtattactgggaagtcatgtgttgcacaaagacgcagaaggtgtttatgcagagtctgtcacttgtctgttgacctggaagaatggacatgcttccggctgtaaataacttagttgcctttgaagccagacagtaaagtgtagcgtatgcatagtttacttcttctagtagaatatctttcagacagctaatgcatttgtaaaaggcttcaacttgttttaaaccagtttcatggcctttaacataaataaacacattaatcatttgctctgtagaggatatgtgatacatattaggcaggcagccaagtgtcattgaaatgcttgcactatcaagagtcctgtgtttctgcttttgagtagagtgctgctgtagaaagtctgtacagttacccaagaactcccatttccagcaacttcggaaggaaccggagccctcctggactcttagtgctttctgcgctacttagagattgccacagatggatcgcgtgcagtgaaatgaaatgtatttcttttatctctgagaagcacatgtctgagggacacatgtggcgagagcctcttgctgtgtcatagtgtgggtggcagtgacaaaaccaaccagttccagagagaggggctttcctcacccacaatccggtcattcactacacagtaccgtcacagggaccatcaagttagaggaacattcaaccatagcctgatgctatgtttttaaaaactacatgtcgagtcacatgataggtcaaacatacgagcagtacctgggaaatcaactctgcattgtctgtggatgcacgggggaaggtgtatttctgaggctctggcatccaaaggtctttgtttttttgtttttttgttttttgtttttgttttgttttgtttttcaagacagggtttctctgtatagccctggctgtcctggaactcactttgtagaccaggctggccagaatccacgcccggcaggtctttggttcttgagttgagatgaaagcaggacttcacccgtgcaaacggaaacactgctttcgagctggttgtttgtcctctctggagaacaccgacatgtgggcccagggatttgatggtggtgataaacataggggcaggggaacaagctttctcctggttctgctcagatccgttcccactgtagagcctggttcctgagtgtagctagaactcgggcagtcgctagaactcgggcagtcgggggatgaatggtggccgagacccctgtggcctctgttgggtttcctctaggcaaaagcgtttatgacagtgaggtgagttcttttctctcatctgtgtgagttctcattcatcttcctctctctcccctacaagccaaatgctactcttctttcgttttgttttggttttgtttgttttattttgtttttttttttgtttgtttgttttgttttttgttttttgttttttttttccagacaggatctcactctgtagctttggcttttattactgtttctgcccagtcagggctcattcccaggttctcggaggccttacctaccgttagctactactgatggtgtacactgtgtatgtcttctaagctgagcccttgctctgtgtgagattcttgtgacctttgagcctgtgtgaaattgtaccctcccttcttcactagtcctcattgtcacagagtcattcttggtaatttattgagtgttcctgcttactgagtgccattccgtcctttagcttatttaccatgcctgtggagtccagagataataaaacaacagaggaacccttccaggtccagccaggatttgactccagcccttatatgcagcaaatagactcctttccctgagatatttattgcttagccaggctgctgggttaatggtataataccaccactgaagtttctggagtcatcctagaccatggggtatatagttctccttaggctctttccattaccttacattcttatcaggggtctcatgccacaacttaaattgtgtgtttaagagttttagtacttataaccaagaacaatagttttgagcaacaatattcacttcagtatctaaaaagtcctttttctttgattgtctcagtagcatttggcttgttgggattgaagtgggtggattagccaggggctctagcaacaggtggagtaggagagtctgatggcaacagacgtgagccatcgggagaggtgggaaagtgcacagacgaaaatcagtccagatcagatacagccgcttggtcactcagcactgctcttggttgcctcttctgtagtacattccctcattgctgtggctagaatttcctagcataccttgcagctagaattgtttggtaacttaggttctcccaaggtggtgtacttcatgaagcctgggacaggatgcacagggaaggcagtgaaggcttagtggtgtgcagaggaaatctgcttctgtccctgtctaagtcttagcttttggttcctgttgtcatgggaactgagtggcaggaggtttagatttgtggtgggtccagactttgctcctggttggtgcagttctgttgagcacccatgacacgctctctcagtttctagtaggagctagctgccagggctctttatggttaaactggagaggtgattgtgttgtctgcaaacaggaattggaacgggcattgctattacagagccaaggaaatgacgcttcatggaagctaactgtgtttaatactgacgagaacagagactgaggtgtttactattaagctattaataatgaaagtattactataagtgactcatgactctagcaaaaatacacttggtggtgtgttattttgctttggaagaagcaggaattgaagtatttcaaagaggaaatagtggagaaaagacagcttgagatgacgactctgaatagcttgatcatgacggggactggggggccagtacctgatcagaaccaagtcaaagaagtcttaataaactgtgggcacatgtttgtttgcttgccgatgagaagagtccaaaaggcagaccctaaagagagcacaaggtgacagatctgaaacccgagcttctgtcaccaagctgccttgtaccttgaaggtctccttagtggtggcatttgtggagaatgcacctcttaggaattctgggactgctgttaatgatgtgtggaagcaaactttaatgcagtgtctttgacttaaagacttcgtcacagtagccagacaactgtcctaccctccgagttcttcagggcactgtaaatgtaggcttgtaatcactcttaacctgcttttaacaggtctttctttttagccccgttgttatagtactgtaatttagtgacattaagccaatgtttccaaactagtgtgtgctagataaaaatagatgataagcctcggatgtagctctgaggaaaacttattctcttgtcaccaagtttttaggacactgagggaagaaagggaaaaataaatacatctttatctcggctttcttatggtaccagtcagattacagacagtggagcagagctgtagagagctgtgtgttggtttgtattcgttcatttacacctccatgcacacacatatggacacacacatttgcatatttactatggtttagcacctcaaggtccacaggaggaggagggcaaaacctcgcttgcatttttctcttttctttcctttggcccagttagggattgcagcaggctctcctgagttagggatcgcagcatactctcctttatgcccagcctctggcctaccacagagctctgcttttgtcctgaggcctgtgtccacccagtcagcccagaggaggtgggctgttcaggttttaggtctttctcttcatgaagtctgtgttaacaagatgtttcctgctcagtttcctatccgttctgttctactcggtcagacccatccatatcagagcattatacccatcatgatcagacatacaaatttattctaatgtgtattgttcaattctctgagtactctagctgcattgattaacaggttttatttagtcatctgtgcagtgagtaaagcactcaacgaactgggaattaagcacactctaagctgaaatgtgaattcattaattttcaatttgttttaaatttcatttgctgtttactgcccaaagagatgataagttttatttaaaatgaagtgtgtattgaaagaggaaactttagaaacccacattctcttttacttaattttgcttctaatgtggttttaaactggtttaaacaggttttaaactggtatgtgacgggctgagacttatggatgtatctgagtctatttctagttctgtgtgggaatggagatcgaagccagagtacatgggtactagggaaattactactgaacagggtggcctgttctcttaattttgattgattgattgattgattgggataggggctcactgtgtaggctgacaggtatggaatactctgtagaccggatgggaccaaactggctgggatcaggcagcctctacattttgagtgctaaggtcagagatgtgacatctagatactcgggcctctttaaaaataaaacaagcagacaaacaaaaaacttattttgagaaatggtcttctgaagttactcaggaaggtcttgaacatccagttttcctttctaagcctgggatttacggacctgtgccaccaggcccatcttattaccaattaggcaacctcctccaaatcgacacagctgtcaggtcacctggagtcacctgggaagaggaaacctcagttaaattattgccaaggtcatattgacctgtggccatctctgtcaggaattttcttagttgctaattaatacaggagggtgtgttctattgtgggcagtgccttccttaagcaggcaggctgggctgtgtaagagaggtacctgggcgatccagtaaaaagtgtttctccattgtgtggcgtctttcagttcctgtcctgggctcctgccttggtttccctccatgatggatgatgacctaaatgtgtgagccgagcaaaccctttcttcccttccttgctttggtcctggtgttcctcaccagcagaaagcaagctaggacgccttcgtccttcaaagcccctcctgccgcctccttttcctgacactctgttttgctggggagttttggtctgtcttccatttgtatgtaattaagattggagtctggatctctcctttcccttggagctgtttgtaaccagaaaaactttactgtgttcttagcaagcctgaggccccaggtgagggcttggtttgaccttttatttatatgaatcagaagtagatttgtcccaggtgaggtggtgcatttaatcccagcacttgggagccagagacaaggggatctctctgagtttgaggccagcctggtctacagagctagttcaaggacagccacaactacacagagaaaccttgactcatgtggtgccccccaccccccaaaaaagcaaaaaataaaaataaaacccaaacaaaacaaaagaagtagtatatttgtcagcgtgtagtctaaccgctgctctgaaatgtgcgttttggttaggaaaagctcatgtctaaaggtgagtcttgttctatgctcagctgcaagtgcttttggcttttgaaactggctcctccctcagttctcacacattttctctctgtctgtattcatggccaggattgaactgaccccacagaggagttcagagactggcagccagtgagtagaaagtaccctggggagacagtgattctcccaggggctgtgtaagcttgtggtccacagatagttctgcaggctctgagagaagaaatgactgggtcccagctccttagaaatggcctgtctgccagcaaagctctatatagtctgtggacagttctttgtagactagctgcccctcagtaaaacagtggcctctctttcttcagaaagacatctacacaaaatctaaaccttcaggtagggcataaagtagccctatcttacaaatataaacatacaggtggctttcattatcattaactttattgattgcaaatgttggaacacatttggggaatggatgggtccgatttactgttaaccccagacaggtgggcagaagaggcggggatcagacctgtgacccagctggtccttgtgcatctgagcatcgcacactggacggtgggatcattacctccagggctttgaagtttttattatcttaactgtgactcgttctgaaattctgccttaataattccctaaaggtttgttctggactaacctgctgggacttgtggaaagaaggttgagaatactgtagtttaacaaccaaaaacctgtactttatatagctcttattttaaaaaagggctgcagccccaaagatgagccctccataaaatgaagctacagaagatggtggccatctgactctcatgtgatgcacagagcgcactctttcacactaggcagcctcggatgttgctttgagatggaagagttctgggaccttacacttgtcagctgcatgaactcggaatctgcctgttgtggccttttataggtgggcttctgtgtgacactgcagtcacccggaaccctgtgtgcttatcccgtagcaacgatggccctgcttcagacattcttctagttctaggatagcatccgcccctaaagctaagtatacctactgtcctccgcacagagctagtgttctgacagcagcagctcagaccccaggctgctacctgtgaaaccacgatagtccacaggacagagcggaattgggtatgtaactgagaacggaggattgcaattttaaacaggcatcagggctgatatcccctggggagatgtaaggacagaggaccaggaagcagcctgccgtaagttccaagtccacgcagttctgtggctttgtggtcaggctggtggcgatggcacagtctgttggccaacttaccattactgtaacagagcgcctcaagagagtcaggctcctttctttaaaacagctctcttgctgtgttatccagctttgcctagaactcgagttttcctgccatagcctccaggctgcgagctttccgggctgagggaggagatttgcttccagctgtggtgatatcatcagtccatcctcttgtttgaaacactgtggcatgtatggcagaggagccttttcatatcaggcaggaatgggcaagaggcagcaggaaacagacccagggaccagtttgaccatcagaggcttgcctccagtgaaggcctttcatgacaccccatctccgcagcgccttttaggtatgggcctttgtgtgaccgtatagctcctaactacagcagcggtgggggtggggagatggaaggttggataagttagtttcacaggactgaaactgggataggcgtggagggagggaggtggtagcagcgagtgctctgagcaaggagaacggtgacaggggacagcatgtgtaaccaggcaggacactggctgcaggactgagtgctgactgcggcagtgatgggaggtaactacattctagacctgttctgaaggccaagtgcataaggctaccacacgagtgcctgtggctggtccatttaaacagcacgttaaggcaagcagaacatctgtttaatgtggcaaagtcaaatttgtgcattctagagtcaaacagggttggcctctaagaccaatttctcctttgtccttacagttgcctgggaaagtgaaacagatcaaggtggctgagcttgaatggactttactgaattaattcattctttctttctttctttctttctttctttctttcttcctttcttcctttcttcctttcttcctttcttcctttcttcctttcttccttcaaggcttttctaaaaggaacttaaaaaaaaaaaaacccaaaaaaccaagttgtgtgttttcacttacataatgttaatagaaggcctgaaacttagccaagaattctgcactagaaagcggtgtgatagcttcccgtcctaagtatgttgctgactaatctctgagagagcaagccaagtcatgctttgctgggtagtaaactgtcgggatagtaaagtgagcccacgtgataggaaactgggaacttgcaacactaattaaggagagagtggagtatatgactccagaccagaccaggcttccggccccacccctcaatttgatttctaaccctgtggacgctggaccaaaccagactggttgtcataagtcagttatgctgtctccatgtgcagcacacaacagaattcagagggccaaacaattacttgaagtaagagctagtttggaagcagttggttttaaagtggtttttctgcagatattcattagaactgggtagatttgcaatctgacttatttttctgtgtatgcagcataaaattaaaagaatttaaagtaagagaatagaggactgttaactatttttagaagtagcttttatccattctttcaagactgataacttgagctgggaagatggcttagcggttaaaagcactgactgcatttctgaaggtcctgagttcaaatcccagcaaccacatggtggctcacaaccaccgataatgagagatctgacaccctgccctcctcttctggtgcatctgaagtcagctacagtgtacttacatataataaataaatcttaaaaaaaaagactgataagtcttagagtcttatgtgttttcctccccctccctctccgctcccccccccccctcgtgtgtatgagtgtttttgcttgaatgttgtatgatgaatgtctggagcctgtgaagaacagaaggaggaagtggagttaaagacagttgttaacttctatgctggcatggggctccaagcctgggtctactgcaggagcagttaagtgctcttaactgctgagccatctccctggccaggcagtaatatttttaaaacaacagactccactgttcctattgttagtggaagccttttgtgacacatttttcaatctttaggctgataacggctgccacacagtgtgtgatatatcatctttagataccaaacatataaactgcgtgtgttaggaaagaaagttttagaaataaatccaaatgtataacctgtaattggagataggcagagctctctgtaagaagtttgaaagagtccttgtggcgttctggagcaagatgaggacctaaaggcttgctaggggacccactcaggtgccttcattgcctggtctcagccgtgttttccttgtggcctatcctgcatgccatgtatcagaattcctgtaatacattttattattcagaaagcctcagaaggcaactagctttcttcaaattattcctggaaatcacttgctctcgagccagcgcctcccatctgactgggtgggtgagtaatatcacttcaaggcagtgttgacacacacttcttgccttctcagttctataaatttcgggggaacgtgtctcagaatgggtgggtcaaggacgtgggcaatgttggcagcgtcctccttggtgactcgtgtgggtatcattgctccagaatccaggtgttttttttttttttttaaattaaggaagactgatgtgccaacctgaggacattattataggcatctaacacttaaacagatgctgtgaagttttgtttaaaaagttgcgatttctccaaatgcattctattatacatgtgctgattattttctttagaacaacagaagctgctcattggagtaaagagcctgagttttatttgtcagttggtaattggtaattggcagtattttcatagaactgaagctttgttcccttgcaagaaattaccctgggtaatatgtgtgatgtgtatggaggaactcaggaaggaggggccggaggaccagataactaagggatgctaatggccagtgggcctcacactgccagtgggctcattatttgaagtaatttattgttcctttaagaagtacatatacattaatcatggaaaactagtagaaaaaagatattgtgtaaatgttagagtcttagtaaatataaaaatgtgtttttttcattgtaggttagtacaagttttaaaataccacattgtgtgttgatactgaaaactgtaaacaagatagaaaacttggcctgtacaagcatgttaccaatgagcacattgttaacatttaaagagtcctttcaaaatgatttccatcgctgcctatacacactcctctcctctaagcatacataaaatcacctgtaatccttttcatggtcggtatattgtttttctccctgcatttacttgtcatgtttgactgataatctattgataactatttacataacttttaaaaagattataagcatttctgtggttaacatttttgtgtgtttttatttgtttacttaaatgtagacttgctgtatttattatacacagattttgcttcatgattccaggttaaccttctaaactttgctcctatcaatggtatttaagaattctacttaacctctcatgttagaaagcataaagaagagctggggatgtggcttgggtggtagtgtgctcagtcttccacactcaaggccatgggttcgagtcctagcagcacagaaactaggtgtggtggtgcagacacgaagttctagcacttgggaggtgggggcagggaaatgggaggtgagggcagggaaatgggaggtgggggcagggaaatgggaggtgggggcagggaaatgggaggtgggggcagggaaatgggaggtgggggcagggaaatgggaggtgggggcagggaaatgggaagttcaaggtcatcccgagtgacattacaagctctaggccagcctgggccaaatgttagacaccttatctcaaaataccaagccacacaaactaaaaccaacgtgccacccgcagaccaaagtgaaacaatccaaagagcagaaagaattactatcatttttgtgaatcgcataagcaaaaaagccaactttattatttgaattttcctgtttttaaagtaaaaaaaaacttatgatattattacttaaattgtatgtgtctctttgtatatgtgtgtactttgttatatatgaaataaatgagccctctaggcccatgcatcttcgagctttggacatactgttttgatctttaaagtcgtaggactgatgcccatggagggccgtacagtaccctacatgtgtctgactaggaggagagcaaatgtgttccttttattaagagtgtgatacatggtgatgcccacagtgtgaggatattctctgcttgtccactgccaaaactaggttgtttgattcagcaattctcttcagaaaattttcctataaaatttataaatacataaagatacttgcacagccatgctctttacttttaataatgaaagaaaaaagtacatggacagtctggaattaataaggggccttggggggggagggggaagggaaaacccacaccccaccagaggtttacctattctctggtctgtcaggtgtgggagggctgctatttaccttccactcatccctgggtgggcattcaagcctctgacccactcagggggtggccaaggggcagccctatctgctaaagcccccggggttatannnnnnnnnnnnnnnnnnnnnnnnnnnnnnnnnnnnnnnnnnnnnnnnnnnnnnnnnnnnnnnnnnnnnnnnnnnnnnnnnnnnnnnnnnnnnnnnnnnnnnnnnnnnnnnnnnnnnnnnnnnnnnnnnnnnnnnnnnnnnnnnnnnnnnnnnnnnnnnnnnnnnnnnnnnnnnnnnnnnnnnnnnnnnnnnnnnnnnnnnnnnnnnnnnnnnnnnnnnnnnnnnnnnnnnnnnnnnnnnnnnnnnnnnnnnnnnnnnnnnnnnnnnnnnnnnnnnnnnnnnnnnnnnnnnnnnnnnnnnnnnnnnnnnnnnnnnnnnnnnnnnnnnnnnnnnnnnnnnnnnnnnnnnnnnnnnnnnnnnnnnnnnnnnnnnnnnnnnnnnnnnnnnnnnnnnnnnnnnnnnnnnnnnnnnnnnnnnnnngagagagagagagagagtgagagagagagagagagagagagagagagagagagagaagactagagagaaagagtaagagggagagaggagaggagagaagacaaaggggagagagagggcgagagtgaggagtaagaggtaagagcagtgagaagtgagagagtgaggtggggctgaacagccctttttatgatgttcactgttgctaggtaactgcggaggagtttagcctgaaggtcagaagcttgggccattgcttatgtgacttctagccatgcttctcttgtgggggttgtgggagtggtaacttaggcaggagtcagagttcggagcatgagggagcgcctaccatgtcatgtaggtgaattattacccttcagggttcagacctcagctcaactggagaccagcctgcaattccccacaacagacaaaaaggtattgtatgaaatatgatgttgaaaatacagagatataatggatccgttacttgtgcagaaatacccacaatagcttgcgcagctggcccgtctgccgaatacatgtagcctgactgtgctcacgtctcagttcttctgtagcctgactgtgttcacgtctcagttgtccatgtgatgaggtggacacacaggtagataagcactctaagcagattccgttttgtgggcaatgtgaggaggactgaagcttgagaaccgcccccttctgcattgcagtggaaacctttataagtgtgtgtgtgtgtgtgtgtgtgtgtgtgtgtgaaacagtcaatggaaggtgcacttcagtgctatggaaactttgggaagtaaaatgtttcagtgtggcaagaggctgctggcattccctctgcttaataagcttaggccttcctaaaactgcagttgaatgccaagatttactgtaaatacagaatgctttattcacgatgtgaaaatacagtaggaagaggaaaaaataaggaggaagcagttgtcaagagggggaggctcaggtgggcatcacagatcctggctcgctctgaaggaaccagggtgctgcagtcaagccgcccaggccacctgttctcaccactatccggtacctgccttccaggcaggccctttgccagactgtctcctccttttccagttcattagtgacattttaagatggtgcagcctgaatccaatactccaggtcggttgtcactcgtctgaaaggaaggctcggggctacaggagtttcagatttggactgtgaggggtttctagtatttgtatatacataatgagctattacaagcagctctcaagtccagacacatagctcatttacagtttatgcctgtttttttgtgcacgtagcccgagggtgaacagcttctacctgtaacaccatgccagtgctgaacgactttgagaagtggaactttttgggttggattctaggctgcagacactgtctgttcttctctgctcccacctcctccctgtgcagcagcctggagccttcttttgtgcaagagaaactgtccttaaattctgcatgacagttccccccaagtctctgccctggctggccgtttccccacacttcctgtctcgccacagggtctcagcttggcagctttacctgaaggtctctcccttcatcctcagatgctgagttaatactgtggttgcaggtcagcgatgccttgccagggaagttcttgcccatctcgcacggtttctgctgcaagcagtgtatctgtctgagtagctagtcagattgcccgtgttgccagtcggagcacatggcaccttcctttgcctttcaacttttcatatgctaaagggaagaaagaaataattctgacagcttagtttttcctggatgagtatttaaggctactcgagtgattgttaatgcatttcctgtagttatccattcagagatggtggtggtgcggaaccaggaggcttggggaatcttaggctcagcaagatagacaggcacatgcttttgaggggctacagctggttcctgctaattagcatcctttcgggaagcagctgccctttctacccattgtggtcactactggatatgtaagagactcttctagcccaccattcttcgtcacatgcatgtggactcacatacaagcatgcacacgtgcgcgtacacacccccacacccacacacaccattgatgctcttctggtttctctgcactcacattcttagttactattgtttctagctgttgtctgccaaatatttgcctgtttagagccatagcatacagtaatctctcagacggtgccattgagagaatactggcttgtatttatgagttacttaactgaccataaatacatcagcttcgaagaatggaacagcctagaccttgcaggtctccaggaacactaggctgagaaaacacaatggggaaatgtgcctttgaacagatgaagtacaaaaagttcctttctgggtgaatgaactggaaaaacggtcttcgtgcccacaagaggacgcttggggacgtggttttaatggggactagatcttagccctattttacctatgcaggaccaaccatgccactgtttggagcagtgttttaaaatatgcatagcagatgcctgtattaaatttatgcctacatcttggcctcacaatttcgaaacctggtctaggagttcttgggcgtgtcctgcacaacaggtcattgctggtttgttctccatggcaccttcgagtcagattgataccattgtaagagtacagtggatttcgatacatttactgctgagcagatgctgacgtcggctgtggtagaacgttcccaccagctcctggcggtccctcacccactccagctcccggtggtccctcacccacttgcagtcagcaagtgcccactcaaagccccacacagctatcacttgtcccctggccattgccggtttactccacgggcaccttatgaatgggatccatctttttgcttcttgtcttagcagaaagacctgtcagtgttcctgtgcagtagctgagagtgacagtgcctcttccaatcagtgattcaacatctcttactcactcttgtggttaagtttggtcttttgatcatttctagtcattttaaaacgaggactcagctgtccctgaggttgattccattgctgaaatgtctgtgtacagtgagtgttgagtttctgttgaggaaatgttttagctcctgatcttgtgttgtagctttattaccctctgtttcactatgtgtgcttcatcaagagcacagcacatggctatttcatcatttccttagcagacttactccatttgtaccttatttgccccaggtgtgtctctaaatgtgtgcagcccaaactgcatttcttcagctttaacatttcaatgggagctgtttaaacggtccggttggcccagggaggcatgatcatcaattactgtttcaactcaatactgttgactacagacttccttaatatttagttcatgtagtacctactatgcgtttaggagacaccacaccaaggcctctgcttcattttcattgcctggagtctaaagtctcctgttgcaagttggaaacaggcctcacagagtgaaaatagcaccttcttgtcaccgcttcatggtgaagcaaaaagagttatatggagtattagctagtgacatctttttagagagtgtcttccctttggaaatgtgttcattctgtctcctgctgtatgagaatgtcttcagaactttaaatcaacactctaggacccttgctaaacatcactaaatcatgtgaaaacctgtggtgacttgttgcaagtagaccagaagtgactggcctgctcctctggagctgggtgtggacctgcgcagatccagtctttatcagtgggaaggctgaggagaggatggagccctttggagctctgctgatcccatgagatctggaaaggccctgagactgtaatatatacatttagctgaggtttcatttggcctgggaaccaacatatttttattttctatgaaatgtgttatgctcatggctttcaattccataaatagaaattttgactaaattctttttaatttttgtctaaacctgatagaaatgagcaagcaaggcttgcatttcaggtaaaaactgctaaccactcactgaagccacagagaggacgacttagtttatgtgtctgcgaaatgttttcctggtgaagttattttaaaatgtgctctattgagtggtgaaattccggattactggatagtctgacccttcttgctgtactctagacctaagttaatttgctactgagttgatttgtaaatagtaattaccttatagaatttttctttactttttccagtgtctccagagttggggataatgggatttacttcgctgagctttggcttcatatctgtcttataccttattcattaaatctaagatcagcattaatagtcaaaaatagtgtgcctttgtatgttagctctcttctattaaacgtgctcatggctttaaaatataaaactacagagacctaatgctttcaagtgttgaaaaaaaatttcttgagttggtgatatttttactgttttgagacagggtctttctatgtaaccgttgctgtcctggaacattccatgtagaccaggctggccttgaactagctttgcaatgctactgtttatttctgggttacatctctcccagttaaacaataagaacatgaacaggaggagtgagtagtctctcttcaccacagccctgcagaaagaaacgtaagatttttgtgttgtactttgcaggtggggagttttaagcgggagatgaccttcacgtttcaatcagaggacttcagacgtgactccagtaagaagccgtctcatcacctgttcccactggccatggaggaagacgtgagaacagcagacaccaaaaaaaccagtcgggtccttgaccaagaaaaagaaactcggtctgtttgtcttcttgagcagaagcggaaagtagtttcttctaatatcgatgtccctcctgcaaggtaagggggtgtcgcatttgtaggagacaggtagagagcaggcccgctctatcctgtctgtttcacagggtctagacttagcaagagctgtctgtcaagttttctccgttccttctgtgaagtagaaccaattttggagctgctgtggttaaaactgttgtagctgtagaaaaaaaatgcctggatctttgacagaagaaaatgtgaaaatacgaacagagcagaccattctgtttaaggttgatggtgcttgaaggtagctatgctcatatcctaggttggcaaattacaactcgaggctgatttagcctcggcctcttacgtgtggactatgagatgaatttaccaattcaaatgatatagaaagaaagtgattgtgacacagcccattggtgacctgtaaagccttcagtgtgtaaaagtgtttggtgatgtctagttgatgtcattcataaggtgatgtcatttttaaggcttatctgggcaagggagatggctgagtgggatagagtgcttgccctgaaagcataagaacctgcgttcaaatcctagaggccaataaagttggatgcagtgctgtgcacatctgtgatgctggctctcttacagtgcagttgagaacatgtgtaaagttggatgcagtgctgtgcacatctgtgatgctggctctcttacagtgcagttgagaacaggtgtaaagttggatgcagtgctgtgcacatctgtaatgatggctctcttacagtgcaattgagaacatgtgtaaagttggatgcagtgctgtgcacatctgtaatgatggctctcttacagtgcaattgagaacatgtgtaaagttggatgcagtgctgtgcatatctgtgatgctggctctcttacagtgcagttgagaacaggtgtaaagttggatgcagtgctgtgcacatctgtaatgatggctctcttacagtgcaattgagaacaggtgtaaagttggatgcagtgctgtgcacatctgttatgatggctctcttacagtgttgtacacatccactctgtggcacacacatgtacacgtacacttacatgatagatttatattagaacacaatggagagagtttatcatgtaattctctttcagcatttttaaaattgttctctcatacagtacatcctaacctcagtttcttgtcctggtctcctactccctttatttcaactcttatctagcactactggagggtattgtcatggcgcagcggaagcagagcagacacaaacattgctcgtcctccatccggccctcctgctccagcctccgcgcccttgttcacactctgtctccagcctagaacaatgccctgtgcccttcctgagggtctgtgagcacatgtcagctgaggagggaatggggggctctgtctgcacgacagcttgattattttatgtgtactccattttaatgccagaaatgattatcatgagactttataagcagttgattgagaagtcttgcatttattcaagtgtttctgacggctcatgaagacatgtcctataggccaggaaggaacccttctacacctgctcaccgttagtaaatcagcattttcattgttttctcttctaaatagagggactatcttcttcagaaaattacatgttactctatccggctgccaaattgtcaggctttctacaattataggcctctgttttctttaacctctagctgccaattttgtatatcttttatttctgttcaactatttgtcactatttgctcttctatgatttctgtattaaatacttagttaaattattaaggattagtttttactgtggcctcattgtgaaatgttttaaagtgccctgaagcagacagacacatccgttcatatgtgtagtttggctgactcataggtcgagtgtcacgcttgcgacttggaatgagaagagctgtgctgttatgttcttcctgggcctgtcagatggactctgtctgagacagcagagccggcttggagttctgtgggacctactggacacaccatttccatggagtctttcgtgtgtaacagaagtcctgcaattacgtcatactctaagttgttgcaggttgtatctttggtttggttttacccaggctggcctaaagctcactgagtatccaaacatgaacttgagctttgatcatcctgccttccctcctgcgcatagattataggtctgcgccaccatgcccagcttacgccatggtgggagtagaacctaggctctgtgtgtactgacaagcacactacacactgggctttgtatcagctctgtatattctgttctttagcatgacttcacctccgaaaacagtgaaaatgaagggcaggaaaatatctttgctttttttttcctgatgctggtctaaagaatgaaaattctttgcaatcgttaggtatacacggaagcacactgctcaagctggtattattgtgagcttttaaatggtagagagaaattaattgggtttgaaatcatcaatatgtagaagaaaattccctactgacgaggtataatttagatgaattaacgtgctatgagtggggctacctaaagtgccattgttaggctctgcactaacacactcatcgtcattgtcacagttaaaatgtaatcatcataaacatgctatcacttggagaaacaaattgcttttttaattaaatagacacgaaggaatcaagtgatgcagaatgatctaatttctaacattttcttctgtttgcagtcgttaggttatttagtaaatgccaacttttgactatctaagtcgattgagattctgttgtaaggaaactttcaatcgcgtgataggaaggaacacgatttttctttctgcttactaaaaagaaatataattatagctgtcatcaaaaactgctgttgatgtctgagtaaatctggagtgtagtgaaatgtattagaataaagaagtctagatatgttattaagtatgacctataattaaagcgtctatgtgtgtgtaatctacacatgaacatctatccacaccgtttcctgtaacttactctaattccagacttggtactttgggtactcctcagaggcaggagggtgctttaggctggcattgtcagtgtgcagagctcctgggcaagttaaatgcccccaggacttcttagttacccttccccttactctgtcgtttgtgaagcctgccgttcatttccgagagttcatacagtaaagaagtgtgtgtgttagccgctttcccatgtctgccctgtctgatccctctgatccactgttggctttcctgacgtcgtaccttctccatcaccaggtgtctattgggtgcttgctgctggtgaccttgagcttgttaaaaaacaccagtgggaggtgctcccctccacgagcttgcatgcagccagacagatggatgcgtaagtggctaagtccaagaaactacttagtattgctcgccttctcatcagggctcggtgagtctgtaactaaaggaaaggcttaaatattaggagagtggtcagtttgatgcacctacttaaaggcctgctttcctgttattagtgtcgcattgaaggtacagaagcatggaatagggaaggaaaattttcaaacctgagggtctattttaaaaacttttacaaaatgccagttttctggggcctgtttgaaagttgctggtttcaggaagggtcattgtattgcccaagatgtgctaagcttgaccatctcagaagcaagagccaagacagaattaagcatacaagcaatttattggggaaattccttgtgcaaaggtaggagcccagtgcagtacaaggaagaggagtgaaccagggaaggaaggaaaatgagagggtggatgaagtgtgccagcagtctcatagcccatgaggaggaccacctcatgtccatgaggaggactgccttatgtccatgaggaggactgccttatgtccatgaggaggatcaccttatacccatgaggaggactgccttatgtccatgaggaggaccgccttatgtccatgaggaggaccgccttatgtccatgaggaggactgccttggactgcctatgtccatgcggaggaccgccttatgtccatgaggaggaccgccttatgtccatgaggaggaccgccttatgcccatgaggaggaccgccttatgtccatgaggaggactgccttacgcctctgttgtgtgctgatcttggctgggagaagcttgtgagacttgggatctaggcaagtatggtagatgctcttgagtcctagctctggttctggtcagcacttttcttatggacgcctctcctgcctggaacacagctctgagtgttttctgccgtgaggctggagcaggggctggactctgttagcaggccccttatgttagagaaccaagcttcctatggctgttgcttcaagcatcccaagaaccatgcttttgagtcattagatgaaaggccttttgagccccctgcatgggaaaaggtgatgttggtttaggagagttcccttactgtggaaccttaccagtgtggctgattggtctcgggaggaagctgtgtttctttgggaggacttggagggttagaccctctgagtatttgttagtatttttcagtcctgagaccgtgagggtaggtggagcacatgcttagtatgatggcttgcatcaagagcgtcatgtaatgtggtaaggcagcttgtgcagaggtcaggcagcctctgagggactaatgtctgtaaagctcccgtcagtgcgtgcgttctcattacaaacacaagaccaggcctcttctagagcagtgacgtgacaacagcgattagctaagtgtgcactcttagatggcttacggtgtctcgaagggaaaggacaagcttcattgatctttatggagagttgaagaaaacaaggggcgggagagatggctcagtggttaagagcactgacttctcatccagaggtcctgagttcaattcccaacaaccacatagtgactcacaaccatctgtaatgagatctcacgccctcttctggtgtgtctgaagacaggtacagtatactcaatatacatgaaatgaatacatcttaaaaaaattgcagccgggtgtggtggcgcacgcctttagtcctagcactcgggaggcagaggcagaggcagaggcaggcagatatctgagatcgaggccagcctggtctgcatagtgagagttccaggacagccagggtacacagagaaaccctgtcttgaaaaaccaaaaaaaaaaaaaaaaaagcaaaaataattagactatagacaggactttagccatgcttttggatttcatctatactgtagctgtggcaatgctttatattttgagcatgaggtgactttctgtccaatggatgtagtccattttctttggtcctcagcagttgatgaatacttgaggctggagagtcaggaactaggtcatattgggttatagtagttgtgctacattttaaacatatatttttaagtgttcaaaaagattttatagtgggcattgttaggcactctttagcaaagggcactttagttgtgtaggataggttaggggggacaagaacagacaggaggcctggtcaggacagtgttgcttaggacagtaggcagctgggaattagaactgaaatggaaagagagttgacatgatgcaggaggaaggcctctgggctgcgagctggagaacatggctctggcccagtctactagaatgggccttattttatttttcttttaaaaactaccagttcattttcagagtcacagaggggactggagattagacagtagacaatagacagctaagtcagcggagcagcatccacaaagcaggctccggggcttctaaagtgagaaatgcatgtaagacgtatgtctgtctgtaagatgatgtctgtctgtctgtaagatgatgtctgtctgtctgtaagatgtctgtctgtctgtaagatgatgtctgtctgtctgtctgtaagatgatgtctgtctgtatgtatgtctgtggacacaggcgcaaacccagccacttgcttaagagtgaaatgaccgatgctgtgcttagtcaccgtgattgccacttcataaatgagtggaaagacacaggatgtcagacaacatgtaggaggagcatgttggaaaatacatggaaggttctggccaatggagatgttgttctttatcattgtcaccagtgtttatgggagaatattaataatttattgtccttgtcaactgtgatgccataaaacacataatagcagtagctccgtcacctgcaaccccaatgtctgtcaggcagacactgtttgatcgtttagaccagtggttctcaaccttcctaacactgcggccatgtaatagttcttcatgttgtggtaactcatccataaaattattccataactaattttctactgttagaataataatgtgaatatctgctgtgcaggaagtctgacattcagcccctgtgaaatggtccttcaacccccaaaggggtcatgacccccaggtttggaacctctgatctagattgttggaacatgggtgtttgttattctgttctttgtcagaaattgctttttctgaggtactgttggacttcacccaaacagcaattacaatttgcttatgcagagtaatagctaacttcttattataactccaatgccaaagaacttgatttccaagccagttagttatactaaggaaaggagaaataactgaccccaaatactggtagacctaaaggccgtgcttcagcatgcgacagataattagctgccgttgtggtagtgattgctctgtggagttctaaaagccagctatttaacacttgctggataaaatgaagtaacgaccagatgccagtctgaaaaccgtctgcagaaactcattagcctttgaagatatagttcagtatttgacaagtgccgtgtgtgtgtgtgtgtgtgtgtgtgtgtgtgtgtgtgcgnnnnnnnnnnnnnnnnnnnnnnnnnnnnnnnnnnnnnnnnnnnnnnnnnnnnnnnnnnnnnnnnnnnnnnnnnnnnnnnnnnnnnnnnnnnnnnnnnnnnnnnnnnnnnnnnnnnnnnnnnnnnnnnnnnnnnnnnnnnnnntcatatccatcttctggaacccttgagttctaagtcggaaagtaacctcatctgtaaaccacattccatgcgcacagtaaaaacccagtgctactttggctacttcctatccagtgtcccttagagcatggtcccctgtggcaagcttggaagtaaatgaagtaaaacgttccgtcacatatttattatttgagatatggtcttgctctgcagcccaggctggtcttgaaagtggactgttccttccaccacagcgtccccagtactcacgcgagccataatacctgccttcaaaattgctgtcttttatttcctgaagctcagttaagcccaccagctcctgggtaaaagatgtaatatttcatacacatcaggagcttctcaggttcccagcttggtagccaatacgagaccactgagaaaggccgctttgacattttaaattgtttttaaacacattttctttaaaacacatacataagaataatacaaatatactcactcatgttagagaaacactaagactatgatttgtggctctcctaggtcattgacagaatgtcaataaagagaaaactatcttttctaagaaactccttccttcctactctcttgtcctactgtctcagaaactctagtctgtgagtacctgctgcctctctaagctgcacaaagtcagaaagctcctggaatctgcacacacctgcctctttgtgctgagatttgttttttggttggacacagggtttctctgtatagccctggctgtcctggaactcactttgtagaccaggctggcctcgaactcagaaatccacctgcctctgcctcctgagtgctgggattaaaggcatggtgctgagatttgtactctaaagccagtgagcaggtcaagcacagagaggcacatgtgctttctaagtgtcttcagtcacccggagtcaaccttccagggaactagagatctgaaaccaccctgcgaagggaagtcattcactgctctcttcttcagcaggaacaaatccaggaactagaatgctgggctttctgtttgttttaagtatctcttcctgtcagatgctcgtaggtgatttctgagatttaagtgtagacctgctgccctctctcagctcctcccacgctcccagcagagccatggaagctgaggcagaggcagaggaaccgtcctgctcgcactgccctttgtcttactaacagtgatggtactgatatggccttcatttcgtaatgtaagaaagcctgtgctttgtgacccaaattgccttatgaatttttgggcaagaggaaagagtgggtagatactagtgggtgtgttttaaaaagagctttatactgtccttattgctgattttaaataataactatttgccaatagctgtatactgtaaccatttactcttgaatacagattgctaccacattaaaatttgcacctgctgagaattgcgctttgaatggagagcattaggctcttctctctggatcaaactgaatagttatgaagcaaaattctgagggatggaactcttgcaggcatcgtttctatcatgtgtaactagtggagccttctgtgggatgtccttggcagtaactttaaccatccaagcctagtggatgaagaacacggggacaaggtggggccttggcctttaccttggcgctcatactccctctccctccctcctcctcctctccctccttcctccctcggtcctgctcctgctctcatacacacacacacacacacacacacacacacactcactcactcactcactcactcactcactcactcttagtttttttcctcacacttgaagaactggtgctataactgagtggtatcatggttgccctggtatcagcctctcaaaaaggaaaacataggactcagtaacgctggccagaagaaatctcactgtcagacacagtctgtagtcacaacataaacacagggagaaaagatcagctaaaataaatataagtactaaatttagtaaaacatatctcaagagctggagagatggctcagtggttaagagcactgactgttcttccagaggtcctgagttcaattcccagcaaccacatggtggctcacaaccatctgtaatgggatctgatgccctcttctggtgtgtctgaagacagctacagtgtactcatatacataaagtaaataaataaatcataaaaaatatctcaagtagtttctcaccaggtaatgaggttctcagtggtgttttgtactgtcggttgcgtgctgtgccttaagaagctgccctgtgtcttacaggaggcatcagctattgggcatgggtatggctgctggtgactggcagcagtcagcctgacgggcagcgtgggcaagattggcatcgcagcctgtcttatcttgtcaaggcaccagtttctctcttcatttcttctcctttctcatacatgaagaaaacgtctcacctactattaggagtagacttctctcttggtgtcagtgtgtgaggcctggtaggtacggagaacaagtgtgtagggttagggggtgagggcacatacaattaaatagcttctgttggaaatcttcagctggctctggtgtggcccctaacaggttatattttgtatcttgttacaaggctgtttaaattccatccgagtcagatggttaagcaggtgtcagtcccaattttagttctttaaaaacacagaaacagcttcctttccagggcttgagagaacttacctcagttaccatgcaccctgctgtccccacagtggtgacccttacagaaggagttatacttcccgttaaatttaaggcacacaccatgtgtatatttatgctttttcttcatgtactgcatgcagtaagaagagttagttactgcgtataactttagagctgggaaatgcaaccaaaatatcatatattttcttaaggacctgagctcagggtttcatttggttactggcttcagttgttactgtacctttaaatgttagctctccccttaattagggaggctcctttcctctagcattctggggaattaagggacacaaggctggagaattaacattaacttgggatacttagagaatttgattatctttaggtagtgacacactttaggggatatgtttgattggtgtcttgtagggatgagaaggtaggaggaagaacaagtgtatattgacctgaaaactatgtcagttcttaaatagttgggaaacactgatagaaatccaggagacataattatgaaactcaagaggaaggtgggacgaagctggtacccggggtgccctgtgaggatgctgcggtgctcagaatggctctaggaactctagctcaagcatctcgtgggaaaaagaaatctgctagcagcccagaagaaagtaggtgtggcagattgcaacaaggcttagggatatgtagtgtttcagtgtctcttaacaaaaacagaattcggtgataggttttccaccaaggcttaaggactttctgtaaaaatcaaatgggcagttggtgtgtttacagagaacagtatgcagaccaccttaagtagtcaaattgtaatgtatgtaatgtaaatgattgtacttagaagagcttgctattgtaatgtattttgttgtacggtaaatatctacctgtctggaggtccgagttcatgtgtttgcttgtcttcaagtgagcttacacttctaccgccatctctacacagtgagaagatatgccttgttccttcacacagggtttggttttaactgtgttgggcaaacatttgcatcctgaatggagattgtgacatcatcttttaaaatttccccacctcaaataaaattcacctcataatagatttggtttgttctgctgcccctttctaagaaagcacagcttgtaagatcatatgctttttcctacatccgttttgctgttgtatttaaaacacagaaagagtagctctgtctgcggaatgtgagagtccatcaggtgcctctggaaacttgtatctggggcatactgcaccaggatcttcagtggtactgagtactgtcatgtttacctgagttcttctgaggttgctggataaaacacagactggattctacatcctggtaattgcaccctgttctttctggccctggttggtaagcacattaactccacggctgtcaagatgtcacacacacacacacacacacacacacacacacacacgttccctgtacatgcgtatagtttcacagggcaagtggtgataatgatcctcagaatctctctaggctgagagtgctaggcagctccgcacatccatcaggatggacaggcctaggtgcatatggcgagcccctgctgtctcctgacgtaatgagcagcagcatcgcccactgtccttaagaacctgtcctccctcctgcttatctctcaagtttacatggttttccttttggttcactcctgacaaacagtgcagttgtattttccacatgcctgcagatgttccaacctgaaagagtcatatttggaattcatcctactatgtttccattgctctgataaatagagtgaccaaaagcagccgagaggaggggattcctttggcttgcacatctgtcattgaggaaagccaggtaggagctcaagcagggtaggaactgatgcagaagccatagagactgctgcctaatcactggcttgccactgcttgtcctgccggctgtcttgtataaccccgaactgtctgtccaaggatggcaccacccagagtgggctggaccctccacttcagtcattgatcaagacgttgcttcactgagctgtgcagaccagtctgatggaggctttctctccaccgagatgactccagcttgggtcaagttaacaggaagctgatacagagctgaagggagcgagcgctgctgtccatcaggaagagctgcacttgcagttcagcaccagtgggttggacctcagagctgcctcctgtccagttaatggctgtgccttcctctgcatacagtgtaaacaaagtacagcccacagtggagacgtctacttgcagttgcagagggacaccattgcaaagcggaagagcatgtgaagtgtgtctacccctgagaaaaggtagcgtaggaaacagaacccatggtcaggagaggctcagtgcctggctctgctgctctctggcctcggagtctgcctttgtgtcagctcacacctgtatgagcaagcaaggcccttctcatgtcctacagtgtgaaaacaatgtcagctacacctatctgtgctctaggtcactaccaagccttctttcccacagttctgtgacactaaagccagtggtttccctctcagaatcaggctcgagcttaaaaaaagattaaaaggcaaaagggaggtgaggggccacacacgggagatgactcagtgactaaggacacactccacaagtgtgagccaccaagagtttgaatcttagcacttggataaaggctggatacatatacagatacgcccctctgaccttagctggtgagagagggaggtaggaagatcactgtagagtgctgtctgccagcctagcttcaggttcagtgagagacccctttgtaagggagcagagtatagagaactgatggatacctaacagcttcctctgccctccacatgtgtatgcaggtgtgtgcacactgtgcaatacaccacaccctcacatgcagacaggcagacaggcaggcaggcaggcagacagacagacacaaaagcaaaagccttttttgtttttaaaaacattcacctgttttcttggtgtttgctccttaaattacaaagttagtatatatggttagtacctctacgtaggagacataagaagaggttgtctctcatcagtaattaggagtgttgtacttcagctactctgagaatgaaaatacacaaatcaggactgaccgcttatagctaaactagctcatgtattttctgctctaaatgttggtgtatcagcaggccaggtctttttattgcatgattaattggagatatctattggatgtttatatagaagtaacagttgtactgggctgcccatggcctctatatttaaaatctgtgtttccttctcattgttttgtttgtttgtttgtttgtttttaataaagtaaaacctggcatccctcactggagaagtgttgccttacatgatgaaccaagttcttggctgacacaagagactttgagggatttctgtctcattcatcttttgtatgacaaacttcacacagcactggcaaactagttgataaaccaccagagtgtgacacctgggttgtcctctgctctctgggcaggaggaaaccaggccaatgcatcactaaggaacgggtttcatggcttgtcactggcatgtgtagtgtcttgggctcagagctcagcactagtctcccttgtgttgccatctctgagagtggaggaatgtttctatgttggcattccagtgcttgctgtgtggatgagcccagttgggctgagcagatatgacttcctttgctctcgagtgaaacataccagtttgaaagtgtgcttgattgcttagcaaaggtgtagcattcggtttctcagttcttgatgttcggggaactgtgaaaagctgagaaaccattgctttgtgtatacacggtgtctaacagatgccacacctacagtgacccagtatctgcagtgaaggatgttgctctgtcagccctattctgtatcaggccagtcagcgtcaggcagagtcctttccttctcctgtgttggtagttgggcatggggttttctcttcacattattaaaactcccatctgcttttacttagcctcggaagacccagtcttcctgggagggggaagggtgcattttcctaaaaacagaagtggtaaacatttgatgttcaaatgtttgttgtctttttacttcccaagccctgagctatttaacgatattaatcttattgcttgtaattaacctacataagaaaacaacacaaatgttctcagttcctctgcagtaggcttcaagaacagtaggactcttcagtttctctgatgcctacgaggtgcatcctggagatgctgtgtgccctggcagagctaagtgtgctgcttgcagtactgaccaaagtcaaccctagatcccagagaaaagagctttttgagcatattaaatgtcatcttcttcatcccctttatttaaaagatgggaaaacctggtgtgaatgaaggctaaatttagattagaataatagactcaaatgttttttcaaatgttaccacactgtgcatgacttcctgtgctgatatgcacagagcttcccttcttgttaggacggaaaagctgctgctctgtgcctctgcccaggaaacctgccacctgccacctatcttgtggtctttctccactgaggaggacacttctctgtagtcagaatgcaacagtgctgtttgatggtggcagtgatgatggcaaagtcaagcaaaggtggacggagtcacaggctgaagcctagtgtggtaagcggccacatgtaggtgcctgcgagctgggtgaatcctctggcagggctgaacagttacaaatgaaagcaagcctgttgccatgtctgtctggccgtgaggaaaacccagcactgttgctcttgtcagatttaaatttgtgttttggaatgtgtgatgcttaatctaaagaatgacctcctcacccccggaaaaacaggaagtttgatgtaagattgcatctccttaaagtgtctgagatgctgctatacccatgaagtctctctgacatggccgtctaaacatgaattgaacaagacactaccactagacatgctaacgtaagtggggaaggggtcgctcttgaggcctcgaaaggactatgggcaactaaggaaactgtgagtgggggaaatggtctgactcagggacgagcactccggtccataccaaacggtcatccctgagcacacatgtacaagtgatgttatacggactgagcaagttgagcttatatatttaaaacatggacacatatatgtgtaattaacaaagaaaaagactccacgagcattcaggaaaaaacaaaacagtgagaaagatggggtcaagtcttgactctccaggacttgtttttttttctgtaaagtcaaatctctacagataatgtttcccatgacttacatcgtgtcaggcttggcgtctctgtgacggcctcagtgccttggcacctgcagcggaattgtggcagggggctcctgactgctgaaggctgcagtgcagtatcattgggagcgggccctttgtcactccgccttacattgcttcataactttctggtatgttgagggccttgaaaccctaacagttagacattagaggcaaagacagaccctccaataaaaagatgggttaagctctacttattatatattattggtaaaaccagaaagacatcctccatttctgttccttattttgtgtttatcacttagaacagttaggcttgtgtacaaatgagacaccagaatttgtccctagctccagtctggagagaaagcagcattcatttgaaagtctagatttgtaaagtaaatttagctctgaaatggctcagcatttaaaactgcagcatagcacagtgttgaaattatttcttgtgctaggcgtggtggtgcacgcctttaatcccagcacttgggaggcagaggcaggaggatttctgagttcgaggccagcctggtctacaaagtgagctccaggacagccagggctacacagagaaaccctgtctcgggagggggaaaaaaaaagaaattattccttgaaactttttgataggaattactagatagcatctgacaattggaaaggtcccagcatacactaattagctttctcattgttgtgacaaaatactcggaatgaataatcttggcgagaaaagaagtgacttaactcgtgctttgggatggctcagtcccactgcacactgggacagagcttgctggtggaagacgagtgtcttcgtcgtggcttgacgcagatggaaagggggaggaggagccgggacaaggcagggtttccaagcccctctgtatagtgactcactcacgacaggctcccatctccaaatgtttccaggatgtcccaaagtaataccattagttagtaggccattcaataaaccctgtctcgaccccccctcccaaaaaaaaagatttcaagctgcagtcttttttcaaggagcgtggtgatgcagctttccacttaaagagcacacattgtagagcagccacaatgaattgttctcagtgaatactaagtgttgacacgaccactacaccctgcccgtccataacaggcatttggaagtgtttgggggccacatgcttccactcaagtccagggtaccctcactgagaacaactggctaacttcctgtttgtttttaagtagtggggtagccattggatattaactgcagacatttatcttagagctcgcaggcagcatggttcttctcgatggccctaactgtgaagcagacatccatctgtggcggtgcatttcatctgtaggatagcttgatataacgttgtatttcaacgttccagtcagtgctagatgtatgtgactagtacctcgaagacaaaaccctcctgcaggctccagtgattaacgttgaaccagccacccactcatcttactgtagtctgcccagtgtttctgaatgtcagtctaagtattttaattgagatccagctgatttataaccccttgttttatgtttctcttttatatctaaaatttacaagctatggtggcatttttatccagtgccactaacgcagtacagacagcacttgaaacaaaaccaggctctgttcagaaacgcgttcagtcgtgtggtgtgcttactgttagatgccaggatgtgttgtctgtccttcagaggcttttcatgtaagctctctttggagtgcagtagagtatggtgggggagtatcaggaagcagcctgtcactcatctcctgtctggaacagagtcctattatcgtgtcctttgacccccatcgagtgatgtaacttgaatgtgatgtgcttgctgttgacatacaggtcgaaggcttagtccggagagttgatgctttgcttctgtgaaaaagttttccacggttccactcatgggaccctagaaagaagatgaggaaaagaattcttggttttctctccagcacgcacttcagctcaagtctggttgcatgttaatctttttacattccaccatggcttgctttcttcccgggcatttgggcgtgtctaaacaaactgaaaagcagtgagctggcttgtatgcaaaggcctgttactgttggatgctctcctcagaggggctgtaatcacgccacacaacttcctccctggaaacaagtcagccccgcggagcagctgagaccactctttagcttgctgcccacaaggggtttgagggttcttcttctaaagagttgtgtacagggggcagggcggggcggggcggggaggggaggggctgtatttgattccaggagaggaatctgacatgttagctacaggatgagccgcagtttctctggtcatccattgatcaattgttctgttcacccaaccgtcactaaagccaaactgtaaatgatcagtccagggttgtgcttccacacagagccagagagctcaagtctggactcttttcttcttttcctttgtgtgtgtatgatgtgtatgcatatatttgcatgtggataggcacaggtgtgtgcacatgcttgcatgtgtatgnnnnnnnnnnnnnnnnnnnnnnnnnnnnnnnnnnnnnnnnnnnnnnnnnnnnnnnnnnnnnnnnnnnnnnnnnnnnnnnnnnnnnnnnnnnnnnnnncatgcttgcatgtgtatgcacaagaccattgtaaactttaggtgtggtctgtaagtatttgctacagtgtcttaaaacagtctgtttatttatatcggatgtgatctgatacgttttttgcaggtaggaacaaatcacccccccttggatcccagccccccaccccacacccccacccccatgaagagacagtgtgctgtgttaggtaaccagtgactcttcctggcagatcacttcaggtatctcttcctgtcttttctttctctcccccagcacacaggaggtgagcaagaacctgcaggagtaagatttgcttaacgtgcgctgccactctgtgctgtgggcatcccactctttgtttccatcatgcatttaatttttcaccaaaatggactactcttactttaaacaattggtgaattctgataagcaaatgaacagtaacaaaatgagccagatcatgacagttgccataatgccacaatctcaattattcatttatatttgcatgtacagagcattcttaatccaaatgatcagttacatggcatatgctttgagattttaaaagtgaaatcagtgtattatgagtgtatgctgtgtttattcaaactctaggatataatttaatgtataaagatttatatcatatgtgtgtatcactgtgtatgtaacaaatatcccagaagacttttctatttctgttcctattgttactacatatagcactctggctatatgtaatataaagtaagtcatgtgtgtgtgtgtgagtgtgtgtgagtgtgtgtgtgtgagtgtgtgtgtgtgtgtgtgtgtgtgagtgtgtgtgtgagtgtgtgtgtgtgtgtgtgtgtgtgtgtgtgaatgcctccatacctattgcattaaagcaatcatatcagtgtctgatggagtagtctgggtatggcgtcatctggtgctgtgcggttcaggacgtctctcaagtgtatgattgcagggctgaccgggttaagttcttcatcagagagcccagctaggaatggatctgcttctaaacttgtgcttgctacagaatcttctacctaaagagttgctaaatgtgcggcctccgtttagaggatgttggcttcaggtagctctcagtgccttgccacttggcctttcagtgtgccattttgtttcagcaaagccagcaaggaatcttctagagttgatgtgtttatgctgccaaggaaaaagtatactaggtagatggaaattacattcctctgtatcatgggcaggtccccactcacgtgtgtgtgtgtgtgtgtgtgtgtgtgtgtgtgtgtaggggggcgcgggggcggcactatgcctgccaggaagcaggagccactgagagtccttctcaatgcactgtccctggaacatgttgtagctgacactcacgaacatccttttctatttccagaacttaagtctacatttgcattacttagactgccccgcagttcagagaaactgctgcgtttccctttgttgtggtttaaagtccttaatctaataggtgaagtgagaccacccgagtctgtccctttcatggcgctgatcccgttattttcagggtctttgttcccactggagatgcggtccggatgtctgcctactattttctttctcaccatgagcttgcaggctcttaagggtcagccatttaaggatgtctgagagctgattgccaagatttacctggcatggcatctgtctgtaggctcaccacagtccagccacctgtacgtgtctggggaggagtcttagaatcttgccagtttcttgtttctctttatatgtgtgtacacacatatgtgtgcatgtgcatgtgtgtacatgtatgtttcagagtatcctccagtctttcagcctatcctctactctgcctagtgtggctgcctccagaccatgtccttcacttctgccaggacagctaccatgtacctttgaggtaacatcctatttttaaccttctggactcctcacatgggcttctgcatgtctacattccccggttggtggtgtcttaagccagaggtgatgatgcagcacctactatcccaggactcagaagaaccataactttgagaccctatctctagaataaaaacaggattggcgagatagcttagtcagcacttagcatgaacaatgaagtgagtttgatcctaaaaactcaaataataaaagaaaagctgggtgcagtggtatacacttgcagtcgagtgctggggaagaggaggtcagatctccagggcctcctgaccgagaagcctggcctatatctatccaaacatttcacagtacctgaaaggctgagttgagtttcaggacaggcagatctacagagtgagctcctgtctcagaaagttaaataaaaataacagcagcaacatggcatacttctattccagagctggagaaggggagacaggagtatcgctggggctcaggccagccaggttagctaatcggtgagccaaggcttcaatgagggcacttgtctcaaaaactacggtggggccagtgagctggctcacttctgtaatctctccccttaggaggcagaagcaggtggctctctgagattgaggttagcctggtctattaacgacttccatgggggaaagggttagtggacttccatgctggtcaacagcgaaggaagttaggacaggaacctggagcgaggagcgacgctcacttgatgatccccatggcttgctctcaccctgctctcttaaaatacccaggacaccagcccaggagtgtcaccagcacagtgagctgagccctctctcatctctaattaggaagatgctggacagacttgcgtacagccagattttataagcattttctcaattgaggctccctcccctcagaagactagaacatattgtcaagttgtcataaaatcagccagcacagagccacccagcctacgtgtgagagtgcctcaaaaataaagcagagcagagcaaaaccaaacccatagcagcagcagcagcagcagcagcagcagcagcagtagcaacagctgctgctagaacaaagcattaaggcgggcagtgacagaggagaaaacccaatatggccctctgccctccacacactggaaggtacacatgtagtctctcaccatggagacgtacacacacatgcagagtttaaattcctaatgatttcatcctgcatagtctgtaaactccaggtgcaggtcgaaaatgcagccccatactcatgacgaacaactgtgcatggttttagaaagcaatgttttattatgtgcacataggtgtatttgttgggtggatatcagtgttcatgtggagatcagaggacagctttatactctccaccatataaggttctcatggattgaactctgggggattgtcaggtttacgtagccaacgcctttactggtgagccagtgggtcagtgaccagccctgcttatacattgtagatagtacaggtggccctcttactttatatttatggtgaggtttgtgcagttttctgagtaaggaccccatgacctgagtgggccacatgttggggtggagtggagcgcagatgggtacagttatgcttggacactcatggatactccctgtgtgcagagctcatgtgctgcttctgtgcacaagattggaggtcagtgggaggtgccagaaagctttactctgcctgcagttgttacagtgattcaaatatttgccataattttagcacctagggtgtacattattcacctcacctccagtcaacactttcactaaaaccaagcgtcttctgttcctggctatgttttattcttgtattttattacttgtggtggctttctgaagacgtgctctttttctacgataataatcaggagtcttactcatttcttggtaacaaatcctgccccatagggctgtgtgcatatttacaaagtgacaactgttacaggccaggaccatggcttagacattactggaataagagagtccagtgtgctaatttgtatcacaacccaggctgggcaggtagcagtcccatctctgtgtgtacttgctgattagatagagcttattgtgagtgttacagaccaccccattctttttttctaataaagttctgatttttagttatttttctttaacttcaaatcatcttgctggttcaacttactcaggtgttcaagtgcaactgtcatatagttcctgaatgtcctcttcagcctgcgcatccctgggaagctgaagaaatgaggaacagtgtgtgagtgtgtgcagcaggtcgtgggctgcaggaagacatcaaaggttgctcagggggagctgtgtgcacattgacccgcaggagtttgcattcaaaagggatttcaatgcagatcactgacctccagtgcatgtgcaacatggagtgtcccatggtgctttgctcgtcactctttaatcttcaaaacatggttttcactcatttctgggtacttgttccaggcagtgcttagagctccaggtcctgtagataatcttggtagaactcatgttccttttttttcttttttctttcttttcttttttttttttttttgttttgttttgtttttccgagacagggtttctctgtatagccctggctgtcctggaactcactttgtagaccaggctggcctcaaactcagaaatccgcctgcccctgcctcccaagtgctgggattaaaggcgtgcgccaccacgcccggctagaactcatgttcccagtggagcatagtgcacaggtgactcaggaaacagacaggaggatctcaagttcacatgctgcctgggccacctagtgagatgccatctcaaaactaaaacgaaccggtatggtgccatccgcctgaaagcagcattctgggaaggcagagacgaggatccccatggcctgaaccagtgaacttaggcagttgagtgagaaaccttgtctcaaacgataaagtagggtataatggaagaacactcgtgacgtctacggctggcctccacgtgcaccccttccacgtgtgtgtatgaacaagagcagagcgtgttcccacacattaaggtaaacagcgcctggctgagctcactagtggattacttgcctagcatgcagaggctctgggttcagtttcctgtacctttcctcagcccctcaggaaggaaaactttttgggttctttcttaccctgatttttccctactctccaccccataaacaacaacaacaacaaagtgaacaattcttttctagcctcttttttactgaccctcctcttccacctacattctcactagaaagtaccatttgtgtgtcttactttaacaacataatgcccaggcttgtgtatacagctttcctggaaaagaatgctatggattgtggccggtgcaatggtgtcgaagttcttcctgggcttctgctccccagcagagtggagcctgcagccgaggctccccgaggccttcagtctgtgacctgctgcctctcacatgcagctgccagagaagcctcctatgcttcccacttgtgagtttagtctgtctctttgaatgtaaatgcagacaatacatttgccctagtaaaatttcatcgccattttgagccttccagcttgttgccatctttctgttgtggccttctgtggttgcccacgtggaagtgtcttcatgccagaggaggctgttaaggacatattgattgaattggaaactacagctgtcactcctctcttctgcgtcagaaaaggctgtgactcatctggaccagaagcttattaatatgtgtgccccttgctgtccttggtttgctgtaagtgtacagtgtgcccagagagccccgctcacttcagtgaaaccctcagtgtgctgggcaggtgcgctgggcaggtgtgctgggcaggtgtgctgggcaggtgcgctgggcaggtgagctgggcaggtgcagctgggcaggtgcgctgggcaggtgtgctgggcaggtgtgctgggcaggtgtactgggcaggtgcgctgggcaggtgcgctgggcaggtgcgctggaggttatcctgagcctcagctgcttgcttccttcttactctttcttctgctggctcatacacaccactggtgtaaaaaaagcctacttctccattggaagctgtgatttgtaagcagcatctcaagttgacaaactggcctgtggcccaaagctggctttatcccctattttctaaattgtttgtgtttggctttgagacagtctcactatgtagatgtagccctggctggcctggaactctcagtgtaggccaggctggccttgaatttagagagattccctgcctcttcctcctgactgatgagattaaagatgattatcaccatgcttagctctcttaattgttgaaagcctgggagggggcaggggggtaagaatcaacaaaagatgactactactggtatatgaaaaatatatgaaattcaaattttagagtgtgtcaataaaatgccattgaaaccaagcctttcccttcctgtggtgtcaaggccagtagccctaagaaatacttcctgcctaagtttttagagaaagagctggcctgttggagcatcacctactgaagcatgtgtgggcacccctgggttcctgaaccctaccctaaagtacacatttctagtttctttggagactcagttgtgtcatgtgatttttttttcttttcttttaagatttatttattattatatgtaagtacactgtagctgtcttcagacacactagaagagggcatcagatctcattatggatggttgtgagccaccatgtggttgctgggatttgaactcaggacctctagaagagcagtcactgctcttaactgctgagccatctctccagcccctgatggttttctggaaactgtcaggagaggattttttgctgagagcagacacatggtagttttctggaagctgtcttgggagacagcatgtaacactttgctgaaacagacacttgagggcgtgcgatgtttaggaagagtgaccccaccgtgaggggatgctcttgtattggttgccgttggtcttcttcattgttgccgttggctgacaacaaacactcaatggttgatttgccttgctaagcttggctgatctttcctaatgatgctcttgcaagctggtcttcactggtctttgtcgtgactctatggagaaaaacaaggcagagaacttcttgtattctgtttgcttcttgccgcttccgtggacacatgctaattcggtggagccttgtggtttcttctggaacaagccagggctactgattcatgttaatattttaaactgggctgttgatattctgacgatgaagattagaattgccccaaagaactatttctaaacatgtctacaccccaccttgtcctattaaccatctttctcccctacctttggtcggtgggctagaagggaagttaaagtgtttaagaatccaattagagtaggttttgaaaaaaatctaagccagatggtactgtcagaatctttgaaactatgcttcaagaatacgcagactcttgaaactcacacccagatgcgcactaaggatccaccttggtgacccaaggacttgtgaaaggcaaagctgctctatatgtccccgccacctgcttgcctcttaactcgtacatgtagtaacttgtctacccactgtatggttggtcagattctaagctctgttctgcatattgtggggagaaggccacattagtttctttggcccactgttaacataatatgaaatactgtcaggataaacagggatttgttcttctacaattctgaaatcaggagtccaaagtcctccagggctgtttaccttcctgcccaggcatgcctccagcactctgactctgtctcagcaacatactgtagccccatgcctcttatacctctttaaggatgcttctcactaggttaataatccaagatgacttcctcaagaagcttaagagttacaacagcagaaacccttttccaaataaggttattacaggtgtggggattaggatgtgcccatagctttggggccaccattcagcttgaaactaatgccattaatctttatcccaataacccgcctagttccaagttgtaaggattctctgtctccatctctaggcccgcttgtgccattttggtttcattctgccatgaaaatcccttatttacacatttatgatggtttcccacttgggaagctttagagtgtgtgtctatgtcaggaattgtgctctctgcagtaatgtcgcctccacactgtcatttccagcccctcttcgtccctctggccacactgctgtatgtgtccttacagctctggccgtccgcctgagcctgcaaacaccacccttccttctggaagacaggctgtgcctacatcttcatttcctgctcctacgagtgcagtctcctgacgcatacatacttgtcagagctggtttaacaatgaccttcccatgagacctctgatgcttctttgtgttgtgtgtgagtctctgtgctttctgcatactcttctgtctctgaatgcattattctggctccaagtgcccgacatctgtaagtcagggactgagagagacagtgtcagattaagagcctctaaatccaaccccaggactttaagtgacactaagtaaatgtgtgtatttactatactaacttgtaactacctatactgtatttatttatttcaaacctgagaccacaaagtggccacaaagaatttttctgttccgatactgtatttagaagttccaatacttaagtcaccagtaagcatggatgtaaatcaaccaacctttctcatggatgtcggtattgttagcaatccagttttgttggttttgattatattccttttcatcaagcaatgaattgatgattatgaactggctctatatttactgcttactgtcatacaagttagctacagccaaagagtcacctacctgaggtcaccactgagtgcagactttctgaagcccattaaggggagcagaccagtgctcctgccggatgatagtagtatttacccaggagatttaccctgtgataaatgccttatgaaggatcatttcctgtgacttgtgttctaacaagtgctgctgtggggttggcgtttctgaacacatagatggcttgccatgatgaaagcatgtgcgcagttccgtaaggctcaggatggagcagctgaggaggtgggtacccttgggatgctaagccagtgtttctaaagatgatttggaatgcatctttcaaaacatgtgatcctaggcttcatggagggaagtcacatgttatgtgagctttcaagtcatcgggtctacgtatcctgaaagagtcagtgagcagagctcaggacgagaatcagtctgggatcctctcaggagctgctgccctgtgtcacgaagcaaggactggctctagtgctgagaccacgctgctgataatctcattctggctttctcccttgaggtgcaggctgtgttttaaatgtccgttggcatttttaatatgcacaaacccacagctaacacgtgacttctgtttgttcttcactttctatcttggctcccatgtgcgctgtcccatgatgttagcctccaaggagtttagcttgtaatatagtccacccccacacactgcattatcaataaaaacaattttaaagacacagttgtctttaaaattagtcttgtttcatcccagctatccattgcctcacaaaaactggggtttgctgagtagattgttttcctgtctccctaaccttccgtctgctgcaggctctgaggacctgctggctgaaagccgctgctgtctggatttagggactatgtgatggagacttctttagaagtggccaaagctgtgtcccagtgtctggtatatgacattgtttgttcatctgatatgggaccacccatgctgaaacaacaacagctaactctatgttgccacatgcacatttccaattgagcttgttccctgcctctgtttctctgactctctttcttacctgttataagctagtaattgttttgctttttattttaagtttaaacaagactttcccctttaccatttgtggtcatcttactaaacactggaattacttctgttggttcctgtcattttcttaattcctctaggtaggtgttacagtcagctgaacataacaatgtctatacagagtttttgctcctctttttttttttttttttttttttttttggtttttctagacagggtttctctgtatagtcctggctgtcctggaactcactttgtagaccaggctggcctcgaactcagaaatccgcctgcctctgcctcccgagtgctgggattaaaggcgtgcgccaccacgtccggcttttgctcctctttttaaaaggagccagctctgtgttccttgtcttgactgcagctctagcattaggacagccgctcctgctggtgccatgtggttctaaccgggccataggcccaggagtttatacttcttgtttgtatataatttccagagatactctttctgagtctggctaatgactgtgaggaaatgctgctgctactacgtgattcaaaggaaagatagttttgatgtatttttattattttaaattttctatccatctatcttatttggtttttctttaaaagtttaattatatatttatccattcatttgtttgttatataaggatgtattgagacaaggtcttgctacataacccaggaagcattcaatcttgtcaccccctgacgtagctctggattacagactctggaatataccaccccagttttctttgcctgaactgtgcctctgcagtacttctgttttagccactgcatgtgtaatgcaaactcctatgtgctgtgatatagatcagggcgctggggaacatctgtggggtgggggattgaaagggaggagctagggcttgggaaacatcagggcaaaaggagccgccctgtgaagggtgacagttacatcaggttccaatttgagctagggccacacaaagaccagtaatagactaagcaatggaatggcaggtgatacccagcccgagaaggggatacatgtacagctttgtttcctaaagataaaaatatggcatataggagtcacccacaggaaagaatgaatgactggggctacacagcttggtttgaaccctggctcctgcttgcttactacctgtcatagatgctttactgttttgactgctttatctacagatgacacattcaattagtgattcccaattagttcttttttttaaagctaggaagtgaatgttgggaatctaaatgttgctactgatttggatggtagtatagaatatgatgatgctatcacagtcaggggaaaaaaaggcctagaaaatataaaaagaaaaaaaaaacagaatcaaggctttgatgaattatttcatgagattatggtaagttaaacagaccacaaaaaaatcaaagtatttaaccatataaaattataacatattattagcagatattaatatactggtttggaatcaattttctgaaaatccccacatcccagagaggaagtgggcaaaagtcaagagcaggcaactcatcagagaaatagagaaatgtgggtaaagcctctgcaaattaccagtgctgatttgctcccgagctcaggcttcagctgtgggaggcttaaagagtgtaacacgtctaaggatacatcatagtgatcactgactctagcactctgccttatagactgagctccaagtaggtgtaggtgaaaaatgttgtactaaagacttgacaattatgttattaatgagagagaaacattgtaataatgggctacttagaaaattgtgacatgatgacccttccaaaggactgtcatgcacccattaatgatgatgatgaccctggagatagaaaatctaggaaagagatcaggagtcatagacgcaagcatagccaacagaatacaagagatagaagagagaatttcagatgcagaagataccatagaaaacattgacacaacagtcaaagaaaatgcaaaaggtaaaaagcttctagcccaaaacatccaggaattccaggacacaatgagaagaccaaacctaaggataataggtatagaggagaatattcccaacttaaagggccagtaaatatcttcaacaaaattatagaagaaaacttccctaacctaaagaaagagatgccaatgaacatacaagaagcctacagaactccaaatggactgtcccagaaaagaaagtactcccgttacataataatcaaaacaccaaatgcacaaaactaagaaagaatattaagagcaggaagggaaaaaggtcagataacatataaaggcagacctatcagaattacaccagacttctcaccagagactatgaaaaccagaagatcctggacagatgttatacagacacttaagagaccacaaatgccagcccaggctactaaacccagaaaagctctcaattatcatagatggaaaaaacaagatattccatgacaaaaccaaatttacacaatatctttccgtaaatccagctctacaaaggataatagatggaaaacactaacacaaagaggggaacaacatcctagaaaaagcaagagagtaatctttcagcaaacctaagggaagatagccatacaaacataattccacctccaacaacaaaaataacaggaagcaacaatcacttttccttaatatcaatggactcaattccccaataaaaagacatagactaacagactggacatgtaaacaggacccgacattttgctgcttgcaggaaacccacctcagtgacaaagacagacactacctcagagtaaaaggctggaaaacaattttccaagcaaatggtcccaagaaacaagctggagtagccattctaatattgaataaattcaactttcaaccaaaagttatcaaaaagataaggaaagatactcatactggtcaaaggaaaaatctaccaagatgaactctcaattctgaatatctatgctccaaaaaccgcacattcataaaagaaactttactaaagctcaaagcatacatcgcaccccacacattaatagtgggagacttcaacacctctctctctctcatcaatggacagatcctggaaacagaaactaagcagagacccagtgaaactaagagaggttatgaagcaaatggatctaagatatttatagaccatttcaccctaaagcaaaaggatatacctccttctcagcatctcatggaaccttctccaaaattgaccgttgacaaaacaggcctcaacagatacaagaagattgaaataatcctgtgcaccctatcagatcaccacggactaaggttggttttaaataccaacaaaaacagtggaaaacacaacacactactcaatgataacttggtcaagaaagaaagaaagagagagaagagagagagagagagagagagagagagagagagagagagagaaaggaaggggaaaggaaaagaagaaaaaaaagaaagaagagaaagaagagaaaaaaagagagagagagagagagagagagagagagagaagaaagaaaagcaagaaattaaaggctttttagaatttaatgaaaatgaaggcacatcataccaaaatgggacacaatgaaagcagtggtaagaggaaaactcatagctctgagtccctccaaaaggaaacaggcagttacttcactggcagcttaacagcacaccggaaagctcttgaacaaaaagaagcaaatacacccaagaggagtagacggtagaaaataatcaaactcaaggctataatccaccaagtagaaacaaaaagaactatatgaagaatcaaccaaactaggagctggttctttgagaaaatcaataagaaagagaatcccttagctagactaaccagagggcacagagacagtgtccaaattaataaaatcagaaatgaaaagggagatataacaacaaaatatatcttaaaataattactctgtttgttgaatattaacaattgaaaatattaaattcatgttctacaagcatcaaaaaaagaaaaaaatatggaaaataaatgcatataataatacaaatgataaagatttttaaaaactttttcctttttttttttttttttttttttttggtttttggagatagggtttctctgtatagccctggctggccgggaactcactttgtaaaccaggctggcctcgaattcagaaatccacctgcctctgcctcccaattttttattagatattttctttctttacatttcaaatgctatcccgaaagtcccctataccccccctcccctacccacccactcccacttcttggccctggcgttaccctgtactgaggcatataaagtttgcaagatcaatgcaatgggcctcttttcccactgatggacgactaggccatcttctgatacatatgcagctagagacaagagctccggggtactggttagttcatattattgttccacctataggattgcagatccctttagctccttgagtactttctctagctcctccattaggggccctgtgacctatccaatagctgactgtgagtatccacttctgtgtttgccaggcactggcatagcctcacaagagatagctatatcagtgttctgtcagcaaaatcttgctgacatatgcaatagtgcctgggtttggtggctcaaaacttagaatactcaagatacaatttgcaaaacacatgataaagattttaaaaccaaagtttcaaattactctttgtcatctactcagattccccccctcccccatttgttgatttgtgcctgttatcgtcttgagaagctggcgcagaagattgctgtacatgtaaggggctggcctgtgctacttatactcagcaagccactgtttcaagttaacaatagtttcagtttaatgaatagtcaagtaataaatgcagtatctttaatactctttcagcttgctgaagtccaccttctgtattatgttcccaagtccaggaggaaagatggttagctgcagcttcccttcttaggcagtacctgtgaattctgcatttctctgtagagttgttcacaaagtatggaaagagtgtttcttgtttttgtgaaagcagtcttctttcctcatgtttccactttgtcattattaccacactctgagcacacctcgaagacagtgacaggaagcaacttcattcgggatatttggtggctgctctgaaattgttgcctaccttaatatgcccccttttaattacagtgtgcacaggtttgcaagtctcagttcagtgaagagtagcttgctgacagtactttactctgcgcttggccttcaagccctctgcagagttctcaatgctcaccattacagatacagccggtctggccagtgagatggacagccattagcatccgtgctgctacccagctgcgtgtggaaagctattgcatatcttcatgtaactagaaaaggaatcaaaaatcacaaaattcacaatcttacttatatactttctcaaaattctttgctgttgatgtaggctgaattttttttaaagcaagatattttatgcttcataactatagcaagaatataaactgctnnnnnnnnnnnnnnnnnnnnnnnnnnnnnnnnnnnnnnnnnnnnnnnnnnnnnnnnnnnnnnnnnnnnnnnnnnnnnnnnnnnnnnnnnnnnnnnnnnnnnnnnnnnnnnnnnnnnnnnnnnnnnnnnnnnnnnnnnnnnnnnnnnnnnnnnnnnnnnnnnnnnnnnnnnnnnnnnnnnnnnnnnnnnnnnnnnnnnnnnnnnnnnnnnnnnnnnnnnnnnnnnnnnnnnnnnnnnnnnnnnnnnnnnnnnnnnnnnnnnnnnnnnnnnnnnnnnnnnnnnnnnnnnnnnnnnnnnnnnnnnnnnnnnnnnnnnnnnnnnnnnnnnnnnnnnnnnnnnnnnnnnnnnnnnnnnnnnnnnnnnnnnnnnnnnnnnnnnnnnnnnnnnnnnnnnnnnnnnnnnnnnnnnnnnnnnnnnnnnnnnnnnnnnnnnnnnnnnnnnnnnnnnnnnnnnnctctcagatgacaagaccattccattcggggagactgtgtagagcagtgttctctatagttctactaatctagcgctaaagtctctagagagtgtgcataaccatgctaatgaggtgtggagaagacaaaagactggccagaattcttgggtcacaagtttcctttcggaatggtaaattcctgggtgttcattttgttatgtcgtctaagctgaagaagcttgccagctgaaactgccaagctccaggaaagtctgtctttgccagaggtgaatcctagcgaggcaaactcttacacggcatctactatgttgaacagcacagagtatgtgtgggtccatcctgcctgtgccagaagaaagtgtgggagcctagatgtctgctctctgaagccatgaggaaaccttccagcactccagaagtaaagcttcgtgtttcctccctgctgggaagtacggattccatggacctcacataaaactcaagttggcctccctgcctactgttggcaagcctaaggggacctgggcttgtgcccaacctggcagctacaaggcagtattctccactcccaagacagctagttcccattcctgccttacttttctattgctgtgataaggtagattgccacagccaaggcaacttagggaagaaagagcttatttggagtttacagtttcagagggttgtggtctataccatcacggcagcaggctggcaggcatggtactggagcactagctgacagctcacatcttgatctgtgtgcacaggcagagagtgataactgggaatggcatgggcttttgacacctcacagccccttcccacccctatcccaacaaggccacacctcctaatctttcccaaacagttccacccacagggaagcaagtatttaaaaatatgactctgaatatatcaatcaccgcagtgcccatcaaaagataaacggtggtgtgtgtatacacagtgaaattgtcaaagaagaataaaatcatgtaatttgtaggaaagtggattaagcaaaataaaacaaccagaaagacaaatacatgttttctctcatatatagaatctaaattaagggaaaaatagtgagagaatggtgagccatttgggaacaaaaagtagaccagtgggaaggagaggggaggcgagagatgaggaaatatgtacaaaagcacacatatatatgaaaacttatgaaactcatgatcttgtacaattaagaggcactagtgaaaagcccaaataaagagttttcaataacatttagtctcacaactttgtgcaaaaaatggctttaaataaaaatcactcataatacaaaaagccaggatgatctcagactgcacagttttgatcaggcaaaccaacactaaagtgtcagagatatgtgaattatccagtgtgttttaaaggtgctagaagggtttctgttaacaactaggaacatacttgaagcaaaggaaagatggctcagcaagaaaataacttctactgagaaacctcagagtcaggaaagagcaaactatttctcatgtgctcaaagaagtgtcaatctgtcctccatagccagagagcatgcgcttcagtaataagtcgcaagtcagagcatcctcagatggaggaatgtgtcccactagatctatctgaaggtaacgtctgaaagctatcctagaagaaacgttggcatgtcaggaaagataggttgtgtggcatgcaaaaaaaaatgtgtgtaaataaaataggtctccttctcttaaatgtactaaattatgtttggttgaaacagaagatatggtatctggtatactaggctgcatggggaaaacatcttaaataattgaagaaaaggaaagaaagatgtaagccaagacttcatatttcatttgaactaggagtaagacccaggttctaataaggtagcatacagttaatgtaatatccacatcagcaaaaatctgtacaaactatggataactaacaataagattcatagctagaaggtgaaggcacagacctttaatcccagcccttgagaggcagaggcaggtggatttccaagttccacgccagcttgttctacagatcaagtttcatgacagccagaaacaaaaaaccaaaatgaaaaaacagtagtagtagtagtagcagtagcagtagcagtagcagtagcagtagcagtagcagcagcagcagcagcagcagtagcagtagcagcagcagcagcagcagcagcagcagcagcagcagtagcagtagcagcagtagcagcagcagcagcagtagcagcagcagcagcagcagtagcagtagcagtagcagcagcagcagcagcagcagcagcagcagcagcagtagcagcagcagcagcagcagtagcagtagcagcagtagcagcagcagcagcagcagcagcagcagcagcagcagtagcagtagcagcagcagcagcagcagtagcagtagcagcagtagcagtagcagcagtagcagcagcagcagcagcagcagcagcagcagcagcagtagcagtagcagcagtagcagcagcagcagcagcagcagcagcagcagcagcagtagcagtagcagcagcagcagcagcagtagcagtagcagcagtagcagtagcagcagcagcagcagcagcagcagtagcagtagcagcagtagcagtagcagtagtagtagtacactatattctaattcataaaacaaacctcaaaatattctaaagactaaaatcatataaagtatgtttcatgaccatagtaaaagtggattataaaaaaagctagtgtgtgctgctggggtcagggtggggctctagcacacaagcctagtgtgtggttagcatgtagagactatgcatttcaatctccaacaaaataaaaacaagaagttccacttacttgatttcacagaacttgctggaatctcttaaggtttctagtttcatcacaggcatcttatcttgctgggaaagaaatagattcaaggtggttgattggctcacatgttttagagaactgattttttttttaacatggactgtatgttgttcatgtagttgtagggcttatcataacgtccagctagtagatgttagattttgatagactttagatggtagcatgaatggatgggatagtcgtgtgcccatgtggaaatgggtagatgtttaacagctcactacccagaagaagacctgaaaccgcccgttggatacactgtatgtgtctcttagccaactagcccactatgcagttggaatgaggtggtagcaattgcctgggaggagccagcatgagctggtccccaacagctgaggatggaactgatttaagtagtcattagctcaagtctttattttctgatgccagacttgtgtagtctatttcaaactacaatgaaaacgtgggccttgggttactgctcagtccctttcgcgttatatcagtgcagagatctggtgagaatcaggagttggcataaaataagctcacagctttactagaaaggaaactaacgactaatatggtttattgctgtgcaatggcatagatgacagtagcttactgctgtctgactcagggtaagctggttgactttccttgatcagttgttttctttcctcttgatgatgattgcttttgagagatgtactccaaaggccaccatgtctaaaggaagccttacttttgtaaggaatgggggaaagttgccagggtttttgcaccatggccttatttctcaatgtagccatgtcatttggtcctgaggacacagaaagcatttttccctcactctgtctacagctgctacaaaaccagccccaaagcggtgcctcagtgcgtgccctcgggccgcagtctcctcttgctttggcagggtttattccatccaaggattgctgtgcagttttgttgccatagagacttcaggtgagctaacctgtacaagaaaacctcaggggatccagtctagtgtcttctaaagctgcccatgatcaggcgttccacatatccttacactctgctcagtgtgtcaaggagacctggcagtggtggcctgatgtgcctggctccagagtatcttgagaccatagtgtagaaaacaggtcgagggctgcatggaggaggtagccggtctggaacattagttaacccacgaaggattgtttactttggggcattcaatcgtaactgctcagtgacactaacaagtttacaaaaagcagacgacaaattgctaaatgagggcgtcattgactcccgtctcagacatgaaggatgaccgctttccgtctccgggttccgtcgagtctttggaatgcaatgtcactttcacgactaggagtcacacaggagtggggaaaatgaagcagttttgtagatttaaaaaaaaattttttttaatttaatcacttttatatgtatagcaaatactgtgtagtctagaacttacattgaaccacagtacaatagtgtcagtaaataaacacagcccccataaatgaaactcacctaacagtggtgaccatgtgttttagtgtggcaatgttgagagcagacagacatttctatgtgttaaattaactaggcttaactactatgaattattagtcaaccaagttaattacaggtctttgagaaatgaaaggtttgtgagaaatcttaaaatagtggtcaaattctctaagcctctgggatgttctggaacctcagggtaccagtatatgacagtggtcactggaaggaatctgaaaggccaggtttcagggaatcctggtgtcaatcttcgtcctggaaaaggacttccctctgtggtacagttccctcacaagtgacattcaggcctcaccatccaggcttcaccatccctgggctctgagtttcagcagtcagctgaaggtggtataatttagtaattaaatggtcatttaaaaataaagggcctagacagggtttctctgtatagccctggctgtcctggaattcactttgtagaccaggctggcctcgaactcagaaatccacctgcctctgcctcccgagtgctgggattaaaggagtgcgccaccacgcccggctaagtttctttcttcagttccaaaggtaagacatagcaaggctgtatgaccccatagttgtgcccttgaatgggggcatatggaaattccacaacacatcaaaaatctgtaaggctgagaaccactcctcggtatgtacctgagaactccaggttagcacgcaccaatttccttgcttcctaggtagtcagccctggagtccatcagtggaggggtcagtgaagcagactagtctatgtacatacaggagtgctattgggccagaagaacaaaattggaacttttgcacgaatgtggtctggagtgtagactatgttgggtaaagtaagcaaaatttatatagcaaaatttatatagacaaacatcacatttcccctcatgtgaaaatctgcgcttacaggagaacagaccagtgggaagaaggaaactagagaataatgacaggtctggggcaggaagtatgatcaaagtaaagaaatacatggaagaaagtatagcagttgctttatacaattactgtatatcaataaaagctgaagaaagtcagcacagctgagcatcctggtttcttgggtacccaaggcccctagtgagctggttctaacgtctttgatgcccagcatgccaggttgtgatgactcgctgttaatggatgccaaatactggatggatgagagcttgtctgtctcattaaactgtatcagaccgtcttctagccagaggaatgcagagtcacacacttgctgggggcttggacctgtgttaaccatgactaaggctaaggcaccattgcattacaatggcactgttgtccattgactcacagagaggaactagctgataaacgtgcaggaagttgattggttataagatgtgcctgattttaagcagatcaagactgtgccttgtgtgatggggaatagatgacgtctgaggatgacctgcctagctgatttttatttgaaatccaagtgagatggcattcccacggtattcggtacacagtacctttcacacaacaagaaccgagaaaagacgagctatgttgtgattgtcagttaatagatgtcatcctcaagttcctaaaatgagctataatgttttggggtttttattttttgtttctgttttgttttggttttgtttttttgatatttgaaactggatttgtggaatggatgtacaaggctactgtcagtctttgtaaaggactgggttatcagcaaaatgactgtatcaagcatgatatataatgacctgcagttctatctgaaatgcttgatgagtgtgacacttgacaaaggccctttggtggaacatggcttcccactctccatctctcaagtgaaggtagaataaaggcacaaattatgcttagtggtcgggcaggttcagaggcgctttgaatacagctctgttcagcttgcctgtgcctgtgataactgataatttggtgactggctgacaatttctctgcagcgaactgaaggaaggcctttattcatgagcatgaggctggcaatacttcaaagggcagagaagaagtatttgaagcaacatgataccaatgcagttgctgctgtaaaactcgttagaatagagcactgtagtaagccagagcctggccagcgaggatagctgctaaccggctgcaaagcctggtgcgcctcagcgtaagcaaggccagctggccactcatggagacctgagggctgtgaaaacaccatcctgtcttcctcatcgcacacccacccttactgcagtgttgttgtgtaggcagccttgtgactcagaaactagtgcttgagaaggaagtcccggactcctcactgatcagctagatgaatactgtttaacctttgacagagcagtagagcactgccaaactcgaaatgttttagcaaaaattatcctgttttgcacttgtcaaaactaagccccatggtccattatgaatacggcaggttcttctgggtggttgagttgatttccaggtccggcggcatacgttactagagacagggaagttgtccgagctaggtgtcttagttttgcttcacacctggggcagggtggggcttctttactcttagctctttcacatgcataagcacgggaaggaggccagcctattacccagcctgtaaagtggagacagcagcaatgcttcctggtgaaattggtgctcggctaagaggagactgtatctttgcaatacctcatgatgttccggtgcctaatgactggtaatagtgccgttaatgagaaattcatgggttcatctgccacggtgcagagagacatgatgtgatgctcttaggtgtgatgttcactgtcaatgaacctttctttctggtacatgaaagatttgcgtttctgatacaggttgtgtgtccttcaaggggcccccagggcactgtagatattcagctacgttttgctacatggccttgctgattaaggatactgtaatgcgtgcatttcttctttgcctaagatattttatgttctggggacagcattttgaaagaaagtaaccccattatatgaaggcatggttctcagagctgcacactgactgcatcactgagggggacaggaagcagctggacacctgcgttcctctgtcagagtcggactgtgtgaacactcggtgtcaagagccacaggcttggagaagttagctgtgtgtctctcgtctcttggcagtctcgtctgtccttcctcagacctgttctgttctgggttagtctgaagtggtctatgtggcctgagtttcaggagaggtgctgagaagaactgtctgtggaagtcgagtagatgaaaatctcagacctgcagtgactcacccaaacttctgatggaataattatggtttgctaattattactaattgattttatttttaattaacattcaatctcggcagcttatactgagtttgcatgcttgaacaacagaagtgtgctcctgccatttgctttgtatccactgagagctcgggacagtgagggaagataagttagcaccaacaacagagagcgagcagtttcccctcacacctcacggactgctgcgcaccgtctggctataactgactttagcagagctcagttgacagtcctaccttagatctgggtgccagtttctgttgctctaacacaataacccgagttaatttgtaaagaaaaaaggtcagtgcagggtcagctggctccatgctttgggctgtgggtggagggtggggtggagcagctcagatcaccagccaggaagcagaaagggaaaaggcaagaaaagatagatagatagatagatagatagatagatagggtcagcatctcataattctgtctggggcagtctatgaagcggtctagcactcatccatgggctctgtgtgggcggcacctcccagtagtgccaccccgagcaaccaaggattgggggcctctgtgcatgcattccaggaacagttactcacaccagagcagccatgagggagggaacctgtgagcagttttaagtctggagcaccaaggatatttttattaagtgcttttgtattggtcaatgtacaaaatccaatgcaggaaagaatattgtacagacttccctggagctctcagagtccatatttcatgtcagatgaagtcacttcacatttatacatactagttagtattttcaagtttaagaagatttttaaaaataagtagtcaagttaattttttgttacaatcttatcatggaaagcatgacagcagcgctgtagatccatttgttctttccttttgtgtatttcttacactggttaaagtgactctgccttagtgtggaggaagtgcccagatcactaactacccaccctgcttggtcccaccttcatgggcagcctcacctgggcagacgttgggtggggagtggtcaggagacattcgatttgtttgtttctgataatacagtgtggtgttggagtgtttggagccggcaagggagacctgcagcagtttgctctaggctgcatgcctctgtgcctttgtatgccatttctcttccttgtggtggacctgcatcatgctggagagcaagggcctgccctgggaggggtgcagaggctctgcgggtcttcacagcttttcccatcagctctgtagcaagtttggggcttaactgttctctggggttactctgcctgggaaagttgacagccctagcatgaattgtatttttttgtttgtttgttttttcaagacagggtttctctgtgtagtcctggctgtcctggaacttaccaggctggcctcgaactcagaaattcgcctgcctctgcctcccaagtgctgggattaaaggcgtgcgccacagctggtgttattttttaaaattctaaaacattgtggcctctgtttcattgcttccttctttagcaaatgctcccttagagagtgaaatatattttcctctttagagtgggggagggaaaaccttcttcatagctacatccgtccctgctgcttttgcggaaagattgatatttgacacagaaaggcatcaacaatgaaagctacatttaacttcggttgtttggactgagccctggaacaagaccaaaccggtttctctgtcagtgtgtgtgtgtgtgtgtgtgtgtgtgtgttgtctgagtggcactaagcccagaaacatgtttgcattgccaagagatggctctcaatacagtgtgtggtggggaagactgcttcctcgcgccggcagttggtgtgctctgtgctctgtgctcgccgccctccaggaggaggtttggctgggctgcaggctgcactgaggaaagtagaaacaggagcccgggcaggttggctttgcacacgcggcggctccagccaaagaatgcagatcaaccttgctggctgttttgattttttcagatttaggagtgtaattaaacacacagcagtggccagctttgagggactgggaaagaagcactgtacgggtggtgtttaaacacagactgtttataaaggtgtgaaaacacccctgcgatgctttgtgttagctcgcctcccagccagctgtgaaatctgagcccgtctcacctgtcctgcagacagcggcctgctctttaccagtttaaatcttctccaagttgaacagcaaggggcctgtggggcctgtggggcctgtttgagagcactgactttaaagattgctttcgccagaagcagagccgggagccacaaagaaggaggttcgaaccccctgctgtgctcttgcctttagcaattaagtaaagtagactctgaaacctcagctcctaaacccgactgccccgaggggagggacggagggagctgctttgattgttgttttggtcgaggtttttggtataggtttgccttatctcagtttgtttcttctttttatcttttttccttggcagtgaaagtaaagtgacacgtttgcagattaatgttgttttgatttttatgataaaagcttcctatgcctcagaaaatactgcaaagtagccagtccacattccataatgaaatcatctgtgcgggatgtattactgaggagcagttaaactcagcatggagttggttctaaacctccaggcttcataacaagagactataacttaggaacaaagctgcattgcagtccagaaacaaacagtgacgtgtgatggttgagcaaaaacttacagttctgacctcaaagggagaaagcttattctgtagacaaatatgaatgagcgtggcccgaggacacatttaggttacctcaaattacttgttctcacacggaagcagtttaacaaagcctttgtactaacagaacaaagccataaatcaagacacctttcacagacattgctggggacattaggtgggcaggttgaagcagagtggaggtacttctgctggaggcctcccaccttacgtaatgacactgttagccttttggttggtgtcttagttggggtttctagtgctgtgaagagacaccatgaccacagcaactcttataaaggaaaccatttacttgggtctggctcacagttcagagttagcccattatcatcacaggggtaagcacggtggcgccaaggcacacatggtgttggagaaatagatagccgaagatacacctggatcagcaggcagcaagaaagcccaccctggtgtcatacttcctctaacaaggccacacctactccagagagagcacacctcctaacaggaccacgccctgtgagtctttggggccattttcatccagttaactctctttgcagcatgtttcgtggagatgcagcttcttttcgagaaccttctttcacatgctgcatgaagcagcatatttgagcatcagtgtcaggggtcttcatgtatactactactatcttcaagacatactttgaaaacaatagaaatacattaaaggccctttctccataatgattgtgtgatttattttatttgttctttggatctatggatatacttatattgacaagtcatcctgtattcttttaatgttttaaattcagtttgtaaatatttttattggtgtgtgtgtgtgtgtgtgtgtgtgtgtgtgcgtgcacgcgtgtagctcacaggacaatttgggggagtggtttcttggagaatgagcatattgggatcaagttcaagccattagacgtttgatagttaagcgcctttagcccctgtactggcctacctacagtccctcagtttgctagtgagtgcctttagcccctgtactggccctgcagtccctcagtttgatagtaaacgcctttaacccctgtactggccctacaatcccttggtttgctcacatttgttgaggacttttgtatttgagtgcatcaaggaaattgaactattaatttccatactggttttcatgttagtgtaacactggctttggaaagagagtgtctaagccttcctgtttgataaagcattttaagaactatgtcttccagtttttaatctagagtctgtattactttcatgcttcttgacatgggctgaataatactcccttctgttcctaactttgtcttccagaagattcctggggagctggaaaagatgttttcaaactccccagcctccttccttcctcctctcttttcttccttccagagttccacatctttcccaactaacacatgttgcccttgggactcagtctttatctggagctttctccagctctttctctagccaagcaagcttgcttcctcccttgctgcttctgacagtcactctccatgccccagccatttccagtcgtctaaagatgtacattttacacagtggtttcaaatattgctgatgaagtggtgtgcatgtactggacctcaggaaaaccttccagaacccagttagcactccgaagtcaaatggcccactgcttacattggtgccggggttgaagacaccagtgccttgttgatctgtctgttcagggaatccaaaagcccattgatctcttttcactagacatttccttgcacagacggggctactgggtgtgtatgtgagtttccactctgccctacaaggggtcacgtttatacagctgtgaccttgtcctgaggacagacacattgtgattttgggaagggtcatctctctattatatcctgctttctgacaatccaggaaataccactggcatcttgctgtaattgggatgcttctgaaaatggaaagtgagattcacataagcttttgcagtttataggcgtgttctattgaccacttagacagcccctacaagtgatgaaagctttaaacatcctctcccaccgccaagttattctgatctgggacaaggtctggaagagctcttgctgttgaaggatttccatcagcctgagtagttctccaatgacatctggatctctgttcattttaatgacatatatgggaaaagtcatttttaaccttttgcctactccacacttgttctactccacacttagactgtgtcagaagtcttaaggcatataaaataaaatggcagggtcccgccgggtagctcagcaggcaaaggtgcttgttaccaacaagatgccagcttgataaacttgagcttcagcctcagaggctacgtaagtgcagaaagagaaagtttatccacagagttgtcctctgacctctacatacctgctatgtatgatatccatattgtgagggttgagtacacacacacaccaaaccttttaacaaattctaattaatgtgaactgagttattttacatgctatttgtactagaatctctatttaagtctcacaaatagaacttttcaattaaactgaagacaaaatattatgaaggctttggcgtgacccagagtagcagacatcttggttcctttgggaggtctggttcgtgctctgaggccagtgtggcctaccacggggctaggccataaaatggatttagcaagccccaaaacttgactagacgtcagaattggccccaggtgactaaaagcaattcagtcaattacccgatttcttcaggcagaaccttggaaggactggcatcgaggaaacagatgtggaaagcccaaagcgagcatatgtgttaggaagtcagcatattgtcaaatagtgtaaactagatctaagatttcacaacagttttccaacttaacttgcttgcccctaaagtgaagcaagcactgcttcatggcacagaagcctccatgggctgcaggctaccttctcagcaatagtctcacttcccagtcccagggatgtggattctggtacactgattcctgtgccagatgcagcgccaagctcttccttnnnnnnnnnnnnnnnnnnnnttccctccctccctccctccctccctcccgtgaccatccctgctaccttggacatgagagcagtgtgtacccagtgtgactcagagtgtgtcacaagtgcagagctgaacagagtggcacaggcagagccaggttctgagtcttcagcatcttgctaaaggctctaaactgctcaagagtgaagatgggttgctcaaaccgagcgcagcatttccagcgttagaagagtgcttagctcagcagagctttcagaaaggttgactcgggaaggagtaatgagagtttactgtagagtcaggacataaaccaggactcacctgggcgatggctcactggtaaagtgctcgccatgcaactatggtgtcccgagtttggggaattttgtaagaaaaaactgggtgtggcagctcagtgccttgggggaataaacagggtggtccctgggacctgctggtcagccagtctagcagaaacggtaaatcctaggttcagtgactctgtctcaaaatactgaggtagagattaattaaggaaaataactaatgcctacctgttgtacacacagttgtgtgcttgtgtacacacaccgacaccccaccatgtatgtacttttgaaatcccgtggtctatcatgctttacttaacatgaaagacaatcacatttcacttccctcttcctgagtgcacagctcctgcaagccactgtcatgttccaggatcctgctgaatcatcatgaccatcgtggagcacacgtatgggttacattcctcctgagtgaaagcctaagagtgtagggtcggtcggtcttctcggagtgataagaggctgccaagctgtgtatcccagcgttcctgccccatgtacaccaggcctaagaaagctcaagttaggaaagtgagctataaagagattaaatctgctttccctctgcatttgatcagctaagagtccttgagaagattttgctgttttctgtctctttccagagggctcgctgagtgctcgtcagtggggagcctctcttgaagcacagtgggactgcagtctcagcacttgaacttgcccatgttcttgcatgttgaccagaatccaggtgcaaaagcacaagttacagaaagagatctgcagagtgggttttttggtgggcacgctctcatttaggttcccatgtgacctgcacacttgctgacaaaattaattatgaagtttatgtgtgttttttttaaaaacagtcttatgatagatcctttatttaaaacattattggagatagacggccaatctgttgatcctggatgttctcagcctctaaaattacttcagcaagactccaagtctctctacagagttctttctagagctagggttcagctgtgtgattggcctagtgcctctaatccaaactaaggagtttttctctgtgcctggcatttctctttcttaccacccccccccccccatatcttgactgtctttatacagtagaaaataacacaagagaagcaggagctgccatcaaaactatattttaacatggcttgaaaacctagcactcaggagaacaaggcaagaggattatgagttcaaggccagcctgggttatataccaagacccctgtctgaaagaaacaaaagtatataataaagtttaagattacatttaaaaaaatagagctaactccatacaagtcccaaaatgtaaaactaatttagttcctaacttgtaaaatttggaatatcaagcttttatgtcatgtatattggattttgctatacatattacagctatatgtatatatatgtatacacacacacacacacacacacacatatacacaaatacgtcaaagtaagagtagaaaaggaatgtgacagaaatgaaaaagagtgccctctcaacactgaagtttatcagcacatgcaactgtttattttcatttatttgtttgtttattcagtttgtttgaaatagggtttctctgtaaaagaaccctggctatcttggcacttgctctataggcctgggcagccttaaactcatagatccaccagcctctgcctctctgcctctgcctcgattcatactgggaataaaaggcatgggctttttacttatttttttataatttagatttttttttaaagtagaaatttgctattgctatgtaataaatggaaatttagaagctaccagctcagaagactgtaaggaactaaggaaacatctgtgtgtctcccagtttaaacaaaacatctaattagctacttgagtattcagtactggttagttagtttctgggtgtctcctcgttgctgttgaacttgcccctggccagtgggataatccattagttaagcacactgggagttaagattgctcttttccccagcgctgtgaataagtaagggcatttgtgccagctgactgcattcttgaattgtgagagaaacaccaagcattacactgcacccagattagatcatgacagatttggcagggatgagaagattccttgaatggtgtttgcagtttacccaaagtccttgggccctttgctttcataaaggattacaatcgacatccagggagaccgtccttaatgatgcgattagcagtttgcaacatgttttcctttgtgttctcatgtgattgaatactcccagtagcaccttggggaaatacgttagctctcacagagcccggagacggaattcagtgaagtaattgtcttccacttcagcactctacaaaagtaaagtctcaaaaatatcgtgagactcacataactacatttcctagtagccatactttaaagagcaaaagcacactggtaatgctgatttcctgtatatggtactggggactaaactaagggtgtcctacatgcttgctaatgctcgccgttgaggtgcacccccagccctggtagtagtaacagtttatttaactcatttctgaaaaaatcatttcagaatgatcagtattttaaaatactaatgatttattttatattcccttttaaataaatcttgcaaatctctaaaacctacccttcagaacatctcagtttctattcagatacagaaagagcctcttggtgacattctggaagtcacgcactgggctggggaagcttggttatggaggccagcactccctgaccacctcatgtgactttctcacatgtgagcagagctggctggcagactgagctgaagatctcatgggtggcaaatgacacatgacactaaacccaagtttgctggacacacccagcatgctcagtgaaacatgtctttactcagagttagacactttttaaaaacttttgagtctttgtgaatttcatatcgtgagccccaatcccttcatctctgctctccacccttgcaactccctccttcaaaagaaaacaaaaaacaaaaatgaaagatgaaaaaaaaaaaagctctcacagcatgtcgtggtgtgtgtatcacacagtagggcctctgcctgaacagcttgacttgtaaatgttcactgcactgagatcagttccaggcctctggctgtctgctgcagtgtcaatactggctcctcactagactcctctgagatatcctgttgttgccctgtgtcacggagaccctgcagctttggatccagaggactggcccattaacacgccccagcaggtcatggatggggaagatgctggagtggacctggatcttgggcatcaacatggcctcaggtgttagtccagaccatggacttccccatggcctttgctgtagggtcgcagacccagacatggccctagatggcagcatggacagaacatccccatgacctcagatggcacaggcctctcacgtcagacggtcgtcaccaccctcgactcttaggtctgcctctcttcatagagctcaagccattctgcttctctttttcccctgtctctccaccacacactcctagtggtccacccacgagattctggctttcttctgccagccatcactgcagagcggcaggtgggcctccctcgacacaagtgtgtgcgcgagcatgcgtgtgcaggtgtgcccctgtgtgcccaagtgtatgtgtggtttgtgaggaaactctgaaggtgtggctagcctagcagtatgaggcattgtggctaagggaggagtactgtagaatgctctgaggctttgtggctaagggaagagtactgtagaatgctctgtggacttggagtaaacttaaacgttaagaaacgagtgacttccaactcaattcttcatagacttagaaatatcaactctcaaattcattaggaataacaaacccaagatatcaaaaactattctcaataataaaagaaattctggaggaatcaccatccctgacctcaagctacactttagagcaattgtgacaaaaacaaaacaaaacaaaacaaaacaaaacaaaacaaaacaaaactgcatggtattggtacagagacaggcaagtatgtcaatggaatagaattgaagacccaaaaatgaatccacacacctatggtcacttgatctttaataaaggagctgaaaccatccagtggaaaaaagacagcattttcaacaaatggtgctggttcaactggcggtcaacatatagaagaatgcaaattgatccattcttatctccctgtacaaagctcaagaccaagtgaatcaaggactgccacataaaaccagatacactgaatctagtagaagagaaaatggggaagagcctcgagcacatgggcacaggggaaaatttatgctctaagatcaggaattgacaaatgggacctcataaaattgcaaagcttctgtaaggcaaaggacactgtcaatagaacaaaaaggccaccaacagattgggaaaagatctttaccaatcctacatccgatagagggctagtatccaatatatacaaagaactcaggaagttagactccagaaaaccaaaccctattcaaaaatgggatacagaattaaacaacgacttctcaactgaggaaactagaatgactgagaagcacctaaagaaacattcaacatccttagtcatcagggaaatgcaaatcaaagtgaacctgagtttccacctcacagcagtaagaatggctaagatcaaaaattcaggtgacagcagatgctggcaaggatgtggagaaggaggaacactcctccattgttggtgggattgcaagcttgtacaaccactctggaagtcagtttggcagttcctcagaaaattggacataatactaccagaagatccagcaatacctgtcctgggcatatacccagaagatgctccaacatgtaatagggatacatgctccattatgttcatagcagccttatttataatagccagaagatggaaagaacccagatgtccctcaacagaggaatgtatacagaaaatgtggtacatttacacaatggaatactactcagcattaaaaacaatgaattcatgaaattcttaggcaaatggatggaagtagaaaatatcatcctgagtgaggtagcccaatcacaaagaacacacacccaatgataagtggatattagcccaaaagttcagaatacccaagatacaattcacaggccatatgaagctcaagaagaaggaagaccaaagtgtggatgcttcagtgcttcttagaagggggaacaaaatacaggaggaaatatggagacaaagtgtggaattcagacactgccccacctatggatccatcctatatacagttgccaaaccaggatgctattgtgaatgctgggaagtgtttgctgatggaaacctgatatggctgtctcttgagagactctgccagagcctatcaaatacagagggggatgctcacagccaaccattggactgaaggagctgagggggtttgcagcttcatgggagaagcaacagtgtcaaccagccagatcccctagagctcccagggactggaccaccaaccaaagagtccaatggagggacccatgactcaggctgcatatgtggcggaggacagccttgttggaatcagtgggaggagaggcccttgagcatgagcggattcaatgccccactggagggtgatgccaaggctggaaggtgggagtgagtggatgggcgggtgagcaccctcatagaagcagggggagggagcatgggatgggggtttccagaggggagacctggaaagtgtataacatttgaaatgtaagaaaacatccaataaagggggggagggggaaggagtaacaagcatgaatcagaggagatgtgatagtggtcatagtgtgtggtcatttgcccttaacaattgagttcttgtataacttggttaggtaagcagaaagaaatccatggaagccaggagggaaccaaaacccggatgtgaaaagcagctgtgctcgtgctgtgactgagtgacgtgaagtgaggcgctttgaggaccaatggaaagggactggtacgctaggaccaagtaccttgaaagccaggggaaaaacccctcgccatcgaaaattatcaagcaaaccaagatggctgctgtttgttgaggggaggatgggaggaacgcactgctttcagggtggtttggaaagaggagacgttgacgttggagaaatggacaaatctacgacatgcagggaaactcagaaaaatagacacccctgccatgcccatagcttagctgagggccactctgggtggggtggtggtgcacatacaaccaggacataactaattttaaatatttacacccccaaattgaaaaataaaaaattttaaaatgaacgataatttctgtaaaatctatgctttgaatagagtacataagaaaacctaccaagacattgtgacaaattgctcattttcctaacttagatgatctacccacattgccatgggactaaagtgtttgtgacacatttaaaatattcactttaaaaccatgctgtcaaattgagtgacttgtttccttcatttttaaaaacatgtaatcatttttatcttatgtgtgtaagtggcatttttgcccatgtatatgtttgtgtaccatgtgaatgcagtgcctgttgaggtcgtgagagggtaccgtatcccctggagctggagatgattctgagcctgtgtcagtgctgtgaacttggttccgctggaagaatggcacgtgctcttaactgccgagccatctctccagccctgattgcttcattttgtaatttaagatacctggaagcttgaattctagctaattttgttcagtattacactatacatttagattttattactcatctttattattactaactccaaggtaacatttcctgatctgtatgaaatctctctcccattcttctggctgagtaactagcctttgagttggtgtttgggagtaatggtagtattagtgagttcaggaagtgttggaaaatattctccgtgacctgcacacctttctataggatatgtttgagtgccctcacaacatagaatttagtttcccacggagctaagccccacctgttttctaaagtctgacgatgagaagcagcactctgacatggtgggcttgcaaattcgccattctccgtagaaagtatttgtttctgcacatacagggttttgacattctgctgtgagaagctaaagtaatgatattttgagtagattggccgatctttgttacttcattttaaaaataaaggtttctacctgggtatggtggcacgcacctgtaatacaaggacttaggagcagaaggatcaggagttcaaggccatcctaagctacatactgagtttaaggccatcctgaactatatgagaccctggctttataaatagacaccaaacaaataaaaatattgatcattcctctattatgggagtggttttgtagtaacaatgagatcagactcttagcagatggtcttctgtatttattctctgaggtgactaattccacattagctaataaaacaataggacttcttggaaaggtcacaggttagaccaaacgtcccaccaggaatattaaagactggatgaagtatgaggcttaaaggcattagatagcaatacaaccacattatgcgacacatgggccacttcccttagaatatgtaatacctaggccaaggaacttgataggactttcaacagccctgggaaccaagagaaaccaacttacagccccaaatacagcagagtcagggagaagacagcaaacagtccacactgtggctgaggtgatgctggtggttaccgtggctgaggtgatgctgggtggctaccgtggctgaggtgatgctgggtggctaccatggctgaggtgatgctgggtggctgctgtggctgaggtgatgctggtggctacagtggctgaggtgatgctgggtggctacagtggctgaggtgatgctgggtggctgctgtggcagagatgatgctgggtgcctatcaccggtgagagaatgagctcttgccacggacaggcctcagttgggcctctctcaatctgcgggagaactctgggttctggacaggtgggcagtggagttggtgatgaaaagggggtgacaaacagacacgacacaaaggagtgtggatctgaatgtaatttgtctcaaagctagcaccagtcttataagtgacttttttacaaaaccgaggaatgcatactaaaagctaacaggaatcaactgggataaaaatcaatgttaacaactgggattaaagcagccccacctaaggtcagtttaatcttagaagtcaggggcaagggcattatgcccttgctatagttccaattctagtctatctagtccaccttccccctaggccattgtaaattcctgtgtctgggtataactctgctatctatagttcaaatatctgctctggttccttcttagaccacaacaattcttcttcttagataatggtaaattcctgcgtatgggagtagcttgccctgagatttctgactcttaatggtagatggtaatgcctgatttctttaactatctctcttacaatactagaggcaaatctgaatgtcactgaataggcaacattcttactgaattcaaagcccatggtcagctcaaggactgcctaggactgctgaggaatgtaacttagccatatgtcaaaatcaatcccttagaggcatttataataaagcaatattaagggaaagcacacagatccatttactaactaaagcaaggacagatttggagcattcattattacaggatgccacagttccaggagactaagtttctgtgaactttttgcctcgggaccacgtccaggcttttcagcctgtcacacgggtcactactggagtagatgtagcaagctctcagtagccatggtagcctggagttcaacttcaagtcatctttaacacacagtagccatctagcatcatctcagccatattaaaaccctggaccactggattttaaacctgtcagttcaagaaagagcaagtcatcagaatttcaattttttgtttctttttgagattaaaatgtaattacatcatttttcccatccctttcctacctccagaccctcccacccaaccctccttactctctttcaagtccatagcctctcctctttaattaattgttgttacatgcatatatctcaatctataagttacctatatgtatcttttcaaggctaaccatttggtgtgcttttccctgggaagcctagttcttctctctcagaattcctagttgcctggagtttttgttagtattgaggcattgtgggcataattattttaaagatttccacattcatgatctatacccagctaataaccaagatcacgaagaaaacagaataaaatggaagggggtgttgggaattataggtaataggaatataactttctatattagaaaaattgagtttcatatcatatatgaggcagatgttttaaaaattagtacttactctaagatattttggaagactggacatttacaagtgaattggcagctgttagaatgagctccctagaagctaaagaacagagaggaaaccttactgggagaggcagggcgctgcatcttcctgtggcagatgacccgccacagttaccatcccacacacccatgtccccttgagtcaggaaatcacatgtttggtgtgtttcgttccttctggaggtctctctaagcttcagtcacagctgagcagaagacagctagcaaaaggaagcccctgcatggatgtcaggctggttcctggcagtggcagcttctcagggacgctggcacaggcttgcatcctggtgccacctcagcacaggcccagtgtaatgaggctaagcaacatgagctgcagccttccacagagatgtttgctctctatgagctgattgtcgtcaggattgtattgtaatgactcaaagactaactggcctcgtgaaaatattttaagggtcttaaaagtcccttctagtcgtcaaattatggtgctttttgtttcttcagagtttactcagaacttgagcatgtgagatactgatgtcacactttgtttcccaatctgtaacaaatgttacagatttgctggagtcggcatcaatggcctttggaggatgtgcagcctggtaaagtggagaaggagctattctcactgttagaggaactcagccgtgtcactgctggtggtggtctctgttgcatcccaggcactaagtccatggccatttgctaagattgttcagcttagcagcatgaggggagacggagctgtgcggcttacaaaccacattttctggatgctcatctgcctctgcctttaacaataagaagaaatcatttcacaggaattataccttttaatctagttccttgccatgtgactggagtttggcacttctttcttggtaccactatagcctatcttctggtgtagtctgcacctaacctagcatttgtgtcttgtcagtttgtttggtgcgtgtgagaactgggtatgtaagctggacatggggacatgctataatctcagcactctagctcaagggcagccagacctttgtgacaggactctcttgaaaaacaccgagagctggatgggatcaagatgtttcctaggttaagagccatactatccttacagaaaaactgaggccggtccccagcacctgtatcaagtggctcagaatcacccataactccaaagccacaggattcaatgtgtctatgggtacctaaatgccccatacacataaagacacataatttaaaaaattctcaaaaatggttagaaaaaggaaaacaattgagactgagaatatagcttagccatagggcatttgcctaccgtgtgactctctggacttgatcgccattattgaaaatatataaactgaaccttttattgagagatagcaagcactggaactataatgattctattctcctgcatgttcccatcacaggatgagaagtaagagaaccaagcaatcttggactacatatctagcctcagcctgtccctgtctgggggcttctctgtggtgaggccaatcaaaaatctggtcttgactgggcgccagcctttgtggcgcacgcctttaatcccagcactcgggaggcaaaggcaggtggatctctgagagtatgaggccaacctgttctacaaagtgagttccaggacagccagagctacacagagaaaccctgtctcaatgaatgagtgaatgaatgatgaggtctgtccctggttcatgagggttccagaagcaatcaaatactattctccatgggtaagattttattataccagacacctttaatgaaatctcacatgtggaggacagtctgtctccaaatggtattcctcagagcctggatcatgcacttctgaccataaacaccagagctgagtcgttggaaagggctcagctgcttataccacactgtacacccctagcttgttaccaggactgtatctaacatgctccagagagaggctcaggagagcgcggctgtgctgggcagtcttcaggataaacagagcgttggctcctactggctacagtgagtctgctgtatcctgtgtgagttgggggtgctaggttcagaggcaggcaagagtttgaggccccagttcctgctccatccaggctccccatgcagcacacactaggtcagaactgttcactctctgaagtgtctcggggtgtcatgaggatgtatcatccatcacccatttgcctgaagctgcccgacttctgagcttgtgcccactacttacttgtgtccatcctttctttccctttgttcagtctctctctccttttcgtaaaagccctggtcccagagctgagtttgacaaaggccatttgaaactatagggcgagaatgttggaaactgcgggcagttcattttggccccttgtctttcttcaagtgtatcacaaggtggtttctgttcatgcaaaggaggatgaaggaaggtcttactccgtagtgggccgtgggcctgctatgtttgtatgctctcattgactaatgtctgtatccctttgttatttctacttctttgatgagaacgctgagattccagatgattaataccatctccaacattataaagtagtcatagggcaggtatagtggcacatgcctgtatcagccatggggtggatctggaggcaaagttcagctaaatagtgagatgctgtttcaaaaaaccagggctgaggatataggtcactaacataacatttgtctggtatttgtagaaccctcagttcattgcccagtatcaaaagaaaaaaaataccctaaacttagaaacatgacaactccagacctgttgtttcccaaagctctgcatactttaccacagcaagctgcttcagagataagctgccttgggggcagaccggactccccaggcagcctgggccttttaggcagttgcttctttgatttttgttttgttttaagacaaggtcccactatgtattctgttctgatatggaactcaaagagatccacctgcctctgactcccaatagtggagttaaaactgtataccaccatgctcagcttggttgattctgtctgtaagctagggtaattggtaactacatttatcctgtcaaatggttgcagcgtacagcatccctggctcatagtcagccttaggaactgtgctctcacccttacgcacccattctccctggcacggggagacacaccaggcgcaaagtgttctcactttcatgatcagatggctcttttttgtattttatttgtgagacaggatcttcttactctatagccaagatggcctccaatttgaagcaatgctcctgcctcaagctcctccaatgttggaataactgacaaatgccactatatctagcttcattcctgttatttgggttgtcaataaacagagccatgtggcccacagaagactgtgatatactggtccacagctgtgagctgtcagcaagggagactggctttgtgctagtgtcccgtctgtaaggtatgggcaggtatggaaaggcccgcgctacagtgtcccgtctgtaagatatggacaggtatggaaagacccgtgctacagtgtcccgtctgtaaggtatgggcaggtatggaaaggcccgtgctacagtgtcccgtctgtaaggtatgggcaggtatggaaaggcccgtgctacagtgtcccgtctgtaaggtatggacaggtatggaaaggcccgttctccttctttgcctaagcaaaggattaagttagataatagatgtttagcatttcgcacagctcccagcttaaagcaaatgctacatgagcgccatggacgacttccgtccccagaacactagaaactgggaacactaaagaggtggaggcaggaggatttcaaggtcatctgctgccacatagaaagtttgaagccggcattgggttcacagagacccctgtccccacacagaggagatgtacgtaaataatgatcagtactggttcttgatactatggtgtggtaatgttttatactcttggcataaaagtctttgaagaacactgtacttggactttttagcctgtaagtacagcatttgtgagttgcttactgataggctgggagctgatagtaaggcaggcgatgtattatgcatcccacagcacactgaaataaaatgccatttccttaggaacagctagaaatactggtgctaatttttcctgtgctcaggaaaagcaagcacgctgcgcgcagctgcagtaggctagagagccctccagaaacatgatgtcatcctaatctgtgccgccaagggatgagctcatccaggcggggcctctcggggctgcagctgtgccagctcctgacttgtgatgctcctcttacaggcttgctcaccctccctcccctaccctcccctacaccacccctgcctgctgtgccaaagagacactgaaggatgaattatttaagacccaaggtgaactcctgccaaagataaccaggcttcagaaagcactcaaaaaggaaaatagaactgcatgggcttttttttttaattagatattttctttatttacatttcaaatgttatcccctttcctagtttcccctctgaaaatcccgttcccccctcccccttctccccaacccacccactcggttcctggtcctggcattcccctatattggggtatagagccttcgcaggacaaagggccactcactcctctcattgatggtcttataaaggaaagaactaagcagtttgtagaactgtcgtcagtgagaggacaatggtgttggttctctctgcctctgcttgctctaggagcagtctgtccctcttctacttaaataatggctgaatctgtgaccgagttcagtgctggaactgagcccgcacagacctgaccctgagccccatggctgtggcagtgacagccaagcagcttcctacacttttcccattgtacactgcggtgaccttgatttatgcgccagtcgtcctacatgtcagcagtgtaggtcaccatgggagcaggtactctatgtgaccatggaaactgtcacctctgcagaccttagtttctctatctataaagtagggtaatgcagccaagcctagatctggaggtgactgagcaggaagtgaagactgggtggctgtcactgagcatggtgcccggcccacaccctgtcctgaagcaaccagtgctcattaatccaatacccatattctcaactgctgggggcgggtgggggagggcattaaaaggagtgtgtaaagctgtcatattgtatatttctgagaaaattatttacacataatgttgaatgtttaggatggcgtcatatcattctgtggcacacagggtcattcagaagccagcctttctgatagagctttctggttcctctcctgacagtgtctcctgtaacaacagttccccctccccataaaaaagtctgttttgttttagatttcgtggaaatgttgagtagccgcagagggaactcccacacctaccgtccctctgcagcagcagcagcagcttctggcagattttcatctgcttcccttttttaagtgcagtattttaagagcagattccagacattatatcattgttctcataatacttgagtgtgttctaccaaaggaaaagcaggcttagccacggctgtgatgatcccccctgcactggaataggtgcctagtttttggtttttttgttttgttttgctttcatttttatttctgtacttttccaagacagggtttctctgtttagccctggctgtcccagagctcccttgtataccaggctggcctcaaacttacagaaatcctcctgtctttgcctctgccctctgccctccgcacccccgagtgccgagattgaaggtgtggactaccattgcctgctcagtattttctgttctgatgattctctagcaccgaaatgaatctacactgtcaccttttatgataagccattgaaatgggttcctactatcatccaataactccacagatactaaaatggggtcaaattattatctactgttttcttccatcttcaaacatttccagttgctcgaactgtcttttaatgacttttttcaaaataatcacagaaaatattcctcggtgcttaaacttttatcatttgaatttttgtttttttcagagctgattgtcaaactgattaaaatatgcttttatttatataaaattgctaatttgcttttgtcattgcttatttgaatgattgttttaaagcaaaaagcttgaataagcaataatgatgttcatttttaaccagtagttttatatctatactttagacggctggtatttaatgttctttttgtacgaacataagtttaaaatcttatttaaatcaacagattttatataaacaagatgataattcattgacttgtttcttggtatatttgttaacttatttttatcttacacttacagattgaaaaatcacaattttggaactttttctagaaaaaatgattactatgtcattgccaagagttatctttgtttaagtgtaaacacttaatttaatttttagaaatatatttctttattcttaaagggatacttctgtaaggctccagatgtagccacaactgctatgatcagaattaacagcaagctcccagaaagacaggtgttagtgctatgaaactgtattcacaccctctgcaaatgacactgcctctttaattgttgaatgtttaggatggcgtcatagcattgtgtggcacacagggtcattcagaaggcagcctttctgatagagctttctggttcctctcctgacagtgtctcctgtaacgacagccccctccccatgcacctgccccttctgccccttggcgccttgttcttgtcttccagctgttctgtacacttaaagtgctgttgctaaatttgtaaataaaattgcagaaggcatccaggcatggcgccacatatctctaatctcggggcttgggaggtagagggaggggcatcaggagctcagcacacctgtgcatatgtgtgcacatacacacacacacacacacacacacacacacacacacacatgacagggttatgtatgaatttcccataaacagtgactctgacttggctcaatggttatctttaaagcccttggctttctttccaccattcctgtaaaaacggtatatgaactgcatggactatcacgtaagctctgcgtccatcaaccccaggtctttccatttcaggtaagttacgtgatgtcctgaggttataccgttagttatgtgagaccagaccacagatggcgagcagatgcaggttggagtggaccctcttctttctcattgcttagtaacttgccagccacaactcccaactcgtctcctaagaacccattgacaaaccctgttaaacaacaactaagtagctgagatccgcggtagcaacgcagaaaatactctttagaaagataggtgggaacaggaatcccccggccctgcgtgacaagccccaaccctgctgttcaccagaagaaaacacttttgtcctagctccttttggttaattgacctgtgtcacatttgaaaagcatagcctgccattatcagcctagtgactaatagttatttgcgcagtactccatggttattgttactttgattttcctggaagcttttcaggaagcttgtcagcccacgtcgaggccctggcaggaagcacaggaagtagacgtggataatcatgccatcactgactaatgactcccactggggattttacacctcagtcaattattacctaattacaaccagcaaaaatacatactgtgttcatgccatgcaagaaggtactgagttactgcaggacaaagatgtaaacagtgtgtctctacccaccagtaacttacagttggcgaagcaaactagtcatgtgcaagggaagccctggaagctccagcacaaaactgcacgagcttccactggttagccgtgtgcacagtagtgctcggactcaacgccccaaacttagtgaattaaaacaagacttgtgtgtccccttcattctcatgcaggctagctataggtcagctgatctaggctggacctggcaggtctataggaggctgggttcaggtttctgtcatatgagtggcatgtgcctgggatcaagtgagtgtgtgttctctcataatggtacagaaatgcaggacagacaaacacaactgctgtgttccccacggcctgaactgaacacagaacagctgctgcctggtggcagatacctaggttcagtgattagatcaatttaaactgtcaagggcaatggctgcatggtaagaatgatcctcagacgctgaaattccaactgatgatggtcatggacacagagcgagacgctagtgatatcaccagacctccaagtgttgggaggtgtaatatagacattcatcctttctgatgggacaatctggtagcttgtggggaacatgggatttgagataaccttgaatgaccaaaataaaacaagctgaggttttgtttccattagagcaaatggtactttcatgaggtaatggaaggtccccttagggtttgagtgactgagggcctcaaactagggatctttggaagatgaaagcaaaggccaggaaggaccatgctagcagtttgagagtttgtccaatgctttgacactatcatagaaaatgtacatacacacaaaaccccactggcaaatgagaggaaacagtttgtgaacacctttgtatgctacactcagggttagacttcatttctttggtaatatagagtcatcgaagacttctggcttagaaatgatgaaaatggagtcttagcactgtctcagaagagacagcttgaagggttaagaggtaaaacattaggaagcaaaaaggtgtctaggcaaccattagctattgcagtaggaaggcctcactgaaaaaaggaccacaggaagcagggaaaatgtaaaagacagttcaggttagcaaagaggaaagaggagagcccagggaaactgagtacgttgtcaggcgatgatggccaaagaagtgggcatccctgttttcagttatagttgataaagttgagttatagcacaagtgggaagcctaaaccttactccagccttgtgcagtgtgaacattctgttcccttcaccctgctcaggagaactctcacaagtgggaccctgttcactgtgcccttggtgcctaggagaaatctttcacactagacataaatgtgtagagaaatcttgtgagacttgcacgtgtgtgtgtgtgtgtattcctcctgtgtcataaagcagccttgcagagctgagcgagttctcgcaacaactgcagaatggtacatagatgtcattgaactctaaacagttccggcacaggcttccctgctaagaaccttctccattagctaatgtgtcagaaaggctttaaataccggcacgattttaggagtccagagtgtccttgcagttcagaaacggagtactttgtgtgataacgtttaagcagtatattcattggcctttcttagttttcactaaggcagatgaaccaaatgagcagatgctgctgatggagagctagtaactgatcttgccagttgtcacttagggacagttctgccgtcacacatcttccatgtggaagctaaaattaagccactctggtacattaaggctgataaacacagcgtgaacagattcctgagttgttatttcagactctgggaatattctgtatcccaaggatagaaaatagagaccagtgccccaaatctggctgtttggtttgaaattgctagactatgaataaatgagcaaatatctccaatcactttggaagatgtctctggggcatatgtttgacatgtatgcaaacactctgcccattggtcgtatctgaacctgagaccataggttcctgggcactctgctgtaagttttaggaaagaagggggtcttcctggatgttgcctgcactatgtgcagctcaaggaagatgtctttttgagtgactaaggttcctttcctaggcatccatttctttgcatggttcctgctgccttgaaccctcataatgagaaaaaggtgcatttgagcacaggcacttgagagagagagagggagagcgagaggaagagcgagagcgagagggagagcgatctctgctcaggagagcaccaggaccttaaagcccttctttctgtacttagacttacaccaggtggcatgacatggcctaatactcctcaccacagcagcaatagtgaagcatggaagtggacctcacagagagccccttcccagtctggtcagggtcacttagagtagttccagtcagaaactctggggagcttttgaaacctcaatgacccagctcagtcccaaagactcatacttaacgggtctcacctggtaggtgtcttgccatacagatgatagctttgactagtgataaagactcaacaatcttacaggccagacactggatggtagatctgggagcacctggtcccacacttctgtgggcctcactcccctctgttactccatgtcattaaagcagaaatggcaaagtacagtccggggaggttcaaagcacgcactcagattctaacagcaagttaacccgtgtgtgcagtcattgctgagaatgctgcctcagaacatctcattcgaaggctcctgtcttagtcagggtttctattcctgcacaaacatcatgaccaagaagcaagttggggaggaaagggtttattcagcttacacttccatactgctgttcatcaccaaggaaaggaagtcaggactggaactcaagcaggtcagaaagcaggagctgatgcagaggccatggagggatgttctttactggtttgcctcccctggcttgctcagcctgctctcttatagaatccaagactaccagcccagggatggtcccacccacaaggggcctttccgccttgatcactaattgagaaaatgccttacagctggatctcatggaggcatttccccaactgaagctcctttctctgtgataactccagctgtgtcaagttgacacaaaactaggcagtacagctcccatcacaagccagtcttgagtgagaaaaagaataagatggtgactttcgggaactgtgaaaacatccaccccaggtcctctagctgggaacaagggagagaagagtgtaatactcatcttgtgtaggcttaagacattactagtgatcccagagtgtgtgagctgattcagtagtaaggtacttgttgctcagcctgatgacctgagtttgagtcccagaacccacatggtcaaaggagagaacagacaatctgtattgagctccatacgcatggcttctctcttaaaaacgagtgatcctagctatatctgctgcttctgcccagtggggtggcacagggatcgaatgatctctttgcaacatcacctcatctctgtctggcagcctcagtacctgaatgcagagtacagttgtttcacttagatcttaatgagtaatttaatttggtgagtcagagttttgatttttacagccatgaaataaaaccagtgttcatccattattcttttcattttagaaatcactattgtttctgtggaatccgttcagctgatgaatattaagcctgacttctgtgggaggcaactagcagaatagaaaggcaattataatagatttttgttgttgttgagcaaaatatttatactgaaatcccagagtccaggcacgctcccccttctccgccacgtcccgccataacctaaagtgggccagtgtgctgccagtgcactcacaagagaatctgtcaatcaggtggaatgtaatgatcacaaggaaaacttaaagttttggaggaatgggttttttgaagactactccacatgtgaatatgtgaagttaggaaaagctcagtggacacgcagtgagttggctagaggggctccttagggcagctgtgaatcaggtttgtgcagaggtaccccaaagtcatagcacttattaatgttacctgagagccttagtcagtgacttattgagagtgaaagaattacagcaagatcaaacaacaaccacaaaaacctcagcttggtacctcaggatatcatgccttctggataactcacactctgtctctctgcctctgtctgtctgtctgcctatctatctccccccttctctctctctctctctctctctctctctctctcacacacacacacacacacacatcctataagagaaataaggttgtagagagtgtggaatttgcatccatttgcctgttcattacccaaactcttattggatccccatgtcagccactggtttgggctctagagacaggactgttctcgtccacataaatgtgttttcttcttgggtgatacaggttcaaggaaagaattttcttctggaacattcaaataatcaaacatttacctcatctggctgatcgaacattctgcagacattgattcttaaagagggaacaagctggatataactggctgctcttgaacactgtggtcccacactctgagatgtggtcccatgctctgacagtgtcccacactccagcagctagcgttagttacatgggggaaagtcacagcaacgttaggcggtcctctttttaacctgtgttcttatctgagtcttagagaattttgcacattgtgttatgttcatatttatccataactcctccaggctcaccctgctactggtattcttttaaaagaatgactcattgagccctatttgtgctgcctttgactggcagcaggcctcattagtgtaacaaatggtcagttggagtttgtcatgtgtcttagcctgtgttttgttgccgtgtagagacgtgaccacagcaactcttataaagaaaagcatttcattgggcctggcttacagtttcacaatgttcgtccattttcatcatggcagatggtagctgagagttctacatcatgatccacagactgcaagagagaaagagagagtcaccatgcctggcttgggcttctgaaacctaaagccacttccctaatgacactcttcctccaacaaggccacacttcctaatccttctaaataatgccacaccctgatgactaagcattcaaatatatgagtctatggggaacatttttatgcagactgctacttcatgcctttccctaaagccccagaaccagacagctattgggtgagacccacagacatcacagagtacatccctctcagcaggactaaaggagtgacctccttgctgtcagtatcagatttaaggagggcgcctggagtacaggcctcactgaagtaaatcttacacagcgatatgtagacatggcccttatctaaggcgatggtgaagacataaatccatgaagacatgttatgggaatggtactttaacgggactcctgatgcctggcagtttgaaatcatcttgcccatggcttgacttctgtattatctgtcatctctatgtctgcctcacaatggcaggcatgtgacctaattcaccagtttctacttccatagtctgatacaaagttgacttgtatcctgtgactgattgtagtaaccgagaatacagatgatggagtcttggaatgctgtactaaataaacacttctgtactttacaccttccgaaatgaccagacgaaattctgccgcaattaccatctgtacaagggcagaatggatggaaacctgtttaacagtgacacctgtgagtcacttaagggacctagggggaccaaacaaactcagcacgagtcaacagctcagaaagcaaatgtctaaattgttactaggaatgggtcccctgtcacagttcatttcaacaaggaactgtcccttaacaggtgctgtgcaggccgttggagagctataaacaaatgaacaaggtctcctgtatggaactgtacatggatgtaactcaaaatatatcaaatgccgaaatgtaaaggataaaactatccagctcttagagcaaaaggggagtaaatttaatgaccttggatttacttgtggtctcttaaatatggtcttagaagcttaagcaacaatgggaagacaactgaaactttactttattaaagcttaaaattcaatgcagaaaaggacactaccaagaaaataaagaaaataaagacacaaagagtatgtataacatccagaatatttacgacttattaattaaaaaacaatgtaattttaaggaatgagcaaaggacttgagtaacttttctgttaaagataagcaatcagaaatgggactgctgtgaagatgctcagcatcgttagtcatcaggtcagagctgtgactgatggaggaatgatggtgtgactcaaaagatggaccctaacaaacgttggaaagacggggtgcgggactgggcagttggtaagaggtacagctgctgtgggcagtagttgaactcagaattactgtgtgtcccagcagttcgacttacatttgccccacacaaatttctacatgttcataaagtacaagtagacatagctcagatgctccccaccaactcataagtgggcaaataaaatgtggcttgcatatggtgcagctctgtatgtccataatacaagtgaggtacttgcttcagcacagtgaacaccagaaacactgtgttacacgtcagaagctgatcacagattatctcatggtaaaactgcattcatgtgaagcgaccaggctaggcaaatctgtagagaccgtgagtggatggtatcagcagaggctggaggatggacgctctttctgggatgatggcaatgtcttagaagaggtgacagttgcagaacaccgttagtatgctacaagccactgacttctaaagtcattcatgtttgtctgtataaattttacatagctctcaatcaatctgttgttaaaaacttacaccccccatgcacacacaccttgaatagagtctccttcacagtgcctaggtcccgtcagattagtaatcctgggttccattctgcatagaagacagaagtagtttacttcacccatagaagtccagcacaagtttagacatttagactgttgaggtgaaacagtcaaagcacatggggtggttagcccatttgaaaaaggaaagggcttacaggcattctggtctgtcatttcagattggtgcttgctatggaaaaggggtccaaactggtctctgtcttcctagaatataaggaagagactggcatggtgttttaatgcagagaactttcttttctgccccccccccaaacagggtttctctgtgtagttttggctgtcctggaactcactctgtagaccaggctgacctgcctctgcctcccgagtgctgggattaaaggcgtgcgccaccactgccggcttgcagagaactttctaaactggatcatctaagaaaggaggtgcctttcagggaatagtgatgataaagactccgtgaggctggtgacagagagtggaaggctccggtggctttggagccaggccaatcttgatgaccctctcattcatctctcacacatgcctagaccttcaagacacctgtctttcatgacatcgagctttccagcagtaaactacatccggatttttgtcacttaggaagtggctatcacagggaagagttgctgataggaccattactttcactgtctcctcataatctgcatgcatgtttatccgaaatggctatcacacacgaggccagcccatttactttagcagaagtcaccgagtttacatcatgctctagggccttgcccttttagtttgtcctactaagaatggtagtgagtctgctgtgtctgctgttgctatatggctggccatgaccatcagagccatcagaattgtcatcagcatctagtctcccacttcctacttagctgtggtctctgatgtctttcactaggaggctagaacaccgaacagctagtgatttgaattgagatcagaaatgtactaggagccactactaggtgatgtcagagagtgatagcctctgctgaggactggacacctgtcacagagctgtctgaactcacgggcacgagaggcattctttcctgatgcacaccttgatccagcttgctaagggcatgacactggtatccagcttgcatatgccagtctctggaaagaaggtgctctatgctcaggggtcactcacatcgtgtctaacagccacacacttacctaacttgttaacctccttccctaccattctggtaaaagcattgtcttacagtcttgtgctgttgtaacaaaataccacaagctggtggcttaaacagtagacagtcactctcacagttctgcaggctaaagtctaagatcaaagtgttgctgggcttggttcttggtgggatccctctcttgttggcttgcagagggcagctctgcagagcagaaggcagagtctgcatagattctatatcatatagggggctctgctctcatgacctcaccacagacggcttggcttctaaacaccacctccatctacgagagctaactcatgagtcctgaagaggttaatatattcactctatcacaaacagaccctggtgtcaaattgcctgggatggaatnnnnnnnnnnnnnnnnnnnnagactagcagatcaccaggttgttgggcagcatccaacgcaggcatcactttcttccctgggggaaaaagagctgagtgttcaacagttctgatttctgtagtgcctcctgtgagctgtgtcatctacaatagacaagtagatgacttttctctaccatgaaacatgggaaacttaggtgtctaaatagggtttctatgctgtgataaaacaccatgtccaaaaccaacttgaggagaaaagggcttatttcatttaacatatcctgactcataatccatcaagagacgtcaaggcaggaacacaaaccaggaagaaacttgaaggcaggatgtgatgccaaagccatgaagccagctgctcacgggcttaatctccatgccttacttatcttgctttcttacagcacccaggactaccacatcccagggatggtgctagccaccatgggctgggtcttcccatgtcactaattatgaaaatggcccacaggctggctatatcttgatcttatggaggcattttctcaactgaagttccctcctttcatatgaccatagcttgtgtcaacttgacgtaaaaaactagtcatcacactaggcctggttagaagaaaaacaggccaaaacaaaacaaacagaactggtcctcggtgtgtttctcagaaaacccgaggcactgtcccatgtgggaattttttgagctaaggtcccaagatgaaactgaccagcagaaagaatggcccttttagaggacatggaagtgccagccgacatctcttgaattcatagccactgtaccttcatgctttctttgtgcttctggcttcaaggacttggctaagaaggactgctagagctagcccattctggacactgcagggctcctctaactgacaggtcttgctcagtaccccatctgtgtgctcagagattgaactactcagtatgttctccttcccccagcctttctccctgtcttaggtagggtttccattgctgtgaagagacaccatgaccaaggcaactcttataagaaaaacgtataattggggctggcttatagtttcagaggttcagtccattatcatcatggtagaaagcatggttgtgtgcaggcaggcatggtgctggagaaggggctgaaagttctacatcttgatccaaaggcagccaggagattcccttctggaggcatctaggaggaggctctcttctgctctaggcagagcttgtgtagtaagagacctcaaagcctgcctactcagtgatgcccttcccccaacaaggccacacctgccaatagtgctacttcccacgggcccaagcatattcaaaccaccgcactccctatcggtgctnnnnnnnnnnnnnnnnnnnncacaccttgatccagcttgctaagggcatgacactggtatccagcttgcatatgccagtctctggaaagaaggtgctctatgctcaggggtcactcacatcgtgtctaacagccacacacttacctaacttgttaacctccttccctaccattctggtaaaagcattgtcttagagtcttgtgctgttgtaacaaaataccacaagctggtggcttaaacagtagacagtcactctcacagttctgcaggctaaagtctaagatcaaagtgttgctgggcttggttcttggtgggatccctctcttgttggcttgcagagggcagctctgcagggcagaaggcagagtctgcatagattctatatcatatagagggctctgctctcatgacctcaccacagacggcttggcttctaaacaccacctccatctacgagagctaactcatgagtcctgaagaggttaatatattcactctatcacaaacagaccctggtgtcaaattgcctggatggaatcccttggagttagagtgagagtccttgcaagcatgtgtatgagtagcaaggaaacgattcaggtgaggttacgaatgaaaccttcagcacaactttacctggacctgggtcaaaaacttctggagtctcaccaagtggtttagctttcttacacatttaaacacagtaaaacttcggggaaaaaaacaaagttattacaacaaagctttaggcatggccacatcaaaattactttgtaaagtagatctctttagcaaagcacctgtgacgtttcctccaagagtgtgttctcattgatagagaagcagtgttcgggataagggcctagggaggaagagtttgaaagaagcttaagaagagttctgttgactgagaatgcaaagtacttgggacctcttctattgactgagagacaaagctcagaatcagaccctaaacagtgcccaggaccgtggggggttctggtgaatgcctgcttcctagactagcagatcaccaggttgttaggcagcatccatcccagtgttctgggggaaaaagagctgagtgttcaacagttctgatttctgtagtgcctcctgtgagctgtgtcatctacaatagacaagtagatgacttttctctaccatgaaacatgggaaacttaggtgtctaaatagggtttctatgctgtgataaaacaccatgaccaaaaccaacttgaggagaaaagggcttatttcatttaacatatcctgaatcataatccatcaagagacgtcaaggcaggaacacaaaccttaaaggcaggatgtgatgccaaagccatgaagccagctgctcacgggcttaacctccatgctttcttacagcacccaggactaccacagcccagggatggtgctagccaccgtgggctgggtcttcccatgtcactaattatgaaaatggcccacaggctggctatatcttgatcttatggaggcattttctcaactgaagctccctcctttcagatgaccatagcttgtgtcaannnnnnnnnnnnnnnnnnnnagtcactctcacagttctgcaggctaaagtctaagatcaaagtgttgctgggcttggttcttggtgggatccctctcttgttggcttgcagagggcagctctgcagagcagaaggcagagtctgcatagattctatatcatatagggggctctgctctcatgacctcaccacagacggcttggcttctaaacaccacctccatctacgagagctaactcatgagtcctgaagaggttaatatattcactctatcacaaacagaccctggtgtcaaattgcctggatggaatcccttgctcactattcctctctgggctcagtttcctccactttaaaaatgaggccaatactactgttggcctcatgggttctcaacactgatcaagttcatgacccgttggtctccaaggctagctcttcaacttacctaaccaggctggagcagctcaggaaagagaattctgattgccctttgcagtggccctcagagtggtttggagttagagtgagagtccttgcaagcatgtgtatgagtagcaaggaaacgatgaatgacaccttcagcacaactttaccttgacctgggtcaaaaacttctggagtctcaccaagtggtttagctttcttacacatttaaacacagtaaaacttcggggaaaaaacaaagttattacaacaaagctttaggcatggccacatcaaaattacttcctaaagtagatctctttagcaaagcacctgtgacatttcctccaagagtgtgttctcattgatagagaagcagtgttcgggataagggcctagggaggaagagtttgaaagaagcttaagaagagttctgttgactgagaatgcaaagtacttgggacctcttctattgactgagagacaaagctcagaatcagaccctaaacaatgcccaggaccgtggggggttctggtgaacgcctgcttcctagactagcagatcaccaggttgttgggcagcatccaacgcaggcatcatttcttcctgggggaaaaagagctgagnnnnnnnnnnnnnnnnnnnnnnnnnnnnnnnnnnnnnnnnnnnnnnnnnnnnnnnnnnnnnnnnnnnnnnnnnnnnnnnnnnnnnnnnnnnnnnnnnnnnnnnnnnnnnnnnnnnnnnnnnnnnnnnnnnnnnnnnnnnnnnnnnnnnnnnnnnnnnnnnnnnnnnnnnnnnnnnnnnnnnnnnnnnnnnnnnnnnnnnnnnnnnnnnnnnnnnnnnnnnnnnnnnnnnnnnnnnnnnnnnnnnnnnnnncttgtgtcaacttgacgtaaaaaactagtcatcacactaggcctggttagaataaaaaacaggccaaaccaaaaccaaaacaaacagaactggtcctcggtgtgtttctcagaaaagcctaggcactgtcccatgtgggaattttttgagctaaggtcccaagatgaaaccgaccagcagaaagaatggcccttttagaggacatggaagtgccagccgacatctcttgaattcatagccactgtaccttcatgctttctttgtgtttctggcttcaaggacttggctaagaaggactgctagagctagcccattctggacactgcagggctcctctaactgacaggtcttgctcagtaccccatctgtgtgctcagagattgaactactcagtatgttctccttcccccagcctttcccccagcctttctccctggtttccattgctgtgaagagacaccatgaccaaggcaactcttataagaaaaacgtataattggggctggcttatagtttcagaggttcagtccattatcatcatggtagaaagcatggttgtgtgcaggcaggcatggtgctggagaaggggctgaaagttctacatcttgatccaaaggcagccaggagattcccttctggaggcatctaggaggaggctctcttctgctctaggcagagcttgtgtagtaagagacctcaaagcctgcctactcagtgatgcccttcccccaacaaggccacacctgccaatagtgctacttcccacgggccaagcatattcaaaccaccacactccctctcggtgctttgttttgctcccaacccctctgtctttgatgggcattttttttttctcattgaactgagttcatcttggtacttacttcttggagaagtcaaactgacatgcacttttctactgttagacatgtcatctgtgtacctaagaaagcaggtgtgcctcccatctatgtagatgaacctgcatagcaatagcacagcaagtgggaaatgcaaatggagttagtgagaggtcacattcaaagctttgattcttcatggtttaggatcttctgaagtagctcatttcccagtcaagtttcagataaagtggattctacaatttgatgccatatcatgaggtgacagggacactggaagcatgtggaaagcctttgaaaggattgaaaagcagaagactggcaagcaccaagctccatactgatagagacctgtttgcatttcagatacctggaactttctaatggcatagaatggaaagatacatggagtgggtaagctcggcatagttcaggcaacattactccagcaagtgcttctaaactctgcctctgcagtggtgtgagggtctacatgagtgaagatatcagcataagtgcaaactgtggtacctgtgagccatcagctcttcatagtgatgccttttacattagatcagtggtgccccggcgccttcagcttacagccacatctgttgttctcagaggaaataggacacagcagcagtggtgctttcctctccctccgctgtccttcccctggctttagcctgaaccctgtctgtttagcattactaacctgtattcatctacctcttactacagggaactggatatggtccggcccagggccactgggccatgttactgatctactgtgtgtccagccataacctttctgttttgtttctgatggcattagatccttctgcaaccatgtgctctgggaagtcttgcttggtaggcacagctagatgtgcaatggctctgtctttggtggggtgatttcatagcattcaagtggtgctgttctgatcaaatatatagaattgccactttcattgactggggcacatatatttaccatcaaatcgattagctttcaaaaatggctgtatgaattagtgtaaatgtatgttagtaacatggttaaaataaaaatggaaaccccagaaactagacccagcatgagaatcctgcagagccaagcaggacgttctagtgccatatgagaaacactgataactgcatgagttgctaacacaggactttgcatatttgcagtgcaggcaaaatgaggccttgggatttgctaatagcagcttatcttcaaataaaagccataaataagataactcgaacttcaaacctgagacaagaggaccactttttgcactgtttggctatgcctcagtcagggttttaatttctatgataaaatatcatgacccaaatgcaacatggggtggaagagattcatttcagcttccagctcctaggttacacttcatcactaagggaagtcaggactcaaggtaggaagctggaggcaaaggccatggtgtgtgctgcttaccggttttgctcagtcgtcttcctcatagtccagtcctgcctcagtgagctggaccttccttcatcagtcatcaagccagaaggcgcctcacaggcttgcacaggaaccatctggtgaaggcatttttttcacctgaggttccctttgtcaaatgactctagcttacggcatgttgacataaaactactcagcacagactccttggtctcaaactaaagacaaacatttcaagagctggaaagaggttcactcagtagggtgctcgccttgtaagcatgagtttgattcctaggaccatgtaaagcaatgccagctgtggtagccttcacacgaaggccggttgctggggcagaggggagagcatagacgaaggccggttgctggggcagaggggagagcgtagagcttgaaagcccacggctgagacacttgagcgtgtatgggctgtggtcccggggcttgctggccagccaccatagcctgccagcaagctccaggccagcgtgagactatgcctcaagataaggcctgtggctcctgaggagaggcccagcaaagattctcctcctgcctccaaacgtacatagaatacacatgtgtgctctcgcagacatgtgcttgtacacacaaaaagcacatgagaataatcaggttcagcctcatgaatcaacatagaactgtgtagagattattaaattctggcagtttcatagggttcaaccagatagcataaatgaaacatcagtggcagggtatgtgagcacaggaggtgggctgagagtccatcatgcaagcatgctttagtgtcctttggctttcacaccgctgtttgtcatctgatttgaccttctctgggtctcctctccaaatgtttccaccttatgcaagtatacctagtagaccaggatctatctgcataggaggggtgttccgattcgggtgtctgggtgctgacgtgtcaggaagcatgtttgtgctcgtagcccacatgtggcattccactgaggcagactgtggaacgtagttaggctttcttctcaactccactgacagacagacagtgcactaagaagcagacaggactagccactgagtgtatttgctaccttggcccatttagaaaaggagatttaaaacttggttttgagggaagggttttatagtttgaaaggttcccccttttcttctgtctgaagctctattaagccattctattatggtgttatttaacaggtaagctctattacgttccccaaaataaaatgtggctttaaagaataaaaacatgtgtaaatacattatgagaatactattgaaaattattttaaaagtaaatactagctggccaccacctttaaccctggaacttgggaggagaaggcagaggaacagctgtgagtttgaggccagtctggtctgccggggctacatagtgacagcgtgtctcagacaaagggggaacacttaataatgggtagccagcctataacttactctgtttgttgttgacttctttgtttacttaagttttattttgttttttgttttgtttttttgagacagagtttctctgtgtatccctggttgtcctgaaaccctcctaggaccaggctggcatcaaactcactgcctctgtcttctgagttctggggttaaaggcgtggactccagcttgactccaacttttaagtactatgctctcactaatgtagaccaagccacatatatatataataaaaagaaattcttttcattgtaacgtaagtttaaattgataccaaaattaaaaatagaatctgaaataaattctattttagttcacataagtattttaatcacagaaaattctgtctatacctctagttgaaccaagttgtaggcaaggtgagatgacgcgtgcctgtaattctggtgctcagaggtagaagcagatctttgagctcagagcaagcctgggctgcagagagtgcccaggtctgccagagccacgtagtgagctcctgtcctcagagagaaggtccaaagcaggtgaagaggaaggagtaccagtgtcatgcctagcatcacgctgggtcacttcctggacaggcctggctagctggctgagttccccttaaaaaagtccccaagtccgtttcttagtagaatatgggaatgtggcagtgacatcgttggtacatgcttgtcaatttaaagtagtacatatagaaatctagcattcttaatttacaacagatattttctatgtcttttttgaagacacaaatattttttttattttacttatttacttgtttgtttatttatttatttatttggtttttcgagacagggtttctctgtatagccctggctgtcctggaactcacttcgtagaccaggctggcctcgaactcagaaatcctcctgcctctgcctctgcctctgcctcccaagtgctgggattaaaggcgtgcgccaccacgcccggctgacacaaacattttttaaagagtatacttttcctttttgaagccaggtatggaagttatgtgccttgggagggattgactctggcaccccagacccctgggtgtgtgaaggagtgtgcccacttgagtgcagcctttacccagttctccccagctcaggttggtcactctgaagggcagtgcctctgcaacagagtccagtcccagtcccttcctgacacgtggacagccatggctgcagaatggcctttggaatggcgtgggcggcccactcaggctcccctgatgctcattgacatggcagagtcaggacaatgattggtctttttacatagtcagaaagggaaatggctgttaaccgtgactaggaggggctctcagtttgttgtctgcagagtagttactgttacaggtagggaagcagcagaaataagaaaagctgtattggtaaacctatgtgggtattgtttgcttatttttgtctagcagacagtgactttatccatagttcttaagttggcaaaccagcaaacactagacttgttttctcccaatttcctgcataaaataactatggccataaactgtggctagcagctctatacattatttgagcacacacgaagttgaggcctccaggtactaacataatgagctgcacagtaagtacatcggggatgacccaccatgaacatgagatagaggtgcaacttggatgacagtttcctccttgagggtgactgggatgttgttgagcaagcagactgataacttcaggcttcctgaatgacatagggctctgccttcccattacagtggaccctgctgttcttgaatgagtggcaggccctgctgacaaggcaggactgtgggacagctggctgacggcccaagcagacggcagcccagccaagaggttcctggagagtggtggcctttttcggacttttgaggatatcgggcacgccctcaatgggatggagagaaactagaatggaaggaaaaggctggctgctcctggaagcagagccagggacaataatgtcccaatagaacagactagaagtgcagactcacatacataaaggattcaagcaggtatacacacccagatagtcaacacagacatatgcacaagtacacacaggacccagatacatatacccagagacctacaaagtacagctgccaaaataaattccgcaacttgtcacattctttctggccttttttgtcaccacatgatgtgtaagtggtggccaccggttgtgatcgcatgttcagagagaacacggtttaggactgcctgtgactcctgaagacccatgttggctgtagtcagaaagcttcagacccacacagtgaaagaggctctgaggaatgttggagacacttctccgagctttgctctctgaggctcctcatctcatcaagaaggccagctaagaacacggattgttttcagggaatttcagggagattctaaagtttaccaggaatccatgaggctttgtaaatatagaaaatttatcacagacattggagaaaaatcaattttgcctagatagactagcttggtttgtttgtttgcttgcttgtttgttagggccagtagaaaaccatttgcagggatcacctgtttaaaagctaaaatctttgattttcacaagacagaagtaaagaacccccaagtccaacaagatgacagtgtaaatgtggataaccacagagcttctgagatgttttggtctctgtgcctgtccacccttagtgacagtactgactggttttgtgtgtcaacttgacacagctggagttatcacagagaaaggagcttcagttgaggaaatgcctccatgagatccagctgtaaggcattttctcaattagtgatcaagggggaaaggccccttgtgggttgtgccatctctgggctggtagtcttgggttctataagagagcaggctgagcaagccaggggaagcaagccagtaaggaacatccttccatggcctctgcatcagctcctgcttcctgacctgcttgagtcccagtcctgacatcctttggtgatcaacagcaatgtggaaactgtaagctgaataaaccctttcctccccaactgcttcttggtcatgatgtttgtgcaggaatagaaaccccgactaagacagtgactgtcactaacactgtcccctaaactttcatgaagaacttacctaagccagggttttgggggatgtcgagagctggagagatgcaagtcggggtgagccctggcctttgctggggcagagagcaaattctagaaatgagacaagctttctaagcaccatgaagtcactggcgcagcaccgagcagaaccgagcatctgggaagaggaagcttctatcagtagtgctgaactgagtcctgagggcaggtggacaggaagaggggtgtcgaggtctagggaagagggagccctgactacttagggaggactgtcaaacccttggaaaaacatcatgcatggcactgtgactgattcaggtcacagggaccaaggtctgtcatgtgggactttggactccatcctgaaagcaagagagactcccaaggcggagttactctgtccccaggactgattgttcattattttcagtaatttgaatttgggtctctcaacttccagctcagagactctatctcagaaaaatctaggtggacagtgcctatgttggagatgttaacatctttcgtagaaaggtgcacgtgtgtggctccacaggttccagcagtgggcgtggcagaacgaatgagcaggaagctccacccctgagcaagcaggtttcaggctgggggaggggagactacactcaagaaggtggactccagaaaatcaaataaccccattaaaaaatggggctcagaactgaacaaagaattctcacctgaggaatactgaatggctgagaagcacctgaaaaaatgttcaacatccttaatcatcagggaaatgcaaatcaaaacaaccctgagagtccacctcacaccagtcagaatgtctaagatcaaaaattcagatgacagcagatactggtgaggatgtggagaaagaggaacactcctccattgttggtgggattgcaagcttatacaaccactctggaaatcagtcttggcagttccttaggacatagtactatcggaggatccctcaatacctctcctgggcatatatccagaagatgttccaactggtaagaaggacacatgctccactatgttcataccagcctcatttataatagccagaagctggaaagaacccagatgtccctcaacagaggaatggatacagaaaatgtggtacatttacacagtggagtactactcagctattaaaaagaatgaatttatgaaattcctaggtaaatggatggacctggagggcatcatcctgagtgaggtaacccaatcacaaaagaacccacagcaacttttataaaaagcatataattggagcttgtgtaaagttcctgaggtttagttcattattatcgtggaagaggaacatggcgggaggaaggcagacatgactctggagaagtacctgtgagttctatatccagatccatacgctgcagcaggaagagagcctgttgtgggcttttgaaacattacagcccatgcctgtggcacacttcaccaagtccacacctactccagcaaggccacacctcctggtccttgtcaagtagagctagtccctgattagttagcactcagatatatgcacccaaggggcgaagcttattcaaaccatcacaccacctattacttttcttagaagattcctatagaaaagggagcgtctgtgcctaatcacatgaatggttaccaaatctgatttcccaaactcttagttaatccttcctggattccaaggctggctgtgggttttagttctaggccttgtttttaggtactcacaagcctctgcagtggctgaactcttttgtcacgtgtacaggctctgggtttgagcccagcactgtaagcaaagaagtgattgacttcagtctagacaacagattttagtagttgacaggaactagatttgtactaatttaagaaaggtattattcatctttatttctagttcttactacagcattttaattgtagataaatgtagtttgtgacaccctagggtgtaacgccttcttcccttggccaagatgatgtataaaatgtcaacgaagattattcttctttaacaataattctaagtattaccaagttccataaacctcaaattgagtgtggaggagaaatatcttttagttaggtctgtgtctttagcaaatatgggattggtgtggcttgtaatagcccatgccatttcaagtatttattatgaccccaggtgcccttccccgccactcttaagtctaccagaagttttttcagccattttctccaagtgtagcggatcctacttcttgtatcatctctcagtgttaattataaggctttgatctgccgcactaattaatcagtaattagatagtacagtacgaaaagaaattaacaaagataaaaacaaaagcagctctccacgcaggctgcagcatctggtaacttgatcccaaatcttgttgaggaatctgggttaagtgctctttacccatgaactcctttgattttggtggtggtggtgacctcaagtaactaatggaatatacaggtaaataaacactctggttagctaggggcaatagcacctatgagccctgcactctggaggcagaggcaggagaattgctgcaacgttcaaggccagcccatctaaacagtaagtttcaagctggcaaggaaaacagtgtgactccctgtgtccaaaatctgtaaaagctaaacaaacaaaaaatacttgcttacactgatttgtcattgtcaccttctcctcctctctcttctcctcctctcccttctcttcctcttccttctcctcctcttcatcttcctccttttcctcctcctcttcttcctcctcctcatcagaaatctgctttatgtatgaagatcaataattactttgaaatgtactagtatttttggaaatgtaaaatataaatgcacagtttaaagtgatgtgtaaaataaattcatagtttatagtggtatgtaaaataaattcatagtttatagtgttgtcctcactattgtttttcattttaaaatccacataaaccagcttttaatttttttgatttttaatgttttattagcacttagtagttgcacaggataacagatttcattacattttcatacatgtatataatgtatttggatcatggttacaccacattgccttctccatccccctctctttgatacattcttcccagaaagttccacttctcctttaatgactttttgtccttttctagatttaaattttcctatgtatttattttgctgaggcaatcattgggggaacttaagagacatgagcgagaggttagtgacaggaacatgagtatcttgccaggggtttaacacaaggaaaacttctcttcttccagcaaccgttgggtccttggaggaggtgggccttgccagctctcccctctcctatctgttatgcaggaactcatggctgcttttgatttcagtctaccacacctcacccatccaccagctcttgtcctctctttccacggtgttccctgagccttgcagggagtgacagagatgtcccatttgtgactgagcattcagcaggcactcatttccagccctttcctggtaggttctctacagttcctgctgtccaccaccaagggcgctggcagagacagtgtcctagagacagtgccagctcaggtgcctccccactggtgcctctgacctcctcagccacaggatttcagccaggattacaggaccagaggtggggtccttacagtggagaggatccccattctaacagaaagtgcttggttgctcccataagactgtaatcctgtaccgtgtacacaccctgccctgccaggcagcagtgtagattgcagtctacacagggatgaggctgctcacagttctccctggcatcttccagcacagtggggagctagctggcaagaaagaagcttccagcctggactcaccaacctggtctataactgtggtgtggcacatgcctgaccaggacacatcagagccattgattatttgaattgtcagctagacctctaaaacaaaatgtttaccttacgttaaaaagtacaaacacacctctcaaaatgatgcaaggagaattagtgggaagggactctgaaacccagatggatgtgggcagatgtctaacaagtattgttgggaaccttcaagtgttgcgggcaccttcgcatcctcaggtgcctgctcctctctggtcctggatttagaacttttttgatgtattagttgtgtattttctcattgctatgatctgctatgacctgacagaaaccatacaagaatccattttgtctcatgatttttgagcgtccaggagctagactcagtatgacagacaggtaaggagaggggccatggctagatatccaggatggctggttccttccttagcctcctgacataagacaaaaccctggcagctcctgtgtcccgccagcaggcccctgccggtggactggctcggcaggttcaaggcctgaccaggacatgttgcaccacatgtgattacaccacagttgcagaccagtcaggcaccatgcctgtcttcaaagtgaccaatcagggggtaggaaagaagacctccacagctctcaaaacccctttctccttactcctaccctctgtaatcatgaccgcatagggagtctgagcctgcaccacactcggggcgcatgaaggtacctcaccctcttccctggtgctgcgtctctgtagtaaacagcgtcaccttttgctggctgtagggatcctgtccactgtgatgggtataaagcttgtgggtttgtgccattgtcttgtaagttcccacggaagcaattttatggtccgggctcctgcttgcttatacaagtgtttttatttgccaggcactgaaagaaataatttacctcttgatggaacagtttagggtgtaaggacatagatccttggagaaggattttacaggagtgtttcagacgttctttcaatccaagtgtaccagacgatggaaacccgtaataacttagtatcagtgtagatatccggaagtcagactcattttctgtaacttcacggtgaaacgattaccggtgtgttagttgcttatcttgctgctatgacaaaagtacgtgaggaaaacagccaagaggagcgtttattttggccccagtttgagagtacagccgtctgcggagaagtcgtgcagaggagcttcacctcaagagttgctcctcagagacatttacagcctgtggtatccactgctgatgcccttcatagcacttgccatagccagagaggcttctgtccctgctggttggtctgtcttattcagcatcagtggcacccgcagcagcatcttctggctcatcagcacactcaataggtagttgttggatgaacaatgaataaaggtaccctcttcttcctggtgcatatggcttcaattggatcctgtgacctcttatccgtaaaacaactggcagaacattggcttttcctgaggattcattagaaagtaacgatagcgtgagcccagacagacagcacttcttcctgttttacagaaaatcttcagaggaactggacatggacaaggtgactgcagccatggtattgaccagcttgtcaaccagccctttggtccgaagccctcctgtgcggcctaatggtgagtctagagtatggaacgtgcccattagctccaagagcaaggcctctctctcctaggaatctcattcctcccaataaacagttggcttcaaattgaagactatgtgggaagtagagaccctgagccgtcagcctccccctcctcctctcccttacaccccaggatactgatgtgctcacctacacagctcacagacactgagttctaccacttgattactctgtttcaggacatacctgtgcagtacttatgtgcctttttcctcaggtagccggagaacggtctaacaaacttgtcttcccagcatcatttccttttgattgtaccagtgagcacactgaaggttgagtagtttgtagaagcattatcatacacttcataaccaaagagaattacttagtccattcacgaactcactgtatacttatccgatgccacctagaagatttgaacatatcaacagaatataactagtggccatacttctagggactgcgcagtctcctggggagaagactgtcatggccttgttaatagctagcacattgagtatgctgtctgtgctgcttgctctatgtcatcgtatgtctaccaacaagcgtatgcaatactgttaccactgctttacagaggagggagccagggcatgtgtggcttgatgaataaatgaccggactacatttctcggtcctatcttcttcattccagatctgcctttctagtcatgcttcatttaatctgcacgataaatcaggaaagcagacagcgggagttggagttgaatggatgatactaggccctttatcatgacaggtcctggatgcctaaggtgatccacacagagaggggaaagtttggattaggacagcaggcagcatgcacacatatatgtgtgtaagtgtatgcatttaaatacagacatagacagatgaatttacatgcactgcataggcacaggcattgagctgaagtggccattcttgcttagtggcctttgggagcctcttggcaaatacccagatttgcctttctcatctagtcagcatggctggaggtaaaactggggtagcccccaaaccattctaggaatgagtttgaatacttagagggaaaaagatattttaaaattaatcattatttttaccatacaattcttttttttaaaaaattgagaacatttctattgatactttgtacttaaaggttaaaattaaagtaaaccttttgattcttcaattgcaattttctgttcgctcagcaataagagtatgccagtgctcatttgtggttaaaacaaaacaaaacaaaacaaacaaaaaaacatctatttacctaggcatgatggcacacaccactaatctcagcactgaagggacagtctctgtgaattgatgaggccgtcctggtctacacagagaccctgcctcaaaataaacaaataagtatataaataaaaactttaaaaaataactacctcagtgctaaatttgatgtctcccactggttttcaaaaggaagcaaaattttaaagcaagggaagcaatttataataagaaaatcactagtttgggtgggaggatagtcgttctccagaattgtggtgtatcagtgagtaggggaccctgttgtgatcttctcctgtgcccgcctgagacgggttgttccattaggaggtagctttgcaaacaggtgagagcccagctgggcccatctgcgtctgtggcttatgctcacttgggtgctgtagcccagggaacactctgaaatgaccctttctgagtcacttgggcttcacaagctggtaagccgacgcgacgcgatggtgtagtgcactgtgagaattgctagttttcaaaagcagttcagcggctccgttgtgatgtggtagcatgtgtatccagcactgccactttgattttattgtacaaatgtgcggtagggtatgtgaggaagtcattggttttcatgccttgtgctagttttaggaggtcaccacatctagccatctctcccatcagtctgcaggaaggagactcgaagtcactttgtgatccttgcaaggtgcaggtatgcagacatgagcatttagttctggcagaggttcacccccacaaaatggcagcttctgtagaacttcagctctaaacctagtgacttctactcaactttcagctttgtgtagttgaggaatttgctggaaatccataattaattaggtaagggtaatgatttcccacaaatgcctagtctactagtcatctttgctgcattagtaattacacagacattttaatgaggcattttgggatgctttttcttcctcccccctcataattagttttaatatattcatggtgcacataaatatggaagagaaactacccagaaaaaagtagtttatataaatactaattaagtttgggcatcttgaaagataaagtaagtctatagtgactaaagccccctcctctgacattagcaggaagtaatctctgtcagactacctatagttcgtttgggcaccagtctggtcagtagacattgccaataaaccctgatgccatccagctctgccacagagataagaggatgttcacagtggaggacctacatgctctgcaaggccaagggccactatcagaccaattctagccttggccagccaggttcatttcctaggtagagagcaggcagatgagtgccctaaggtctagggggattggaactcagggtgtgtaagcagaaatggggactgataagtgtgaaggaggagactagtaattgggagccagagggcaaggggaaattagagtgaggggtcatgaccctgatatatgacaatgccatcacgaagctctgtacactgactttgacaattaagtttaaagggatataaaagcagtcagaatctaaggccctatttgtttgcatcggtagcggtggacttgctttagatgcctatcgagaaatgaccattgctcacagagtctttgtctactttcttatgcgtatatcccaagaaccgtagtcgtatgagtaatgccatttttaaattgggatggggaggagcagggtggaggcttgccggccagatagtttgggtagctaccatgggcagtctcctactcagaagcacttcagccagcaaaccagaggccgcacagttggtgaacaagaagtaatgattattttcttgttcttgtatgatctccaccaattccaaggaaggagccggacactagaatgctcactgagagcacagacagtgtgttgcagtgtggctagaacagctgcttagaaagaaccgtgtgactggggtgggtgaagacagagcccctttcccggaggctctcacttgctgtcccctgtgctcacagagggtctcagcgggtcctggaaggaaggtgcaccatccagcagcagcagcagtggctactggagctggagcgctccgagtgaccagtccaacccatccacgccctctccaccactgtcagctgacagcttcaagcccttccgcagccccgccccacctgacgatggcattgacgaggcagacgccagcaacctgctcttcgatgagcccattccgaggaagagaaaggtaggttcgcggtgcactgtgttgtgcacccaaggtcctggtatgcactctcacccaccccatgcctggtcttagtgctctctgacattgcagattccccaattaaagacaaaagtgactgaagcctccatgtctgtgtcccatccgacatgtatgctccatctgtgtatacattgtctaacacccttacctttcttagaagctgaaatactgaactgaggcttcctgtgcgtgcatgctcttaaaatatagtattttttttcttttctgcttctgttagcccaaaagggtttgttcattttatacagatagataggaaagatacataaaagctgacatatatacaagtctacttcatcccaaaaattacgtttaccaaacagaaatgtaaagaatagctaaatagatgaatagattagagctcattagacttactgaccatacatgtgttggtcctcacagtagagctctgtagagaccaaggtcccaggatacatttgttccatagccctgcagtccaccagagccaccatgcaaatccacaggctcttcattctcttcaggagtctttcatttattgtcaccattttctgggtttccagtgttttaacatttacttatttatgccgtgtgtcgtgtgtttgtttgtgtatatagaagttagacaacagcctgtgggagttggtctctctttcactatgtgggttctaagaattgaactcagacttggcagcaagtgctttttcccacctacatcattctcacggacctgtcaccctctgttttatagaagcatttttatttcatagactgcaacactgctactaaatctagggaacactttagcattgtttgaaagttatgtgaagctgtgatttttttatgctagtttttaattttatatgggtgtcatcattcttaaatatgactcataaacaaggcaaactgcagccccaaggatgtagtcagccttgtcctcccctgaatgtggtccagcatcctctctgcttcccttggcatcactcacagtgcgcagcagtgagcactaccatggctctctctgggtatgcccctaggatagggccatccaccagaaaggagggcctttgtgcagcatcccgctgttcccagaagcagggtcctgcctgaagagtccatcttatgcaagggcactctgcgagacacttggacccgtggatagaatacacagagagaatatacagcagcgtggagctgaactcttgcttagcctgccattcccagggaatctaagcaagcagtcctgagtatggccagtgttgtggcaagacctcatacatagagcaggggccctctagtgcttccaaagtgcattaatgaattaattgatcgatcacctatcagagatcagtttgtatgttttatagaactgaaagtcattttcctccctggtcaggctgcattggactggctcgggtaggctatccacatacctcagcaaaattagcaaacagttgcatcaccagaggaaagagtgggagcttccccatgggtacaggacttgacacgcagtgtgtggactggagttcagatcgtcagaatccttagaagatggacacagtactgtgcttccagagcctcagtgctctatgatggagatgagagactccccgagacctcacaagcccgatacacagaactgacacctagcgcgcacacacacaccacttatttgaagaccataggcttcatttacaaaatgctaagtgtggacacaaacaggttggttagaactaggtattatcttctagactcagccttccccacagtgataaaggaactgatggcgccatgttgtgcggccttggccatttgtatctaaacttactttgagtagtttaaaaagaaaataggacagctgctcttcaccctgctgtttacttagtgaactaatatttattgagcaccataggcaaaacactgaacagcctggaagcagggcacaagagctggtccattcattcactgagagctgggtgggcacaggttggtgtgtgaaggggctggagtagcttcaaacgctgtcttcagatgttgcaggatgcaagctctgccattacagttactgtacatttcaaaccgtatctcaaacggtctctacagaactcattgtaggacttgcaatgccaacttctgtctcagtctctcagacccttcctatctgggctgaatggctcccaccaaagagtataaaaatatacagcagcatttgcacattcacccagggagcttcaagaaatgtacctctcggacatcaaagaaatctcagaatttgccataagaagtgggaactccagctgtacacactgacaaccagggtagccacaccacccaggagaagagaaacaggaatgttccgtggcatgtctgcgtcggaggatgcactttagtgaccttcgtgcattaggtcggcaatcgtgagggatgagaactgactaccaagggaaaagatataaacctaagaaataactaatttgtctgggcagacagtctgtttttgttgatggagcttcctaatttcttacctgttcttttagatccttactgtccatttgaaatcaacagtcatttgcaggggaggttgttatctagtggaggttgtttgagaaccttctacttccagattgactgggaggctgtgagtcactgtaatgagaggtgagcgggagtgaggatccgctgaaggtgtggggtcagcactgccctctgttggggtttttatctcaacagtgtgctgacacgtgagtgggtcctgtactgtggcctgtcactcagaacgtttggaagcacctagaccatgtcaaatgatccccagtccatcccctcagccactgctctgggaccctaagaaagccagcttgaccctcaagatggcacctttttgtaaacctggtaatgcaccctcacaccttgagggacagttgtgaagttattaaatgtgattccacgtacgagagcatgcactcttttaacagacatccattccctagactgtaaacacagcgagagaagtgttcactgcacgtaggtatgggtcatgattgcggacaccctccgctctgtctgacttgctaacactcgaataaggaagttcaaagtgtgaagtgctatgcacagacacgtattatctgatgagcactgcatttacacgttttgtcacagtttatcagatgtgtatacatgcagcttttcatttcatcggacccacagttttcggtagagcctgattcccactttgcagaagcaagtgattaaatttgtacggcttgcccaaggttgtttatattgtgacagaaaaacagtgagctgagcataaataatagaggctgcttgtgagcaagatgagtaaaagaatccacagaggagaatggcagcctagtcaatgggccggtgggagctgaggcacaagagggacactactccttcctcagccacagcggtgaaatgtgagagaggcaccaagctgtcctggctctgcacgtcacttggccagctttgggagggcagaatctagcagacttttttcctctggtttctttctttctttttctttattagatattttctttatatacatttcaaatgctattccgaaagttccctacccctacccctgccctgctcccctacccacccactcccacttcttggccctgtcgttcccctgtactggggcatataaagtttgcaagaccaaggggcctctctttccagtgatggccgactaggccattttctgatacatatgcagctagagtcaagagctccgggggttactggttagttcatattgttgttccacctatagggttgcagaccccttcagctccttgggtgctttctctagcttctccattgggggccctgtgttccatattatagatgactgtgagcatccacttctatatttgccaggtactggcatacgagacagctatatcagggtcccttcctcaaaatctttctggcatatgcaatagtgtgtggggtttggtggctgattatgggatagatccccggatggggtagtctctggatagtccatccttttgtcttagctccaaactttagtgaggtaacccaatcacaaaggaagtcattagatatgcactcactgataagtggatattagcccagaaacatagaacacccaagatacaatttgcaaaacacaagaaaatcaagaagagggaagaccaataggtggatacttcattcctccttagaatagggaacaaaatacccatgaaaggaatttcctctggtttcaaatagattgtttccgaactactatggaatgtgactgggactctgagaagatgcagttcctgtcatgaccacgaggtgatgcaatgacccaaagtatgggcactatggtactctccagagaaaaccaattctgtagaagggtaaaagttaactaccaattccacaagaccttctggaaagtcagattcctggttctgtcatatctaggtgtgatgttctgtgtattctgaagttggggtgtgtcactgctgtgctgtgtgtgctgtgctgtgtgtgctttcgcccttggatgctgagtgggttgggagcttaggaaccctaggcatagagacaagatgccatgggcctgatcctgtattgatagatcagtgctgaatggctcacggtgactgtgaacccctcagtcacccagtgcacttttggggttaatgtgagaaaactcgctgcaatgttgtgagtttgggtagctctggcagaaattgggagtacacaggaaacctgactcaggagtctgtcttctggaccagcaacagtaacccagaggcgcttataaacctggttttcatcactttcccttggttcgtaggtgtggtgaccatggacagttttactgggggttggttggaggggagcttgaatcaaaacaggaagctgtaagctaacacaggagtttcggtacctgtgtggtcttcaaccacgagttaagcatttgctgcactctgcattttttatctttgggcttatacttatcccccaaaacacacagatctacaaaactcatgagtatgatgtgttgttttaaacaaaatcccaattgttcaattttaccaatgaaaacttgggagccagatgctgcagatgctggagttaaagcctgctagctcagacaggcagagaaagcaccaactgaccttcctccttagtggacctcccaaaaccgaatgtccctcccttctacttcctgtgcatctgcctatcaggtcctcctgactccctcttactatgtctttttgttaataatcacatattcgctccctgtcaaatgcctcttgacctatggttgattttacttaaatcttgtttacagtattcaagcaaaaagttcctggattaaaagtgtgtgttagggctgagctacaccacaactggaaataagtttttccaataaataacacaatctcagggtccacagtgtggttacatatcctgcaacaatggtgcccacctgcatcgtgaactctacagcgttcattccgaatctgcttctcaggagcagggaaggtctcccaagggagtgctgtgcagaagcggtcccaatgaggatagtgcgtgagcacaccaaccccaaaggtacactgggtgatggagaggctcaccaccctgagccactcggcactgacggatcaatacgtatcaggatggaggcaagtgttctcttgtttccatacctagggttccctagccccccacctgcccagcatccaaggcacagcacagcacagcaagcattagcagcattcatggctcttccatcttttcatccgtgtgtgtttctctggaatgacacatcatcaggaagagcagcaagcagttaaccaggagaggaagagcacagatcagagccctgggctcccagagtccagggtgggccagccatgtggtccctaggttgagggtgctggagcaccgaggaactcagacagcatctacagtcgtcctaaccatccaatctcacctaggagtcaacaggacaaaatgcacttctagaatccatggattaagaaaataattgactagggattcttattaactcaggaaccctcaggccacacgtttacctctatagtaaattcctatcactgcagtgccggccatggtgggactggctgaggggaagtggaaggatgcagggttcgtacaaggtcctaagttctggcaacaggaatgaatgctcactcgcattgccagtagaaatgcaaaatgtggtataactactttgaaaactagtttggcaatttcctacaagttaaatatgtgctaagcatacgacccaggaactctactgttgcatctgtatttacctaagagaaaagaaaatgcgtgtccacaaaaagactcctagacaaaggttcattgccgctttatttattatcaccccaaccggaagcaacgcagatgtctgccagcgggcatgtgaaaaaggagactggtgtattcatagtagaataccacactaccaaaaaagagaaaagctaccaatgcacagagcaacgggccactgtcagaatgtcagcgtgtggtggggattcagccacaggagactgcattgtgtgtatgctgtgcacagggacgtcttgattgttcgtcgtttttaagacagccttacttcaagaccaagctagcctcgagctcactgtggagccgaggatggccttgactgactttgtctacctcccaagtgtgcctatgtgtttatacaatgctggagatggagcccacggccccttggtacctgctagcaagcattaccagctgagccacaccctttgaatttactcagcactgctcgggaccaagctgtacacatgggtggctttacctaatctgtgcttggcatatttgaattcattcactttgtgtttacatcactagtactaatctcatttaatctgtttgttttacaaataaaggggcaagagaaccccataagcgtaagatcacatttataaagctggagctccatacagtagctatttctttagcttttgtcccttgataaggatcttagtgaacctgcttaccagagacaccaagacaggctgaaagggatacatggtgaggggcacttgactttgcacaggaacctgatccacagttcagcaatttggacatcaagtatctcccctccactgcagtataaacacacacacacacacacacacacacacacacacacacacacacacgaggtgattgtatccactgcagtataaacacatacacacacacatgaggtgattgtatccactgcagtataaacacacacacacatgaggtgactgtatccactgcagtataaacacacacacacatacacacgaggtgattgtatccactgcagtataaacacacacacactcatacacacacacatgaggtgattgtatccactgcagtataaacacacacacacacacacacacacacacacacacacacacgcgaggtgattgtatccactgcagtataaacacacacatacacacatgaggtgattgtatccactgcagtataaacacacacacacacacatgaggtgattgtatccactgcagtataaacacacacatacacacatgaggtgattgtatccactgcagtataaacacacacacacacacatgaggtgattgtatccactgcagtataaacacacacacacacataaggtgattgtatagacctcacaacaaccatattgaataataatacatccctgagggtctccagtgcatacaaaacaaaacaaaacaccaatatgatcctctaggctgtaaccatgggccttctatgcctaccccatggaggcttatctttatttacagtggtttggccttagtttattcttgctttccaactaactcttaacttatattattgcagttatgctattctgtgtctgccacatggctggttacctcttctcagcttcatatgtcagacttcctccaagtctgggtagggaatctgccatgcctcctctcccagagtcctctctgtctggaagtcccaccttactcttctgccttcattttaaccaatcagaatgtgccttaggcaggcaagggaggacagagccacatcttcacacagtgcacaaaaccatcacctcaccactaggccactgtgctacagtggtgctcttatggcctctggagtattaattcagtgtaagctaagcatgtcaaaatcaaagccatgcccctccacctggagtggaaagctaccgctgccagccacnnnnnnnnnnnnnnnnnnnnnnnnnnnnnnnnnnnnnnnnnnnnnnnnnnnnnnnnnnnnnnnnnnnnnnnnnnnnnncactccatatatcccaagtatgaaaccattttaaaatagcactgtggccgggtgtggtgctcaggcctttaatctcagcacagtctggggaggtggcatataggcagacatatctctgtgagagcctggtcgacacagtaagtttcaggacaggcagagctgcatagcgagaccctatcttggggtggaaaataggattgtgagtcaggctttgtggcacggacctgtggttccagtactcaataggctgaggcaggagggtctcaagttcaagaccagcctgggctacacagcaaagtactaactcaaaaagataaataaataaataaataaataaggaaaaataattgagacctgaggtcaaagggggtgccaccagcactggggcacttagtcttcaaaccagccatacagttaaggaatctccagaatttctctttaacccacgagcagatatcgaagagcctgccaggaaacatctacacacctcacatgggactaaaattctgagtctgcaactgtctggagtgcccagctctcctggaagtgttgtagtattagctgaggtaggaggtgcaagttcccgctaataggggcctcctctgcccttcctctgtccttcagctgctccctgtgaagagggcctgtctgtgaggcttcaggtcagctgacaggactttgatgttcaacaaaatcactttggactgggggtgaattttcagctgttgcccatgcctttgtgggcagcacatctgttggcgccctaaggaggggccagcactgagcacagataggccgttcacacttggttgctgtgacttggccaggagctgcttggtttggcttcctccagacagcttggcccacgcagcattttggccgttgtttatttagctattttttcctcctcctgtggcttgctttgctctgccagagcagcaagtagtcagtctgtggacagaggttgatttcaactggatagagtgaatatattgaaaagaattaagcttccattaagtggctctggcctagggaagcggacccttggcttgtgtagagcaaagctgccggagcccattgaagctgcgacacacctcctctcctgtttgcttgtctccagttttaggcaggctctattagtcaagtcagggtcagtttgctttggttttgttggcaggatctcaccatatagtcctgcctggtctggaactccctgtgtggaccaacacggcttcaaactcacaagagattcacatacctctgccttctgagtgctgggaataagaaagtgtgccaggttgcccagacgagacataatttgtgtaagttaagaatagatagcagtgggtctcaatatagattgttcaccaagctcagggccctcagttcaaaccctcagcaccagtgaaggccaagaaacataccagcaaacaagccaaaaatagggtactttttaaatgttgaaattaacataaaatataatttttcccagttttttgattggttggggtttgtttgtttgtttgtttgtttgtttgagacatagtctctctacatagctctagctgtcctgggctcactatgtagaccaggctggcctcttgggtgctgggattaaaggcccagtatttgctttataaagttttagtatcagttttgctttatgcttggttgctttcaccctcactagcaaatccattccttcattggcattagagcccaggattccaggttctagtgaagacccgttgtaacatgtagccttttaaacggagaaacttatggattcttattagactttctgttcgtagccaaccattaccgattagctggaccccacagcctgtttatttatttttgtgtatgactgtttcgtctgcatgtacgtacataaaccatgtgtacacttattcttggcagaggtaagaagcgggtgtcaggtcccctggaactacagttacacacggttctgagacaccatatggatactgggaatcaagcctgggtggtctgcaagaacaagcattcttaactacccagacacagaagtgttgcaactggttctctacacccatacttcacctgccctctttcttccacgtctaggaagactctgctaagatggatggggagatgtttttgagaaactctgggactggaccaagcttattccgatattctgcaggtcctcccgtttcactccactccctcttctcagttcctttttattgtgtaatctaaaactgtgtctgcttaaatctaccttaaaaccttgctcgtccatccagtctgggctgggtgccctgagcagaccttgagcacaaactccacagccagtcccacaacacccagaggaagctccactcccaggagctctaacacgcccaggatcataggatcccaggatcccagaattgtaggatcccagagacagctgaactctgaggagttctgacacaagcaggatcacaggaaggacaggctccagttacttggcatcatcagaacccaattctgtcaccatagcaagtcctgaatacactatcacaccagaaaagcaagatttgaatctaaaatcacttctcatgatgatgatagaggactttaagaagaacataaataactcccttaaagaaatacaggagaacacaggtaaacagctagaagccgttaaagaagaaacacaaatgccccttacagaattacaagaaagtacaatcaaacaggcaaaggaaatgaacaaaatcattcaaaatctaaacatggaaatagaaaaataaagaaatcacaaagggagacaaccctggagttagaaaacatagatgcaagcatcaccaacagaatacaagagatagaagaaagaatctcaggtgcagaagataccatagaaaacattgacacaacagtcaaagaaaatgccaaatgcaaaaggctcctaactgaaaatatccaggaaatctaggacacaatgagaagaacaaacctaaggataataggtataaaagagagagagaagattcacaacttaaagggccagtaaatatcttcaacagaattatagaagaaaacttgcctaacctaaagaaagagatgcccatgaacatacaagaagcctactaataaaactccaaatagactggaccagaataataatctcatcacataataatcaaaacactgaatgtactaaacaaagaatattaaaagcagtaagggaaaaaggtcaagtaacatataaaggcaggcctatcagaattacaccagacttctcaccagagactatgaaagccagaagagcctggacagatgttatacagacactaagagaacacaaatgccagcccaggcttctatacccggcaaaactctcaattaccatagacggagaaaccaaagtattccatgacaaaaccaaatttacacaaatccagccctacaaaggataacaggtggaaaacaacacaaggagggacattataccctagaaaaagcaagaaagtaatctttcaacaaacccaaaagaaaatagccacacaaacataattccacctctaacaataaaagtaacaggaagcaacaatctcttttccaaaatatctcttaacatcaatgggctcaattccccaataaaaagacataggctaacagactggacatgtaaacaggacccagtattctgctgcatacaggaaacacctcagtaacaaagatgggacactgccttagagtaaaaggctggaaaacaattttgtaagcaaatggtcccaagaaacaggctggagtagccattctagtatcaaagaaaatcaactttcaaccaaaaattatcaaaaagataaggaaggacacttcatactggtcaaaggaaaaatctaccaagatgaactctcaattctgaacacctatgctccaaaaaccccacattcataaaagaaactttagtaaagctcaaagcacacaccccacacattaatagtgtgagacttcaacaccccactctcagcaatggacagatcctggaaacagaaacaaatcagagacccagtgaaactaagagaggttatgaagcaaatggatctaagatatttatagaccatttcaccctaaagcaaaaggatataccttcttctcagcatctcatggaaccttctccaaaattgaccattgacaaaacaggcctcaacagatacaagaagattgaaataatcctgtgcaccctataagaccaccatggactaaatatcaacaaaaacaacgaacagaaagcccacatacacatggaagctgagcaatgctctactcaatgataacttggccaaggaagacataaagaaaaaattaaaagactttttagaatttaatgaaaatgaagacaacataccaaaacttatgggatgcaatgaaagcagtggtaagaggaaaactcatagctctgagtacctccagaaagaaactagagagagcacacactagcagcttgacagcacacctagaagctctagaacaaaaggaggcaaattcacccaagaggagtagacagcaggaaataatcaaactcaggactgaaatcaaccaagtggaaacaaaaagaactattcaaagaatcaaccaaaccaggagctggttctttgagaaaatcaacaagatagataaacccttagctaaactaactagagggcacagggacagcatcctaattaacaaaatcaaaaatgaaaagggagatataacaatgaaatatatgttaaaataatttttctgtttgatgaatattaacagttgaaaatataatcatgttctataaatatggaaacattattgatactttttctcactgcttgaaattattattttcttaatgtttttaacttcaaagaatttttgctattttgaaatttttaaagtgtattactgataaaataatatctctcctagaaatgctggtaattttttttaagtaaactgattgttagacaatatacacagaaatataatgtgttttaaatactctctcactatgtcaggggtatcatataagggcttttgaatgtatttcttaatgattcatttttaatattttatgctcctttactatgcttaatttccaaagaatatcttgtatgttttggaacaatttagtattccacattagatataggatcctcagttatggatagtattacatattcattaatgatatttttagggtatgaaaggatatgaatttttgtaaaagttgaacaaagtttatgtgtattatttgattctcaaaatactcaatattattaatatgtttgatatataaaattcacttaattaataaaaaatttaaaaaataaattttagtatttaaaaaacttacaaataactataaacatcacattttcacttcctctctcccacagaaatattatttatgttctttgataatatgtgttcttaattgctcaagttctggcagagggccatggtacactcaggtagccttaaagtttagtcttacaaagggagtgtgagcaggcatggtgggagaacccagaatctaagcccatcccccccaccacagcctgaggaagcgccggaccagagggactcccagaaccttggaataaccggagctctagaagaaaacaataaccacacacaggtgtggccaggacaagggaatcgggattttctccagccttctgcattctgacatcacctcccattggccacacccaccacaagccggtgggcctgagcccttgattgtaccctgggcctcaggtgggcaccgagtgggataagaggtcagaacaggatggcctgcagagccaagcagggcaaattctcttcagccgcgtaagcttatgaactgatgaggtcgcctgctcagtcccacagagtaaagttaattcggaaaaaaaaagaaagtactgggccagagaggtgaccctgcagtcacgagcactaagtgctgggttctgttctaagcaccagaatcagagcgcacagctgcagctgctgcggctgcaggagatcagtgcattctggcttcatcgggccctgcacagccatagcacactcagacaagcaagtccacgtggataaagaagaatagattattttcaaaaagaaattaaagaatggaaaaatatttattatagctttcatttttagcatactcagtgtatatgggatggtgtcagctgcttttctcttgctgtgatgaaacaccatgactaaggcagcttactgcagagttgggtccatgatagtgaatataaagggaggggcaagaaactgcgagctcacattttcaatcacagcacaaaacacagagagagcaccaggctttgaagactcaaaaatcccccccccccaccaccaccactggtatacttcctccactgggactatacctcctatcttagggtttactgctgacaacagacactatgaccaaggcaactcttcgtttgtttgttcattattaataattatattattatttattaattattttatttacatcccaaatgttgccccctcccagagttcttccccccaacccctcctcttcgcctatgagaggatgcccccctccagtgtccctcctccctgggtcatcaggtctctacaggattaagcacatctcttctactgacaaggcaactcttccaagaacagcatttaattgggcctgcttacgggttcagaggctcagtccattatcatcaaggcaggagcgtggtaacatccaggcaggcacggtacaggaggagccaacagttctacatcttgatcggaaggcagttaggagactgagtcttctgcactgggcagagcttcagagcccacccccacagtgatgcacttcctccagcaaggccacccctcctaataatgccacttcccatgagccaacggatttaaaccaccacacctcctcagcctatcctaacagctcaatcaactgagaaaccaagtattcaaacacctgacccagtgggggccattttcactcttaaacagccacagggattaacttagctaagccccattaccaacctaaagattggtatgatgactatctttttgcatgtatgctacagcttgagtgtgatgttctcaccctgtctacacacacccttttccaagaagcttatgtgtgaagacttggtctgcggcttgtagtcattcagaattttttttaacccattgagtctaattagctttgcccaaatttgtatgggtgtggggccatctactcttgtgtggttgcaccagccagcagccacagactccccctcgtccagcagcctgccactctcagtagcttctctgctagagacaggatcccactcacttggcagtgctgactggcttgatcttgggcacgtcctctacagcagcctcacagctctaacttggtgagcgcacagtgttgtcacgatcagaagacactgtttagctgtggtcctccccagcctctggctgtacagcctttccccctcccacctcagagatggtccctgagcgtcatggaggaggggtgtaaaatcgatgcctgacttttggctgagcaaagcacagacactttggcccattatcagtgcctgtattaactgccatcagctgataagacctgagagccgcagtcgtcaaatgctttggcatagtataatcaaaagacacaggatttgatacttacatgctgaggaatgagaataagaaaattttgttttatataattaagccatgtatgtttctataagagcagaaaactttctatgtactgtaaaacactgcaattataacatatagtaggcttcaaagctgaatccagatgttcaggggtataggcattgggtggcgtaacaacatgtgctatacagagtgtgtatgtgtctggtgtgtgtgtgtgagagtgagagagagatgtatgtannnnnnnnnnnnnnnnnnnntgtgtgtgtgtgtagtgtatatgtggggtgtttatgtgtatgttgagaacaaagcctacagtgaagttaggcaataccccatgggtaagggttcccagcagacacttcagaattactctgcttttagtattgaattaattgtgatcattgttgtttggaaactgtttgctgggcagagaaggtagctcagctggtgatgtgcttaggaggactttagcttagtccccatgtgtaaacagtgtataaaagctaggctcaactgcatacacttgtaaccccagtgctgaggtgggtaccagcagctcctggggggcttgctggccgaccagcctagtattcatggaaagttctaagtactgaaagaccttgcatcaaacaatcaggtgggtgatgcctgagaagcagcccccaaggctgtgctctgtcctctgctcgcatgtcttcctgtgcacatacccatgtcccctcacacagtaatacagccacaaaaaggaaaactattgctgagttattccagattgagttatcttgcgtgttgcatgactgcagcaaaggctataaattaatcaagtgttttaatgttatgatactttagtctacaggcagtagacacagctcagcaggtaaggtaacttgcccacctgggcctgaagacaagcgtttgattcccaggacccacatggtaaaacaagactcctgccttccacatgcaagcaaaccatggcataggtactacctctgtctcagtcaccgttctatgctgtgaagagccaccatggccaaggcaactcttcgaagagaaggcatttaattgggggcttgcttatagtttcagacgttattttatcatcatcatggcagagagaatggcagcatgcagacagacatggtgctgcagaagtagctgagtcctaaatcttcattcataaacagagatagactgggcctgatgtgggcttttgaaacctcagttcctagtctcagtggcggccacatttcctaagtgacgaagtattcaaatctgtgacgctaagggaggcattctcattcaaaccactacacccctcacacacatgcacacatgtaaacatacaaactgaacacaatttcattccaggggaactgcttgcttagcttgtccaagccgctgagacccatctgagcactgcaaaaatgtaaaagtgcagaccagggcacgatgacagtaattcaatgacagctgctctagggggtgatcaccccagatgccgttctgctggttcctgcccatggcatcatggaggctttacgctcatctgtaggacgttgtattacggttcctgttttgtgatcaatagcactgtggtggggggaaaaaaaaagaacaccgtggtggtcagaacaggcccatgtggtggcctcgtgaagcccgtggtgggctcagtcactgtgctaggaggcatttggaaaatgctaaaccctcactgaggagcgttgtgtaattgtgtgctgggtaaagtttggcttctgcagcagatcccaggtttgctccttgagtctctgaaactctttagcatggaggccactagcagcatcggtctctggggatcaactgcttagaacagcactccccccactaatcacttagtttaagtactttcagggtgtccccagtggttcttaggaagaaatggaagttgtctgggttcacccagctctttgcccactgggaaagcccagagcggagattccggttgtcaggaagatggagagcgagcaaaggatatagcacgcagtggggacgagagggagactggatggacttgcttgcatggtgatgttgtccttacctcttcctgtagaactccatgaaggtgatgttcaaatgcctttggaaaagctgtggcaaggtgctgaacacagctgccggcatccagaagcacatccgggctgtccacctcgggtaaggcagcgcgccctctgtccacctcgggtaaggcaagacagcgcgccctctgccaccttgggtaaggcagcgcgccctctgtccacctcgggtaaggcaaggcagcgcgccctctgtccacctcgggtaaggtaaggcagcgcgccctctgccatctcgggtaaggcaaggcagcgcgccctctgtccacctcgggtaaggcaaggcagcgcgccctctgtccacctcgggtaaggtaaggcagcgcgccctctgccatctcgggtaaggcaaggcagcgcgccctctgtccacctcgggtaaggcagcgcgccctctgtccacctcgggtaaggcaaggcagcgcgccctctgtccacctcgggtaaggtaaggcagcgcgccctctgccatctcgggtaaggcaaggcagcgcgccctctgtccacctcgggtaaggcagcgcgccctctgtccacctcgggtaaggcaaggcagcgcgccctctgtccacctcgggtaaggcaaggcagcgcgccctctgccatctcgggtaaggtaaggcagcgcgccctctgccatctcgggtaaggcaaggcagcgcgccctctgtccacctcgggtaaggcagcgcgccctctgtccacctcgggtaaggcaaggcagcgcgccctctgccaccttgggtaaggcagcgcgccctctgtccacctcgggtaaggcaaggcagcgcgccctctgtccacctcgggtaaggcaaggcagcgcgccctctgtccacctcgggtaaggcaaggcagcgcgccctctgtccacctcgggtaaggcaaggcagcgcgccctctgtccacctcgggtaaggcaaggcagcgcgccctctgtccacctcgggtaaggcaaggcagcgcgccctctgtccacctcgggtaaggcaaggcagcgcgccctctgtccacctcgggtaaggcaaggcagcgcgccctctgtccacctcgggtaaggcaaggcagcgcgccctctgccatctcgggtaaggcaaggcagcgcgccctctgtccacctcgggtaaggcaaggcagcgtgccctctgccatctcgggtaaggcagcgcgccctctgccacctcgggtaaggcaaggcagcgtgccctctgccatctcgggtaaggcagcgcgccctctgtccacctcgggtaaggcaaggcagcgcgccctctgtccacctcgggtaaggcaaggcagcgcgccctctgtccacctcgggtaaggcaaggcagcgcgccctctgtccacctcgggtaaggcaaggcagctcgcctctgccatctcgggtaaggcaaggcagcgcgccctctgtccacctcgggtaaggcaaggcagctcgccctctgccatctcgggtaaggcaaggcagcgcgcgtctgccatctcgggtaaggtagcatgctgcccctctcccctttggagctggtggaagtctctcagtacagccccacacatgtgtacctggcctctggctcttcctggttcctccagtaggggtgatcctgctgatagtcagccaccaagtcaccaggccgcagagcctccctaaactagtgtgagtcaccttagtataatccttactctgagccctgggtccatttaaaatgaaatgtcggctgtgagggtcagagttaaactctgtgcaagagacactatgtataaaccacaccacgagggcatcaccatgcgagctgtgaatgtacttcaaagacacctcatgtgtctgtaacatgaaatgtgtatttacttttgcaataattgatatcatgacttagaacctctcagaatgagcaccaccaccccacccgacccccgannnnnnnnnnnnnnnnnnnnnnnnnnnnnnnnnnnnnnnnncctcacaccttcgatgacagagtctaatgtgatggtctggctcagcctgtttctaagatgactgttttcttccgaggctttaacaaccttcctatagacagacgagttgtgattaggaccatacagctggacttacagccaggggcagtagggggctaactgtccctgccttagtccccactctgtcttgtccatgtagctggggtttagaagagatcctgtgtgaccatagttatcaccaatgtgcataaagcaagcatcactgccttagtagctctgcgtgctcgacacagaagggtcctttttgacaaaatggctatggatgattcggccctggggccaccttagccagaaagaagcacgctactctgaaaactggtataggcgagccacaagaaagtgtgcaggcagccagaagagagtgtcagatccagaatgtatggtctcagccaccaggccacacctgcctctgttgtctctcagtcatactgtgcttggtaggagcctgctcagtgccacacatgctgattacgtgtgcagtggtacagagagcggcaaaagacacagccctggagaatcagtcatgagaagacaaagaggctttcagagctacagaagcaggctgcagagatggctcagtggtgagggctttcagcaccagcactgatacccaggcaatcaaggtcctctcttgtgttccatgtctcattattaagatcatttaaaaacagactcccatggaaacttggggacaatttcattagaatttaaaaggaccccaggacaggcaagctataaacctcagcagctgcctagagaaagaatagagataagagggattaaaaaacaaacagaaaccatgttgagtcagcatggaggacagccacagggccttaggcagtgcctagtggggactgggctctcgaggaggaggggaggcccgagtgtgggcaaaagcatgcttatctctgcagctaaaggaagaggcagaaaaaagagtaaaagccggactcagaaaagtgggcagagccacctgagctctcagtgggctgtgagaattctgggaaggagaactggagtgcttgctaaaaggttggatgtggtggggcaggcttttaattccagcactcagggagcagagggaactctgattgttgaggtgaattccaggacagacagagctaaagacagacaccctgttgtaaataaaattagccattctgtccacccatagaaaaaacaaacaatccaggttggtattttatttgcaagctggaagcctaggttgggcaggtttggagctattctaacttatttcccagccataattcccttgttccttgctgtttctcctggctgggtgctcatggcctgtctcctctcatggctgcctcctccacctccttcctctcccccccccccctctctctctctttcactcgatcctcaagtcccacttttctaaccttttattgaccagttaaattggggagcaaggtacacgtagcatcacttgatgcacatgtactggagagaaaagcgtgatagcaggtggtagaagcaagcaggaagaggttaaggctgtaagcactcacagcaaggctagacttcctaaaagttacataacctctccaaacagcaccacctgctggggagcaagtgttcaggtacaggatcctgtgagggacatttctcagcaaaagcaccatccgcaccacctgcgggttctgctttcttcctaagcctcagcatgcaggtagatgcttacctgtcacttcttctaaacatcctatgtaaaaaccagtactactcccaaccgtggacccctctcctaagggctcgcagatattgcttaatcttttcttactaagacttaacaaagcctcatatattaaatagccgtttactagggatatcttgtctgcctctagactataaaagttccatcaagctgggtggtagtgtcacactcaggaggcagaggcaaatggatttctgagtttgaggccagcctggtgtacagagcaagttccaagacagccagggctacacagagaaaccctgtctcaaaaaaaaaaaaaaatcaaataacaaaaacaaaaataaacccataaaaacaaaagctatcatcaaaacatagtctttgttttgttcctgttaggaagtagaatgttttatatgtaatgtattctccataaatcattctcagattagtaaatgaatgaccaggtaggtaggtagatgggtaggtggaagatagactgctttaagaagtcttactctagtttttgttgctgtggtgtaatactggatgccatgggagttaaaggcatgcatggtagtttatttggctcatggttctggatactgggtcatgctgcactatgaccatagtcaagggtgagggtgtccttactacatctggttttcctttcagaaccacttgggccagtgtaccagcccatcttcttgtcatcgtgccctgcccccatcttcataccatggtgcttgcctcacttccccagtcctcttgacctctcctaattctgattgcttttcaaagactctcttcccaaacaccattaacgcaaggatttggaaagtaagttactaacagacagtgctggtggggggcacatttaaaccagagcagaagctgatgagaaccttcttcagtaggatggttgagtgtcaccgcgtagtgtagggttgccaggccgacagagaggagatcattccgagaggagagaatggtctgcacaggtcgcaagcacgaggacaggctgctgagcttcgctctgctctctcctgcctaggcgagttggggagtctgactgcagtgatggggaagaagacttctactacacggagatcaagctcaacacggatgccacggctgaaggcctcaacactgtggccccggtttcaccctcccagtctctggcttcagcccctgcgtttcccatcccagactccagccgaacagaaactccttgtgccaaaacagacactaagctggtgacgccactgagccgctcagcccccaccaccctctacctcgtgcacactgaccatgcttaccaggtgcgtgctaaggaccttgtgcaaaagcagtagctaagttaacacacacacacaaaccacagcaacacacgtggcagcaactccgttggtttttctattttccctcttagccaggatctcaagccataagtggtggcttgtgatcccagcactcaagaggctgaggcaaaaggatcatgaatttgaggccagggatgggctatagagttttttcgacagggtttctctgtatagccctggctgtcctggaactcactttgtagaccaggctggccttgaactcagtaatccgcctgtctctgcctcccaagtgctgggactaaaggcatgtgctaccaccgcctgggctatagagttttaagggcagcctgggctacatagttatgaccaagtctctgaagccaaaccaacaacaaaaagggtctggtagtccagggctgtatgtactcttggtcagtctagaggccgggtacaaaaccactgtaactagctgaaagatttgtaattaaaaacaaaaccaaaaacctaagcctggagaaaaaaaatactttgcagacttgagtcctggcatctcagctatgtttatttgttcaattttaaggttttaaattttttcttgcatttttattttgtgtgtatctacttgtgtatgcacgcatacacccgacacattgcacttgtaaaggtagagaacaaaaccctctctggtcctaaggattgaactgggatcttcaggcctggcccctttccctgctaagctatctcattggccaagtctttaagcatgttcaaaatacatgctgtgcagtgaccatcattgtatccattttcttaggaacaaccttagatgtgagatgtctaatgaccaaaacaattgcactcctaaaatatttacatcttagatgtgcccatttccaaatttattgtttaagttatttcctaatatggtagtcatatttatgtccaaaagcaggtatatgtgattttcagacactgacatccaatctcccatatttctcctatacctcaggtagactgcttatatgaaaagcttctttctggctactctctgaccctgttcagtctctacctgttagcatatgttaccagagtagccctgtgtgttcctacagcccagcttagaaatgagaactcagatgctgtggacagtcgctctttcaaacagctttctctgctccctgcctctcaggccacacccccggtgacgattcctggatccgctaagttcacccccaatggcagcagcttcagcatttcctggcagtctcccccagtcactttcactggcgttccggtaagtacgcagagcatagcaaggtgagccaaggcaaatgtacacttagagaacaaactttgaaacagccatgaaaaagatgggagtccatgcccaaaagcgctactacattttgattcttctctttcttgaggttgtatctcaaggctagccttgaactctatatagtctaggatgacctttgaactgctgaccctccactgcccaaatgctgacagtacaggtgtttaccatcatactcacattccaaaggcgtttgcttctatcttttttttttaagatttttaaaaattttatgtgtataagtattttgcttgcttgtatttctgtgcgccacatgcataaactgcccatggaaaccagaggaggatattagatcgcctggaactggagttacggatagttgtgagccgcccgccgtgtgggtgctggaagtctggaagagcaggccttcctggctcagctagctctccagtcccacatgtatatttcctaagcgactcacatttacctgcaaaggccgctggtgagttaggtggctgcagctagggaagatgttctgactgatagaagaagctgtcagctgttggtgttggaaatgtagtttgtgttggtgttggaaatgtagtttgtgttggtgttatagttatgtgcccaaaagatgattgaattcgtagcttgattcactcttcttacagaaaagctggtgtttatcattataaaatgctcataaactttgttagtttgatataatgtcttaaagatatgctacttgaaaatccaaaaattaaataaattgaaatcacagtttttttcaaagcccaagcaacccatctttgatggataatttgaaagtaaatgaatgctaaaatatgcaccagtggtttatgtaggaaataaaaattaactcaatatattaagtgattctgataaatcaccttgaattaatgtggttcctaacagttcatttaaaaacttactgggccttacatagcttctcacagagtaccaagagacctccctgcacaacagccatgctcacagggtgtgactcctgagaagggtcagaactaggctcccaagagcagatggtagcttgtccctggccagttccggaggttcccagcgagtctagaagcctccctcggaggttctgagtaactggataaactctgtctgctctgcccatgcgtgtctaccaaactccataaaaggagtcagtgagcagccccctgctgacagggctaggcgaggaaggctttccagaacatactctggggttgtggtttttaagcactgtcataaataaggaataactttaaaagccactgaacagtggtggcccctgttaatgctcaaatggtgaccttctacatttttttgttagttttacttgtggcacaaacattgctctgcccatgtggccaccagataactgtgaagcatttcctctgggagacgttttccttggtggacaaaagcctagagtgatttgccatttgacactacctgtctgtgacggttagtgttgtcaacttgacaaaaatctaaaattacctgggagacaggcctctggacatgcctctgggaaattatctaattatcttgtgttaatagaaatggaacgatggagccaccatggttggcattaactctagacaatacagatggagaacaggaactggagaaaagaggagcctgcgttcatcattcctgtgtcctgaatgtggacacatcgtgtcccgtgctccaggttcctgctgcactggcttcccggcgtggattgtacccttgaaccagagtatgttatcacagcagcagaggaagaggctaagatgccttctgtgatggcctggtgtattcactctccccatggctgtcagtgcctgacagtaggaactgaaggaagagggcttattagggctactggcccgccatggtggggaaggcatggcagtaggtgtatccatggcctggagcagaaaggtgaatggtggtgctccagttggtgctccacttggctccatctttttttttttttttttccaaccaggcccaggccacagaatggtgccacccatactcagcatagatctttccttcctcctgggaaagctatcccagaaactcccagaggtgtgtatgctaaatcttgtcaagttcacaatgaagattagccaccatcacacctaaagtgaaagctatagttccaatttcagctacaggctgagagtgcagcagtttctcagctcctcacagcattccaaacacataggccacacggctggctcatcagtgtgagaagagcttgtcctggccaccacgctccacttggtgttcacaactgaatgcaaggcctctggctaggcacctgcatnnnnnnnnnnnnnnnnnnnnnnnnnnnnnnnnnnnnnnnnnnnnnnnnnnnnnnnnnnnnnnnnnnnnnnnnnnnnnnnnnnnnnnnnnnnnnnnnnnnnnnnnnnnnnnnnnnnnnnnnnnnnnnnnnnnnnnnnnnnnnnnnnnnnnnnnnnnnnnnnnnnnnnnnnnnnnnnnnnnnnnnnnnnnntctctccctctctccctctccctctcccacttaaactcactctacagcccaggcataccctgagtgtgctatcctgtctccagatccaccgtgcctggcttatgctgtgctggggtttgggagaagggggagttgttgttgtttgttgtattttgttttgagaggcctgggttttgagacaggggtttttttttttttaagatttatttattattatatgtaagcacactgtagctgtctctagacaccagaagagggtgacagatcttattaaagatggttgtgagccaccatgtggttgctgggaccttcagaagagcaatcagtgctcttaaccactgagccatctctccagccccgagacagggtttctctgtgtagccctggctgtcctggaactctgtagaccaggctggcatcgaactcacagatctgcctgcctctgcctcccacgtgctgggattaaaggcgtgtgccaccacccagctctactctgctctttttaattagaccattctagagacatggttctggtttgtaccggctgtctcttttcccagttcctaaaagtgtctttagcatgccagccaggattccttgtgttgtttgttttccaacaatgaaattttagaactcttccatggactttatagctgttgatagcctcagtctcgatgcaaccccccccccttttttcatttctgctttagtttccaggggcatcctagcagggagattgcacagaagatagatgtagtatctgggtcaactggaaagtctaccttctgtggctgtttctcatttattcttttcattttgttttgtgatgggtggtacttttatgggtatgtgtgtgtagaccggaagttgacacagattgccttcctcagctgctgccccgtattgtggcagggtctctgaacccagagcacacgttaggtaaaccgactggctggctagtgagggccctgggattggccgggctcccacggcgactccagagttacagatgcactgcgtgtagcttgtccattctgcatggtactgtgttccacactcagggcctcatcagtacgcagcgggagctataacaactgagccttcccccagcctctgcctcccatgtctaatttattcttagagtctctggtttgtaatctgcttcggccaagactcgagataaacacttcagcagtcaagcttgctgctcctattttaaggttgtgggtatatttttaaatgcttagtttgactctagaaagactggaatgtagctctaaaattattccttatactcctgaacgcctggcagtgctttcaaagaacacaaggttgggtgcctcccgtcctgtgcccttgctggtgggctcactttcctaactgcatcgaggcttcaggatcggcttgaaaatctcttctgtctttgtattcccaaacgaatgccctgaggttgctctcctaggtccacccctgagatctagtgctgaagagaagccttgggggacttcctatgggaagccccttctgagctgtcccgggtctcctgacttttgctttattcacttctgtgcgagatttcttgagtacttgctttagtgaaccccagcatcaaagcccttcccaacgtgtagccgtgcagacttgcgtctgtagacaccactgccctgccgcgcacacgtgcttctctagcctgaggcctaggagtgagcaggagagttactacagcagcatagactgagcggtgtgagtggcagtagtgtatttcctggaagctacaagcccagaatcgaggtgtcggctgttttacatgtggtgagggctctctcctggtttgtagttgtccgcctttagagctgtgccttcacctggctttttctggtgtgtacggtcaatagtaagagatggaagtgggggctgagagaggtaagcatgcataccggccctctacagtctctggttgaagtgtgtgcactcaagtgcactgtctggtatctcttcttataacactaatcctattgttgcagggccctactcttataacctcatctaactttaattccttgaagggcttattttttaatatagccaggctcaggatttaaattttccacataacgttttaggggaagcagggaggccaggcctggtggtatttgcctctagtcccagcacttgagaggaaaagacagaaagatcaagagttcaagacccacctccaccacataggaaaaaaaaataggaggtggggtctagctggaggaagtgggttgctgtggttgtgtctcagagttcatgtctgcttccagcctgagctgctttgcaaactcaaaagttgatcaggctgtacccaagctcctaccataccctctcccaccatagtagagaacatttccttgaactgtgaaccaggataaacatctcctgtgagccatgctgtcatatactctgtcttgaccacaagaacaataactctgaagatgctggggttttattttttcattgcctagaagcagggtctaaaatgctactgaaagattccttcagtcaaaaatcgttcctagtccatatgacaggagatcacaaggaacattctctagaacatatatagaagtgcattgcaaatccgaatcctgtgctatagcacccatcaactctgacctcgaggcactcatacgacctttcttaagcaattgcttccattccaaaacagccctgtagagttgtactgctcagcacagcagctggcagtcagctcgtgttgcaggatgcccactgttcctgctgtcagagtgggaaacgacaaagtcaaatcttcctatgtaaaaacatgtgttccagatccctcacgtgtctcactatctgaacagattagccatgatggaaaaactacaagttagagttctttaaactcactggaagtcatacgtactgagtaagcatggtgtgggcacatagcataataattgtatttatttataaataatagcatatggtactatccgtagtgatacaaagtgtactttatatttagtaaagttgacttcaaggtagacttttggacacgtttgagatacaagacaaaaactagaatgtagagagcaggccagtgagatggctccatgggtaaacagttgataagactgagttctgtccctgagcccacacagaggtggcacaagacagtgggctgtggctggagtagacctggccatattggttttcagagtatgactgtggaagtgtttggaacttggagctggaaaggccgttgtttgcttagagataatgggcttttctgtgggagtttggaagataatgacaatgagagaaatgttggcagcactcccccactctctgggctctgaggtgagttaaagagcagttatcaggtcagcatagctgtctcataccagctgcaatcccagagttcctaaccttggcagtttaaccctgacgttcattttactctgcagttgagaacaaaacctttctgctttgggaaacatgcaagggaagggggaggatctgtccgtcaacctgcctgtccttgtttcccaggtgtctcctccacatcatcccacagcgggctcaggagagcagagacagcacgcccacacagccctgtcctccccgcccagagggacagtcaccctaaggtatgaccgcttgatgctacttcacctcaaagggatttatttcctaagaaatggagaactagcaaaagggaaggaaatatgacccactgtaaaatgtcttcccaggccatgagcgcgcttccctcccttcccatggtttcctaaccagtaactagttaagggcacttgtagtgtgtaggctggagagctgtactcactgtcctcgattaacttctctatgataggaacagttagttagttttagtctacatctaggagagtctcctaggaagcctcagccagaattctgaacactggaaagacactgaaaatttggaagagcactgttgttctctgatgttatgtgttttgtgtatatttgttgttgtttgtgtgtttgcttgttttgtagtaggcagggtactagggggtggagacagaagatgcatatggtgcacatgtggggtttgtcttggtggggtgtctcactcacccactgcagtcaagctggtccaagagcttgcagggatctctgtcagcatctctcaccttgctctataaacactgggattacaggcaattgcatgcacgcgctatcacatcaagctccatataggttccaaatgtcctcctcgtgcttggtgagcagggctgccccaggtccccctccacagtccccacctcttgtgtctaccccttacgcttacaccatggccaaggaaacatttccatgaatgggatttagaaacagtgtaatcacagtggccagagaagtccccagccctacgggaagtcctactccatgctgggctttttgtcttctgttcccccttattctttgcaactctccccagaaggccgccccgttcctgtccctaaggctgtctgtgtgccgtctttcttacaggaagcccagaggagaaggcaaaaagtgccgcaaggtttatgggatggaaaacagggacatgtggtgcaccgcctgccgctggaagaaggcctgccagcggttcattgactgagccattcctgcctctccttccaaaggaagctactcaaggcccagggaaggccctgcctggaatcccaggaatataattccttggtggaattaaagcaaaaaaaaaaacaaaaacaaaaacaaaaacacagcaaaaaatcagcactgcactgctctgagaaccaggcgagagcgccaaggaggaccttccttcgaaggaaaagcccgcttccttagctctcagtctggtcttaaagctggtcttctgtagcagcttagccaaccaggcccatttcacctagagagaaggcacattttgataagctttctgaactctggcattttcgagggtttttgacactgaaaacaatatgcccataagctacacaatatacccataagctacacagtctgaggtagcatttgtataaaggatagtacctaccttgtgaataggcatctctctgtttttccgtgcgactccttggatcagtctgatcatgatgtatttcaaaaaagagtttttctatgtctgttttgttttcaagaaggaccccaagtggaaccattgtaaagatgttagcttggaggccctgagtaacttacataaggccaaaagtgattgacagtgagtgcgagtcacctcagccatcacctgaggtcaggacaccaagaggcactgcagaaagcatctgaaaatcgtccttggatcccatgtgagtggtggcaccactaagtctctgcctgccatggctcagacgagagctggcgctagtagcaatctggtaaaccttgatgctgctttcagggatatcacacacactgcagcctggatagtgtgtcctgcttggttctgccaagaccatagccaggactctgggttagcattctgctctccaaccccgcccaggtagaaaactccagactggcctgcaggtttgcttccagcagagcatagctgtgggaaagatccactagggcatcaagccaacttccattgtgagtgcacttttctagatggcgaggggatggctaggggatgagttagtggactcggtgacgtatatggataatggaacgctaaactttgttgtcttataggaatattgaaactatgaattaagaatttgctcagaaactaacttacaggatgcccaaaggcagatgcatcttggtataggactctctccattgagtagggccaaggcttaggctgggttccagccattggaacctgatgtacttggctgttggaagggtggagcttggagcagctatcaagccttgtaaggacttattctgtctgccctgcttaagagaggagtgtcctgtacctatgcatggtaagagcaccttataggagccactaggtagggatggggaacatggtgtcagcaatatgaatgttaaatgaacttgcacagaggaaaacttaatatatgtttaaagattgtacatagtgcttttttacagagtagagaaggcatgtaggcgtctgagacacctctttgtatataaggggtgtatatggaggctctacagcggaacacccttaactggtgcgttcatgtattttggcaattttattttttaaattcatgtggctttttaccacggaaatcaaggaaaacgggaaagagatgctgatcttttcctttggatacttaaaaggaaaacaaaacacttacttcaagagaaaagagaaagctttctctgatttccctgtaggttgataaccaacatcagccataccacctgttccagatgcttttacctgcaaccaggaaacaactttttgcttttaaagtccagagctagatttctttcccctgggcatgtcctctccttatctcctgtagcctcactccctgaaatggtgttctagctgctccaagaggccctgagcaacgtggagattgagacatcaactgtttggtcaagttcaccatgtgcttaaataacagatggatcctaggctagagggttttctcctcagcaaagctcccttaatttttaaaatctcagatgaagactttaatcaaaacattaaagtgatgtgaaattcaatccaccttctcttgaagaacttggaggtgaaggaatgctgtcgtctgtgtgagagagagcagtccttaggtgctgagctgtcgcccccagaaacacagcctaagggcaggtctgagcccgcttagctgcatattgtcagcacaatcgtgacaccaaatgcacctgacctgagtccctcgttttctcagaaacctccatcgtgccagctcgtgtgcatccccagcccacctagggccctcatctccaggccagccttaggcactgaacatttccttatctggcttccaaggtgcaggcaaatcctgagtgcagctctggacacatgcccattccctgtgtggaagggtgtaatgccagggaccggaagctctgaattgcaacatacagttaactgattatatgagttactttttgtgtgagttacatttcttaagtagttattttgttatttggggacccaaacaaagtgccaaatgaagcctgacttttcatttcatgccatgtccatgaaactaagttctttttgtgtcttcattttgtggagaaacagaaagcatgagagttggtgagctggctgctagcctgaggctctgtgcaccccagggcttccagccctgtctgtcaaaggagcagtgatgtaatgaattcttgtccatggaaatgtctagttcttcttcttccatgatgcccattcttacaaaaaaggtttctcatttctcccggaaaaagcatgtcacagtgactagcaggacattctccagccagctaggaagcaatgtgtgcaacaggcaatagtttccagccttagccttcctggaatatggacacttattttgtgaaaatctgtgagataacgtggagaaacccccaggtagcatatgtgtcaagggggcagtgcgggagacctgcacacccctatcttctgctcatcttcttgggctgctcagctaggactcctccatgtctgctgtagatgtctgacacaagacaggagctgcttcggccaggaactatccatcaggctcacctgccaccttatgtctgggaagttaggttctctggattagcaaaagctagcgccaggaagaagacagtgggtttccaaaccagagtggacctctcgtgcacgttgatagtaccatgtccaggaggctcccttatgaacctcccatgaccaagctataaaggacgatcatctctagagaaaaacattactgttgagctctccaaaaattccttcagacttcatgtatgttggaaaaattatttgaagccaaattgttccccattgcaattgaagatgacaagatttggagtctgccatctctggtatccaagaacaagtacgtcacactttgccagaagccctgggcttaaagtgagtagtgagcccctataaaagagtctgtttcatctctcacttcagctgccctgcaagacaaaggtggcattcaccggagaaggttctgagaaaagaggtgagaactgtacatacaagaatctgttgagcatagcagcagaatactgtaaatactactcatttcctcagggagacaaggatgctgtgggaagagatctggagaaccccgagaccaggaggatttttatctcctcaagtcttttcttgtcagaacaagtttttctttatgtaactctccgtgtcatttcaaaacaaatccgtgttcagctggacaggcagacgacttccatgaggtgtggcagagggactgtctgttcgtagctgccctaaagctgattgaggtttgagccacaggtgaagagcctgctgggcatccatagacatggtgaggcttcctctgaatgtaattgggaacaaaaagccttgctgttccttgttgtagttcctcagtctggatgctgtttattatacacagcatcctctaagggaggaaaagctggccacgacgtgtggtttgctttagtggcatgttcaggagcacactgccatggactctggtggacaaggtgctgtctttgctcttgtccgtaggatttccaccacccacatcagctgtggcattgacctgtgtgaatatgtgcggatgagtggagccagcatggcccgtcagtatgacagcgttgggagcgtgggtcattttgaagggcatgttaggcatatgagtcaactgacaattctatttctgtaagaaagaaacctaccagcagcacacaggtgccaccaatcctcccacgtggagggatttctccatgttacgatttcatcctgtattttctgcattgtaagtagccacaggggaagttagtaaataagatgaggttagcacttttaggtaccagttgtcctgagtaactgtactccaacagagcaaggacatatgaaatgtactcaagacttgcttctggtgacagacttggaaaaggcccatttccaatgacacacatgctttaaagagtgtacctatcacaggaccaggaatcaaaacgggaattttatctcctgtcctgttttgtaagtagcttttttttcctaagacaatctcatgttttataacttgttgtgtgtgtctgagaatcataatggtaatgtgttatggtaaatgtaatcttaaatacaataataattacaacttaaatttccaaatgaaagaaatacactgcttaggcttctgcaagagacatgacacttttataataagcattagtacttctcaagtttaacagaactggaaatattttacaagataccgcgttttgtaatcacagagaacatgaacactttgtgggaaatgaccttggttttatacattgtagcttattttttaaaatgcagtattttaaccggcaggaagtgtagatatggcacacagttcctgtccctcaatccaagggctatgcctcttttaagcaagtgttttgatgcgtatcttttcaattaaccctctgagcaagggtagaaatggagaccagatagcaaggtcatttgcaagagaatcaatgaagcagcaactattccctcatgaccagtgtgtattcaaagcatctttgtgggggcagggggcatgtcacatgaagattcaccttctatattttaaacccaagaaaagatgctagcacataggcttctaggccaaggaagaaatatccctttagtgtggtatgagttttcttatgagttttcacctatcagaactacatgcctgcattttataagcaagcgtcatttggtggcactgtctaaaactgtagtatatatgcccaaagaacctttaaacggtcagcagtgtttgtgattttgttgttcttaccaccgccaactgagaaacttcctcatcaggaccgtttgacttttgtttgtttttcactatggaaaactcacaggcacagaaggttgtgagcagaaaaatgacagaattcccatgggacgtaagaaatgggagccacatacacagtgtgagcactgccaaggctattttaagctgtcccacatcaacaagcccactcgctgttaagaaaacatcttcccaagagtttattgactcaaaaagctaggccagttagccacgtatgcgacagtttcagagtagaagctgaggtggggcagctgtgtacctgccaggtaactgtaccagttactgagaggccattctagcttttctagccgtatcttccatgtacggctgacagtctgttagacgggaactataaaggcattgtatgagggaacagggggttgtgcagccttgcacccagtgcctgagtgggctggcttgcagctagctcgccattgccatcccctaggatagtaccactgatggatggcattcgggtgcccagcaggttttcactgccacatggttttgaactatgtgcgacttactccacctgtgcgtggaggcttccttccagagactgtgtgcgcatttagacactttagaacagctggaaaaggactgcagatgttcagggcgtgtcaggaccaacaacggtgttggactagacaactgacatctaccgaacaggaaggaccctcactcagcttttgacaatcaggccaggttgccagatccaaactggagacatggcaccacccgacaattcagtgttgaccactaacatacgttctcagccaatcctgcagaccaagaaaagctgtgtgggggcagaggcatcctgtggccacagtatcagctatggcaaacttccacacttgtgagctaacaggcccagattcctccatgagcatcttagactcatgtgctgccacgatctgaacagcagacatttcaaaagagggaagacactattcctccctagaggatatcctcatggaagacaaaaatagaaatgtcatctcttcagcttagcattgctcctgatcagaatgcactaagttgtcacccggctcttgcaagagctgcctcctgccatacccaggccacaccccaaagtactgaatagctgtaaccctgatactgtgtctgctaccgtgaccactgtgatgaagggcagagggagggaggaaggaagggaaagagggaggcaggaaggaaggaaggaagggaggaaggaaggaaggaagggaggaagggggacaaagtaatcgggagcctttgatttggcagccgggtaccctggtgctttacagtagcacatggcccctcccatgccagcgccctctgcctacgctttgtgctccctagcttcctaggccatctctctccttgtcccactataaatgtatatataatttcacctctgatctggtaaggcccctgcttcagaactagcaggcacttaggtgttttcaggagtccattcaccttaaaggaagtttttccacacaggcaacctcagtctctttctcgcagggtgaaataaaactgagaataactttgtcacatgagtggagggctacacacattagactttcattgttctgagaaagtacattattttaaactcttgtcttctattgaagtctattgaagttctgatgtcacagggagagttctgtatggtaaagtatgtgtcattcagacattacttcctttgatcttcatatgaatctagtatagaaaacaagtcctaaggccactaatagccatgccaagacactggctcaaacctatgagtcagcaccgtcattacctgcagagagagacctggcccagctggcctccgctgtgactcagccgtggattccctgggcccaccatgttctcagcccagaagtaaagagcaccctcattcatgtcactaagtgcaagtttaatcatccccaagttccgtccagtgaaatggtaaagtgtaggaggagtttgttagctaaagcaatattctgataaaaatgttgacttcttaggaaaaaatagcttgcttctggcctctggcctttcagactctaactttaagctgatgctggatggtggttaacaaccagctcagaattaccatgtgtagagacgactcaaaacgacctgcaagcatgctgcagtgcctaggtcagttaagttgtatgtgtctgaatgcagtttctgctggcaagctttgacattgctcccactgtggatgatgataaggctgtccagtatatgaatacactccatccaaggcttccagggtgtcaggtgagcatcctgagttcagaggaaagctctcacaagaaatcctgtcataagaccagaaggaacccccagacagctagactggccagttccctagctgatgagcagggaggcagttagtttgcccctttctcctctgacaaaaggcagtgggctgtatggtttggctgcctgtgcttggctggcagtgcacagaaagggcctagtgttagcaagggaaaaaacaaagcgcataccagatactgaaggattgggttagagtcaaatagtagttggttctttttaaaaatgttccttttcagtggggattgctgcactgtgaccctccgaggagaacaccctttgatgtgacaaggccacctgagcgatccctaagactgattaactacttcactttctattacaatcagtcttcccaaaatgttcattcagaaaatagccaaagcagagcatggcagcccctagaaaggacaagaaagggattactaaagaacggaatcgagccggacgtggtgacgcacacctttaatcccaacacttgggaagcagaggccagcctggtctacaaagtgagttccaggacagccagggctacacagaaaaaccctgtctcaaaaaaccaaaaaaaaaaaagaaaaaaaagaacagaactgttggggaaacacagctgtctcctgttttgtctctatctgtgactggaaacagaaaccaacactctggagaagacataactttaagtgagagtctgaaagaagactccccatctagtgccatctgagcagatagttgggtagacactttctttcccttcttgattctcatctcctaacccggaagccaaatgtgtttgttgccagatccagagacagctattattgttacttggttgctgaatgcttgctctgaagtcaacaccccagtacatggatgcttccctctagacactcattctgctcagcgagtggctaccctccctgcaagagaaagccgttctctgtctgagcagatgtagtctctgggctatgaggacagggtctgcattggcaccaccctgccacactcagcccacggcaaagcagcagctactcacgtccatgtgccttaagacactcagtgtggtcacctagccagagctagagtcagcaagacaggatgctgtgttagggtggaagagaatccaagagggctcagactaaatccttccaggctctgtcccctccctgccgccctgctcaaggattcaaggggatgggattggccttctccacgtggcgatggagtttagttgctcctgttatatatctctggaaagcaaacactgcttccatttgcttacctgtcaaacattcattccttggcccaggacaggctcatccctcatttcaggcacagacagcaagacagagtggacagagggctccctgagggcttgtgattgtttgtgggtttgagctgcccctcagggatctgtccctgcatgggggaaggatgcctaatgtggcagattgcactcagagagagggataacttttaggcccttactctatatccttactggaagtatgtggctgtgacatggcataccagcaggagctgatcacagggagaaagcttcaggtgaaacctagatgtttgagaaaacacgtcacactcctaaagcatgctatttccatggcttccaaaactaaaagcacctgtggctcagctagcgcatgaacatgccagtagtcacggtttcctatcgtgcaccctgaaatccctatttttgtaatttatgattagactgtggtcagtcacttaaataaacactcttatgaattaactagtataccctagtatagtttccaaaatatatcatactgtatagccctatgtgcatgaagatctcagggggaggaagtacacgctaggtcccaaagggtccagactatcatcaaaagcgcatgccaagtggcctgaggccactgctcatacacgagggggcgggggaggggatatgggctgcagcccctcagctgcccttagtggtgggaatcagcatggtcgctgttaaaggtaagccatcttttgaatttttcaacaccaaatcttaaagtatcaaaaaaagttaccgaatgttaaaagtggggtcgttagtggaaatgttgtctgtaggaagtttttctcatagtgtttgataaaaacaacaaaagccaaactgaagcccaagaagtgtcctctgggggacactggcattagggtggtcgatgactgaaggatacagcagtgctgtcctgtacacagagctcttttgaggtacaatctttccatcgtttcaggggtaagtacttccttacaaagtctttaataatgaatgaatgtataaatttataaactatgcattttcagagagaaacatgtattttgtatcaaatccgagtacttttttttttcatagagatttatcacaactacagattattcaaaataaatgagaatgccaatcctcataagggtgtggggtgcctttgtttttcactctgatggtttcaagaccatgcatccagactttgatctgaaaagctagccagtacagtaggcgaaggatgattcgccttctcctggaggggaccactcgcacaccacccagttcttagggatggataatttagtaacactgggttagcggatagaagggccagggtgtggcttacagatagagccctggcctcacgtgtgtgaaggcctgggttcagtctccagtacccaagtagtaacaataagcaggcaggcaacgctgttaccatagtaacattacattaccattgttaccattgcatcggctaaagatgacccagcttaggtagttgtggctaattgtcgatccaactgtgggtgaggaagagtttaggttatagttttcaaagaacaaaatataaagttattgtctgacaaggcaaataattgtttttttttttcaaaattacttggaggtgatctcttatagaaaatgtagactatacccagatttctccagccttgtgctgataggccttttcacggagcctttcccactggtaattgttctttcctccttggtcagtactcacctcatcactccagcagcctccccgctatctgacaaggaggaagtgaaccccatttctttgctgttccggttctctttctgtatctgtcgaggaggtttctaggctgtctataaaatatggggaaacacatttctaaccctggtacttatggtcatacaagatatgtttgctccctaagtaggagctagaggggagggcaatgtgtctttttacatgatttttagccaaatccagctgttctgatactatgtttctgaatccttttctgactgtaaatactgcctgcagaggtcccggttgacagccttttctgagactggtcctcagccatgctccttgccagctgttggcacattgtacatagatgcgtcgagtgtttcaatgatgttggttttctaaatgctattctctaacacattttttgaaaaaaaaaatgtctttgttgttctggactttgtgtgttcgttttacaaaaacatttcctaagatttaacaccaggaaaaaatattttaaaatacactggtgctaattggaaaagaagaaaatttttaacttcaagatttacaaaagaaaatgatcacagcagttaactgcactttcccacggggatggctgctgtccacttacaatgggcatcaagaggaccagcaaaagtttacagtagtgatgacccattgatgtgtcatagagcaaggagtccttgtcccccagagaggaggatttgctgggtagtcctcaaagcatgtagtagagaagggatatagagttaactctttagaaatagtcttctggtccttggactttcatgttctgtaatgcttagctgtaacaatgaatatggtgttgccaatctagtctgacttcattgtcaacctgtactgactctgtgtatggctctgtccttggcttgcactggcacaaaccaagccagaacacaagtctttcagaaagaccattctgatttctatgatgttcacacacatgaatttagatgcacttgtaactggttaattaccatgaagtaagtctaacttccacttaataaaagtttttttgtgtatctgcttctatctgggagccattcatttatgtaaagcttaacattcatatcaagggttgttgtattggtgatttgtttagttttccagaagaatgtctaaaacagcctgaggggggggttatttggctcatagttcatacaaatgcacactccctgtgctcagcctgctgtcccactgaaccactgcctgtgaccctgtgctaggaaaacaatatctagtgtgcattctggttctaagccagctggtcttcctctgcagagacctgctatccactagaactcactatgtccaccttcaaaatcacagatgctcttccacttctgttcagctgttaggtctcctgttacacatagacacacaccaaaccacaccaggaaagcttggtgctactttcgtagccaacaagtagaggtttctttgttctgagccatagcatagtgcaggccactttgatgccagctctactttgtcattcatgctcaggcctcatgctcctggcctttgacttagtgcctgtgttttagccacaaggacacataagaacattggtgttggtgaacagtgctcaaactacctatatggcctccagggcctcccagggctccaggatgctctccagggcagatggcagctgcaggaggctggaaagccttaatgtacaggaagcaggaaaaactagggagggtctaagctacaagtaaacacctacaaagtggtatgaaatcatacatccagccctttatagctaggggttctgcacaagaattcaaccaaccacaggttggaaatttctgaagtgggggagtcattttggtactgagcatacaaatttttcttgttatttctccttataaatagaataactattcagataccatctacattagatactgtagataatcttgaggtggttggaagtattccaggagatgtgtgtaggtcacgtgaaatactacatgacttaatggaaaggacataaggataaggatctgtgtgctcagggggtccctagaaccagcccccccccccagtgagtcagaggagcagttgtatttgctgtctccgtgggtactgtagtgaactcataggaacataacaaattctgctaatgcagactttaaagcagctgagcgtcaagaaggcccatgccagccttttctcgggggtgcaggctaactcctcgctgtggccaccatgttgctgcattactaagtgagctgcacaattttaaatgaataaacaggttgtgtattctttcaatctgccattccctggcccaagccaaacgcacagaagtgggcatttgaagactgacacagacatctgttggctctcaggactttgactgttctttagaatatgtacattctcagaatcaccaagtaccaatgactatcacttacatagcaattatctaacacatgagacaaaacgtagaattacatacaccatttttatgtagaaatgttttgtacatagaaaggatttaataagtggggaaaatgaatgcttctaaatgaaataaatttcagcattggtcatctgtgctattaaaagagagtagagaggctaggctggctttaggatataacacactttcaagagtggagtctgggtgtcctggtaaatggtcctccagctctagctgcacagcatgtagctatagttttaaagctgaaggagagtgagtgagatgctgagagtaaaagcaggcccttctaccttgaccccatcaccctgtcagcctgctggtgctttcaacccgtgtaactgctgcttgagtagatggcatcactttcaatttaattccaggtaagtattgctgggccagcaaacagcagcccctaagaacctaacagtatcaagtatggggcccacaggcacaggtagaattggtgaatgccctctgtgagaaagggaccatctgctgctctgaacagcatagagtgctttccaggcatcaagacactggcctaatggctgactcctgagtctgttcccccaaaggatgctactacaccctgggacctgaaaacaaccagctgttctcaccaccaagtaaaatcccacactagccacaaaacctagatcaaatccttcaagcagccgcagtcagcgggtctggccttaactcttaatgccactacagcctgtggggtgcagtccattcatttccctggctgactgcactgtcatgccaaggccatcacaaggaaacatgccaagtcaagtattgtaatatggctcatttcaggcctcgttagcagtggttagagatgtggggagcctactgcacgcatgcagctggcagtgtggaataaccctgctcagatacaattaagcacacacaactagggcgttggccagaaggatgaatgactttggaggaaccaaagtcaggcacatgtctggaaccaagggtaagatgccttgggaaacagatgggctttcagcgctatcttccatgactttgggctttccaaccttataggccttcagatcaggacaccataatgccaagagacacgctaaagatctcctgaactccaaatgtcttttttttttttttttcacctcatctggagatgcagaccaattttccgcagtgatgagggccaatgccctgccgtacttctttcttagcctgttgactctagggaccaaggtggccagggtgacgtcttagcttccaaaccagttggatgtttattgtgtctcttgccagaaacacttcctgctctgagtcaaggcttctaagccagccacaagtccataagacaggaagccaaaatttttgcttatgggaactgggcatagtagcatttaattccacactcaggaggcagaagcaggcctcttgagtttgaggccagcctgatctgcatagttccaggacagcctgagctgcacagagaaactctgtcttaaaaaacttatattaacaacaacagtaataatagcagctaatgggtcactagaagtgatagtgaatggtaccattctcctcttgattcctaaaccttcaaatcctggctaccagagaagccatattctacattgattcagagcacatctagccttctgcagagctctgccctagcctgcaggctgttgccacctagttggcatagaaactgcattataaaaaggtcactcgactgttctgtcaaaccaactgcttcaggctggtgggaacgtggcaagaccagtgaatccatgagcgtgaactcactgctgtccttccctggctgagcggtgagttcctttgtcagaagcaatgccgtgtagattaccatagtgatggaaaagacatttaatgagttcatcgatggcagtcctggtggaagcattgggtcagaaaagcaaatctataaccaaaataagtgttccagtaaggacaaagcattgacctttccacgatggaaagaatctgatgtgttcagtttaccatgagtcactggctggtggctccatagataatgatgtattaggagctctgtgttggtatttgccattggcagatctggtactcagcaaccacaacagccagcccagccttgtgcggaagtcatttatttccttttctcagataaacaaatgttttaacaaagaggtctgtgatggatgctacatcctcatttggtccaatcatcataatataatcagacctgtgttataccttgtggaagaagcaggtgatcaagacccctgaggactaagttatgatactgtagtagagaaataatagatgtcttaggtaggtcagtagagtaatgtgtctacaccacatccaccctccatgcccagcctggccagcacactctgctctggcccagcttggtgagtccaccctgggagcgataagcctgctccctccttcatcctaacgctcagatggagcccgaaccccacacccagggctggctcagtctgaaggcctttgcctgtggtttcccaacctccatgatacaaacaggctaaaagaattcatatccaccaagccagtcctacagagaaaattagaaacgatacatcagacagaagagagaagtgaacatggccaagagactctagaaagaaaatgagtggaactataattactaaaccataggatgcaaacaccaacactctacacacacttgtcaataataacaaatattagaggccccaattgtccaatcaaaagtcaaaggcagattaaacattaactttatcttactgttgtctacaagaaactcggctttaaagattggcagcgtcttaatttggcagctcttaacctgtgggtcatgattcctttggaagttgaatgatgttttcacaggaatcgcctaagaccattagaaagcacagatatttccattacaattcataacagaagcaaaattacagctatatagtagcaacaaaaataatttcacggttggaggtgttaggggattgtagcattaggaaggttaagaaacactgtcttaagaaaagacatgcaaaaaagtattctaagcaaataggaacatgaaacaagcaggcactgctatcctaacaatgacaagacagacttcaaactaaaactaagatatacataggacacttcattctaatcgagggaacaattaactatgaagacattataatcctaggtgtgtgtgtgtgtgtacatatgtgtccaattttataaaagtacactactggaactaatgatacagatgtgcatcaacccaataacattaaatggatctggcagataggaacagaatatccattcaaacaccaaaaattatcgattctaccaatggcctagggaaatgtctctgaaaacagactacatcctggaacacaaaacaaatcttgccaaattcataaaattacagtgattccatgtgatcacacagatccttacctccaaattgccttcctcccattcctccctatcccagcccccaactctgtctggcatcccctgggagcccacagcacaaggcagggaaacggaggctgacttctccctttaccccctcctctttcctaacttaatcctctgcatcatccccagctctgggcctggctgggcctcattctctgcccccatccccaggggactaagcagatcttggtagaacaccctgctttccttccccctgtggagtccttcagtcacccagactcctagcccttccccattactgcatgtcagctcccactatctagaatcatattttacccagaactcctttggccacacatatcagaatcctagaatttcataccaggccacatacacatcattccctcctaagaagcagagagagcaacagaaacctaggacccaaacatccacttacccaacaaagacaagaccagacatcagcaccaggaattacagtcttcccaagcccagatgactagataccactgtaaacatgcaatcaatataagccaggacagtatatctccactagagcctaacaaccctaccagagagttgcaacatagctgaaacacaaagcaaagaccttaaagtagcctttatgaatagcagaggagtccttaaagaaaaaaaaaatcgctcaaagaaatctatgaaaacacaaacattggaagaaaatgaatgaaccggttcaagtcctaaaagtagaaatagattcaataatgaaaacctaaacagatggaaatctggaaatgaaaatttgaggaacttaaacagggacctcagagacaagcctcaccaacagattataagagacaaaagagagactctcagacgttaaagacgtgatagaagattttgaccaaaaatggatactttggacaaagaaaatacaaaatctgaaaaaaaaaatctgccccaaaacatccaggaaatctggacatgataaaaaaaaaaacaacaaaatataagcacatgagacacccaagaaggaagagaaacctgtgtccaacacagaaaatatttttaagtaaaaatggcctgggtggccaggtgtggtggctcacgcctgtaattacagcacttgggaggcagaggcaggtgaatttctgatttcaaggccagcctgttctacagagtgagttccagaacaaccaatactacacagaaaccctgtttcagaaatgaatgaatgaatgaatgaatgaatgaatgaatgaatgaatgaataaataaataaataaataaatggcctaaagaagataactatcaagatgcaagcactatacttaacagcaaacagactagatcagaaaaatttcccttggaacataataatcaaaatactaagcatagaaatctaaaacaccatcagatccttctacaaaaggctatactcaacaaaactggaaaacctggacgacatggacaaatttctagacagataccaggtaccaaagttaaaccaggatcaagttaacgatataaacagtcccatataccctaaagaaatagaagcagtcattaatagtctcccaaccaaaataagctcaggaccagataggtttagtgcagagttctatcagaccttcaaagaatatctaattccagttctgcacaaactattccacaaaatagaagtagaaggtactctacccaactcattctatgaagccacaattactctgatacctaaaccacagaaagatccaacaaagatagagaacttcagaccaatttcccttatgaatatcgatgcaaaaatactgaataaaattctcactatccgaatctaagaacatattaaaacaatcatccatcctgaccaagtaggttttatcccagggatgcagggatggttcaatatacggaaatccatcaacataatccagtatataaacaaactcaaaggcaaaaaccacatgatcatcttgttagatgcggagaaagcattgcacaaaatccaacacccattcatgataaaagtcttggaaagatcaggaattcaaggcccatacctaaacatgataaaagcaatctacagtaaaccagtagccaacatcaaagtatatggtgagaagctggaagcaatccccctaaaatcagggactagacaaggctgcccactttctccctacctattcaacattgtacttgaagtcctagccagagcaatttgacaacaaaaggagatcaaggggatacaaattggaaaggaagaagtcaaaatatcactttttgaagatgatatgatagtatatataagtgaccctaaaaattccaccagagaactcctaaacctgataaacagcttcggtgaagtagctggatataaaattaactcaaacaagtcaatggcctttctctacacaaaggataaacaggctgagaaagaaattagggaaacaacacccttctcaatagtcacaaataatataaaataccttggcatgactctaactaaggaagtgaaagatctgtgtgataagaacttcaagtctctgaagaaagaaattaaagaggatctcagaagatggaaagatctcccatgctcatggattggcaggatcaacattgtaaaaatggctatcttgcccaaagcaatctacagattcaatgcaatccccatcaaaattccaactcaattcttcaacgaattaaaaagaacaatctgcaaattcatctggaataacaaaaaacctaggatagcaaaaactcttctcagggataaaagaacctttggtggaatcaccatgcctgatctaaagctttactacagagcaattgtgataaaaacggcatggtactggtataacgacagacaagtaggccaatggaatagaattgaagacccagagatgaacccacacatgaaacttatagaggagaacttagggaaaagcctcgaagatattggcacagggggaaaattcctgaatagaacagcaatggcttgtgctgtaagatcgagaattgacaaatgggaactcatgaaactgcaaagcttctgtaaggcaaaagacaccgtcaataagacaaaaaggccaccaacagattcggaaaggatctttacctatcctaaatcatatagagggctaatattcgatatatataaagaactcaagaaggtggactccagaaaatcaaataaccccattaaaaaatggggctcagagctaaacaaagaattctcacttgaggattactgaatggctgagaaacacctggaaaaatgttcagcatccttaatcatcagggaaatgcaaatcaaaacaacgctgagattccatctcacaccagtcagaatggctaagattaaaaattcaggtgacagcagatgctggcgaggatgtggagaaagaggaacactcctccactgttggtgggattgcaagcttgtacaaccattctggaaatcagtctggcagtttctcagaaaattggacatggtactactggaggatcccgcaatacttctcctgggcatatatccagaagatgttccaactagtaagaaagaaacatgctccatgtactggctagttttgtgtcaacttgacacagctggagttatcacagagaaaggagcttcagttgaggaaatgcctccatgagatccaactgtaaggcatttcctcaattagtgatcaagagggaaaggccccttgtgggtggtaccatctctgggctggtagtcttgggttctataagagagcaggctgagcaagccaggggaagcaagccagtaaagaacatccctccatggcctctgcatcagctcctgcttcctgacttgcttgagttccagtcctgacttctttggtgatgaacagcaatatggaagtgtaagccaaataaaccctttcctccccaacttgcttcttggtcatgatgtttgtgcaggaatagaaaccctgactaagacaaattggaaccaggagtggggtattcctgtgacaacctgaccatgttttggggaggactgtggaaggactttggaactttgggcttgaagatccattcgctgttaagagctctgtcagatgttgtgtaggagcttagaagataatgttgaaaacagtgcagaagatggaggcctggcttgtgaaatttcagagggaagattaaagactcttttcagggccattgctgttttgattgtgaagattctgtggttctggttagctggggctgaagaatcagctgtgattaacaagataccagaactactaaagcaaaaacttggcattactgggacgattgatgctggttagctggagctaaggaattagtggtgattaagaagagaccagcatcattgaggtgacaccttccaggaagtgttttctgaaagcacagaggctgtgtcccagagatagccaacgttgtaccttgtgctgtggctggacttggtaatatgtaagagtcacccaggtggtactggttttgaaggcatgaaggggtcacgcagagcagctgaggctttggcactgtgagaggccatggaaggccattggtgaaggtgcagcctcagttgaaattgacagcccaggactgaaggggtcatgcagtgttttggagatgccagtaccatgagatgatcaccaagagcagcagcagtggagtacaggcatctggagcctagaggatggcgtgtgtgctacaaagggcatggctggagaagcaacccaaacccttggaggagcccagaagatcataatttggatcccaggcattggactgttggagattgatttttgcttttgattgtgactgtgccctgatattttccctcttgaaggaagaaactattttagtggagcccacagttaagagacttttaattgtaaaaaagactttggattttaaaagagatggacattttaaagagattgaaattttaagaatatgtaaagactgtgggacgtttaaagttatttatatcttgggaatgaataagaatgcaagggctgaggcttactagtgatgagtttgtgtgtcaagttgacaaggggtcaattgtactggctagttttgtgtcaacttgacatagctggagttatcacagaa

SEQ ID NO: 326 - DNA, 13230 bp, Mus musculus
cgcccaggacaccgcggtaggccctgagcgcgcgggcgcagggcccggagaggcgcgcgccggcccgtggttgtcgaggtggtggacggcgacgaggacgacgaggacgctgaggagcgcttcgtgcccctcggacccggccgtgcgcttcccaagggcccctcccgaggcgcggtgaaggtggggagttttaagcgggagatgaccttcacgtttcaatcagaggacttcagacgtgactccagtaagaagccgtctcatcacctgttcccactggccatggaggaagacgtgagaacagcagacaccaaaaaaaccagtcgggtccttgaccaagaaaaagaaactcggtctgtttgtcttcttgagcagaagcggaaagtagtttcttctaatatcgatgtccctcctgcaagaaaatcttcagaggaactggacatggacaaggtgactgcagccatggtattgaccagcttgtcaaccagccctttggtccgaagccctcctgtgcggcctaatgagggtctcagcgggtcctggaaggaaggtgcaccatccagcagcagcagcagtggctactggagctggagcgctccgagtgaccagtccaacccatccacgccctctccaccactgtcagctgacagcttcaagcccttccgcagccccgccccacctgacgatggcattgacgaggcagacgccagcaacctgctcttcgatgagcccattccgaggaagagaaagaactccatgaaggtgatgttcaaatgcctttggaaaagctgtggcaaggtgctgaacacagctgccggcatccagaagcacatccgggctgtccacctcgggcgagttggggagtctgactgcagtgatggggaagaagacttctactacacggagatcaagctcaacacggatgccacggctgaaggcctcaacactgtggccccggtttcaccctcccagtctctggcttcagcccctgcgtttcccatcccagactccagccgaacagaaactccttgtgccaaaacagacactaagctggtgacgccactgagccgctcagcccccaccaccctctacctcgtgcacactgaccatgcttaccaggccacacccccggtgacgattcctggatccgctaagttcacccccaatggcagcagcttcagcatttcctggcagtctcccccagtcactttcactggcgttccggtgtctcctccacatcatcccacagcgggctcaggagagcagagacagcacgcccacacagccctgtcctccccgcccagagggacagtcaccctaaggaagcccagaggagaaggcaaaaagtgccgcaaggtttatgggatggaaaacagggacatgtggtgcaccgcctgccgctggaagaaggcctgccagcggttcattgactgagccattcctgcctctccttccaaaggaagctactcaaggcccagggaaggccctgcctggaatcccaggaatataattccttggtggaattaaagcaaaaaaaaaaacaaaaacaaaaacaaaaacacagcaaaaaatcagcactgcactgctctgagaaccaggcgagagcgccaaggaggaccttccttcgaaggaaaagcccgcttccttagctctcagtctggtcttaaagctggtcttctgtagcagcttagccaaccaggcccatttcacctagagagaaggcacattttgataagctttctgaactctggcattttcgagggtttttgacactgaaaacaatatgcccataagctacacaatatacccataagctacacagtctgaggtagcatttgtataaaggatagtacctaccttgtgaataggcatctctctgtttttccgtgcgactccttggatcagtctgatcatgatgtatttcaaaaaagagtttttctatgtctgttttgttttcaagaaggaccccaagtggaaccattgtaaagatgttagcttggaggccctgagtaacttacataaggccaaaagtgattgacagtgagtgcgagtcacctcagccatcacctgaggtcaggacaccaagaggcactgcagaaagcatctgaaaatcgtccttggatcccatgtgagtggtggcaccactaagtctctgcctgccatggctcagacgagagctggcgctagtagcaatctggtaaaccttgatgctgctttcagggatatcacacacactgcagcctggatagtgtgtcctgcttggttctgccaagaccatagccaggactctgggttagcattctgctctccaaccccgcccaggtagaaaactccagactggcctgcaggtttgcttccagcagagcatagctgtgggaaagatccactagggcatcaagccaacttccattgtgagtgcacttttctagatggcgaggggatggctaggggatgagttagtggactcggtgacgtatatggataatggaacgctaaactttgttgtcttataggaatattgaaactatgaattaagaatttgctcagaaactaacttacaggatgcccaaaggcagatgcatcttggtataggactctctccattgagtagggccaaggcttaggctgggttccagccattggaacctgatgtacttggctgttggaagggtggagcttggagcagctatcaagccttgtaaggacttattctgtctgccctgcttaagagaggagtgtcctgtacctatgcatggtaagagcaccttataggagccactaggtagggatggggaacatggtgtcagcaatatgaatgttaaatgaacttgcacagaggaaaacttaatatatgtttaaagattgtacatagtgcttttttacagagtagagaaggcatgtaggcgtctgagacacctctttgtatataaggggtgtatatggaggctctacagcggaacacccttaactggtgcgttcatgtattttggcaattttattttttaaattcatgtggctttttaccacggaaatcaaggaaaacgggaaagagatgctgatcttttcctttggatacttaaaaggaaaacaaaacacttacttcaagagaaaagagaaagctttctctgatttccctgtaggttgataaccaacatcagccataccacctgttccagatgcttttacctgcaaccaggaaacaactttttgcttttaaagtccagagctagatttctttcccctgggcatgtcctctccttatctcctgtagcctcactccctgaaatggtgttctagctgctccaagaggccctgagcaacgtggagattgagacatcaactgtttggtcaagttcaccatgtgcttaaataacagatggatcctaggctagagggttttctcctcagcaaagctcccttaatttttaaaatctcagatgaagactttaatcaaaacattaaagtgatgtgaaattcaatccaccttctcttgaagaacttggaggtgaaggaatgctgtcgtctgtgtgagagagagcagtccttaggtgctgagctgtcgcccccagaaacacagcctaagggcaggtctgagcccgcttagctgcatattgtcagcacaatcgtgacaccaaatgcacctgacctgagtccctcgttttctcagaaacctccatcgtgccagctcgtgtgcatccccagcccacctagggccctcatctccaggccagccttaggcactgaacatttccttatctggcttccaaggtgcaggcaaatcctgagtgcagctctggacacatgcccattccctgtgtggaagggtgtaatgccagggaccggaagctctgaattgcaacatacagttaactgattatatgagttactttttgtgtgagttacatttcttaagtagttattttgttatttggggacccaaacaaagtgccaaatgaagcctgacttttcatttcatgccatgtccatgaaactaagttctttttgtgtcttcattttgtggagaaacagaaagcatgagagttggtgagctggctgctagcctgaggctctgtgcaccccagggcttccagccctgtctgtcaaaggagcagtgatgtaatgaattcttgtccatggaaatgtctagttcttcttcttccatgatgcccattcttacaaaaaaggtttctcatttctcccggaaaaagcatgtcacagtgactagcaggacattctccagccagctaggaagcaatgtgtgcaacaggcaatagtttccagccttagccttcctggaatatggacacttattttgtgaaaatctgtgagataacgtggagaaacccccaggtagcatatgtgtcaagggggcagtgcgggagacctgcacacccctatcttctgctcatcttcttgggctgctcagctaggactcctccatgtctgctgtagatgtctgacacaagacaggagctgcttcggccaggaactatccatcaggctcacctgccaccttatgtctgggaagttaggttctctggattagcaaaagctagcgccaggaagaagacagtgggtttccaaaccagagtggacctctcgtgcacgttgatagtaccatgtccaggaggctcccttatgaacctcccatgaccaagctataaaggacgatcatctctagagaaaaacattactgttgagctctccaaaaattccttcagacttcatgtatgttggaaaaattatttgaagccaaattgttccccattgcaattgaagatgacaagatttggagtctgccatctctggtatccaagaacaagtacgtcacactttgccagaagccctgggcttaaagtgagtagtgagcccctataaaagagtctgtttcatctctcacttcagctgccctgcaagacaaaggtggcattcaccggagaaggttctgagaaaagaggtgagaactgtacatacaagaatctgttgagcatagcagcagaatactgtaaatactactcatttcctcagggagacaaggatgctgtgggaagagatctggagaaccccgagaccaggaggatttttatctcctcaagtcttttcttgtcagaacaagtttttctttatgtaactctccgtgtcatttcaaaacaaatccgtgttcagctggacaggcagacgacttccatgaggtgtggcagagggactgtctgttcgtagctgccctaaagctgattgaggtttgagccacaggtgaagagcctgctgggcatccatagacatggtgaggcttcctctgaatgtaattgggaacaaaaagccttgctgttccttgttgtagttcctcagtctggatgctgtttattatacacagcatcctctaagggaggaaaagctggccacgacgtgtggtttgctttagtggcatgttcaggagcacactgccatggactctggtggacaaggtgctgtctttgctcttgtccgtaggatttccaccacccacatcagctgtggcattgacctgtgtgaatatgtgcggatgagtggagccagcatggcccgtcagtatgacagcgttgggagcgtgggtcattttgaagggcatgttaggcatatgagtcaactgacaattctatttctgtaagaaagaaacctaccagcagcacacaggtgccaccaatcctcccacgtggagggatttctccatgttacgatttcatcctgtattttctgcattgtaagtagccacaggggaagttagtaaataagatgaggttagcacttttaggtaccagttgtcctgagtaactgtactccaacagagcaaggacatatgaaatgtactcaagacttgcttctggtgacagacttggaaaaggcccatttccaatgacacacatgctttaaagagtgtacctatcacaggaccaggaatcaaaacgggaattttatctcctgtcctgttttgtaagtagcttttttttcctaagacaatctcatgttttataacttgttgtgtgtgtctgagaatcataatggtaatgtgttatggtaaatgtaatcttaaatacaataataattacaacttaaatttccaaatgaaagaaatacactgcttaggcttctgcaagagacatgacacttttataataagcattagtacttctcaagtttaacagaactggaaatattttacaagataccgcgttttgtaatcacagagaacatgaacactttgtgggaaatgaccttggttttatacattgtagcttattttttaaaatgcagtattttaaccggcaggaagtgtagatatggcacacagttcctgtccctcaatccaagggctatgcctcttttaagcaagtgttttgatgcgtatcttttcaattaaccctctgagcaagggtagaaatggagaccagatagcaaggtcatttgcaagagaatcaatgaagcagcaactattccctcatgaccagtgtgtattcaaagcatctttgtgggggcagggggcatgtcacatgaagattcaccttctatattttaaacccaagaaaagatgctagcacataggcttctaggccaaggaagaaatatccctttagtgtggtatgagttttcttatgagttttcacctatcagaactacatgcctgcattttataagcaagcgtcatttggtggcactgtctaaaactgtagtatatatgcccaaagaacctttaaacggtcagcagtgtttgtgattttgttgttcttaccaccgccaactgagaaacttcctcatcaggaccgtttgacttttgtttgtttttcactatggaaaactcacaggcacagaaggttgtgagcagaaaaatgacagaattcccatgggacgtaagaaatgggagccacatacacagtgtgagcactgccaaggctattttaagctgtcccacatcaacaagcccactcgctgttaagaaaacatcttcccaagagtttattgactcaaaaagctaggccagttagccacgtatgcgacagtttcagagtagaagctgaggtggggcagctgtgtacctgccaggtaactgtaccagttactgagaggccattctagcttttctagccgtatcttccatgtacggctgacagtctgttagacgggaactataaaggcattgtatgagggaacagggggttgtgcagccttgcacccagtgcctgagtgggctggcttgcagctagctcgccattgccatcccctaggatagtaccactgatggatggcattcgggtgcccagcaggttttcactgccacatggttttgaactatgtgcgacttactccacctgtgcgtggaggcttccttccagagactgtgtgcgcatttagacactttagaacagctggaaaaggactgcagatgttcagggcgtgtcaggaccaacaacggtgttggactagacaactgacatctaccgaacaggaaggaccctcactcagcttttgacaatcaggccaggttgccagatccaaactggagacatggcaccacccgacaattcagtgttgaccactaacatacgttctcagccaatcctgcagaccaagaaaagctgtgtgggggcagaggcatcctgtggccacagtatcagctatggcaaacttccacacttgtgagctaacaggcccagattcctccatgagcatcttagactcatgtgctgccacgatctgaacagcagacatttcaaaagagggaagacactattcctccctagaggatatcctcatggaagacaaaaatagaaatgtcatctcttcagcttagcattgctcctgatcagaatgcactaagttgtcacccggctcttgcaagagctgcctcctgccatacccaggccacaccccaaagtactgaatagctgtaaccctgatactgtgtctgctaccgtgaccactgtgatgaagggcagagggagggaggaaggaagggaaagagggaggcaggaaggaaggaaggaagggaggaaggaaggaaggaagggaggaagggggacaaagtaatcgggagcctttgatttggcagccgggtaccctggtgctttacagtagcacatggcccctcccatgccagcgccctctgcctacgctttgtgctccctagcttcctaggccatctctctccttgtcccactataaatgtatatataatttcacctctgatctggtaaggcccctgcttcagaactagcaggcacttaggtgttttcaggagtccattcaccttaaaggaagtttttccacacaggcaacctcagtctctttctcgcagggtgaaataaaactgagaataactttgtcacatgagtggagggctacacacattagactttcattgttctgagaaagtacattattttaaactcttgtcttctattgaagtctattgaagttctgatgtcacagggagagttctgtatggtaaagtatgtgtcattcagacattacttcctttgatcttcatatgaatctagtatagaaaacaagtcctaaggccactaatagccatgccaagacactggctcaaacctatgagtcagcaccgtcattacctgcagagagagacctggcccagctggcctccgctgtgactcagccgtggattccctgggcccaccatgttctcagcccagaagtaaagagcaccctcattcatgtcactaagtgcaagtttaatcatccccaagttccgtccagtgaaatggtaaagtgtaggaggagtttgttagctaaagcaatattctgataaaaatgttgacttcttaggaaaaaatagcttgcttctggcctctggcctttcagactctaactttaagctgatgctggatggtggttaacaaccagctcagaattaccatgtgtagagacgactcaaaacgacctgcaagcatgctgcagtgcctaggtcagttaagttgtatgtgtctgaatgcagtttctgctggcaagctttgacattgctcccactgtggatgatgataaggctgtccagtatatgaatacactccatccaaggcttccagggtgtcaggtgagcatcctgagttcagaggaaagctctcacaagaaatcctgtcataagaccagaaggaacccccagacagctagactggccagttccctagctgatgagcagggaggcagttagtttgcccctttctcctctgacaaaaggcagtgggctgtatggtttggctgcctgtgcttggctggcagtgcacagaaagggcctagtgttagcaagggaaaaaacaaagcgcataccagatactgaaggattgggttagagtcaaatagtagttggttctttttaaaaatgttccttttcagtggggattgctgcactgtgaccctccgaggagaacaccctttgatgtgacaaggccacctgagcgatccctaagactgattaactacttcactttctattacaatcagtcttcccaaaatgttcattcagaaaatagccaaagcagagcatggcagcccctagaaaggacaagaaagggattactaaagaacggaatcgagccggacgtggtgacgcacacctttaatcccaacacttgggaagcagaggccagcctggtctacaaagtgagttccaggacagccagggctacacagaaaaaccctgtctcaaaaaaccaaaaaaaaaaaagaaaaaaaagaacagaactgttggggaaacacagctgtctcctgttttgtctctatctgtgactggaaacagaaaccaacactctggagaagacataactttaagtgagagtctgaaagaagactccccatctagtgccatctgagcagatagttgggtagacactttctttcccttcttgattctcatctcctaacccggaagccaaatgtgtttgttgccagatccagagacagctattattgttacttggttgctgaatgcttgctctgaagtcaacaccccagtacatggatgcttccctctagacactcattctgctcagcgagtggctaccctccctgcaagagaaagccgttctctgtctgagcagatgtagtctctgggctatgaggacagggtctgcattggcaccaccctgccacactcagcccacggcaaagcagcagctactcacgtccatgtgccttaagacactcagtgtggtcacctagccagagctagagtcagcaagacaggatgctgtgttagggtggaagagaatccaagagggctcagactaaatccttccaggctctgtcccctccctgccgccctgctcaaggattcaaggggatgggattggccttctccacgtggcgatggagtttagttgctcctgttatatatctctggaaagcaaacactgcttccatttgcttacctgtcaaacattcattccttggcccaggacaggctcatccctcatttcaggcacagacagcaagacagagtggacagagggctccctgagggcttgtgattgtttgtgggtttgagctgcccctcagggatctgtccctgcatgggggaaggatgcctaatgtggcagattgcactcagagagagggataacttttaggcccttactctatatccttactggaagtatgtggctgtgacatggcataccagcaggagctgatcacagggagaaagcttcaggtgaaacctagatgtttgagaaaacacgtcacactcctaaagcatgctatttccatggcttccaaaactaaaagcacctgtggctcagctagcgcatgaacatgccagtagtcacggtttcctatcgtgcaccctgaaatccctatttttgtaatttatgattagactgtggtcagtcacttaaataaacactcttatgaattaactagtataccctagtatagtttccaaaatatatcatactgtatagccctatgtgcatgaagatctcagggggaggaagtacacgctaggtcccaaagggtccagactatcatcaaaagcgcatgccaagtggcctgaggccactgctcatacacgagggggcgggggaggggatatgggctgcagcccctcagctgcccttagtggtgggaatcagcatggtcgctgttaaaggtaagccatcttttgaatttttcaacaccaaatcttaaagtatcaaaaaaagttaccgaatgttaaaagtggggtcgttagtggaaatgttgtctgtaggaagtttttctcatagtgtttgataaaaacaacaaaagccaaactgaagcccaagaagtgtcctctgggggacactggcattagggtggtcgatgactgaaggatacagcagtgctgtcctgtacacagagctcttttgaggtacaatctttccatcgtttcaggggtaagtacttccttacaaagtctttaataatgaatgaatgtataaatttataaactatgcattttcagagagaaacatgtattttgtatcaaatccgagtacttttttttttcatagagatttatcacaactacagattattcaaaataaatgagaatgccaatcctcataagggtgtggggtgcctttgtttttcactctgatggtttcaagaccatgcatccagactttgatctgaaaagctagccagtacagtaggcgaaggatgattcgccttctcctggaggggaccactcgcacaccacccagttcttagggatggataatttagtaacactgggttagcggatagaagggccagggtgtggcttacagatagagccctggcctcacgtgtgtgaaggcctgggttcagtctccagtacccaagtagtaacaataagcaggcaggcaacgctgttaccatagtaacattacattaccattgttaccattgcatcggctaaagatgacccagcttaggtagttgtggctaattgtcgatccaactgtgggtgaggaagagtttaggttatagttttcaaagaacaaaatataaagttattgtctgacaaggcaaataattgtttttttttttcaaaattacttggaggtgatctcttatagaaaatgtagactatacccagatttctccagccttgtgctgataggccttttcacggagcctttcccactggtaattgttctttcctccttggtcagtactcacctcatcactccagcagcctccccgctatctgacaaggaggaagtgaaccccatttctttgctgttccggttctctttctgtatctgtcgaggaggtttctaggctgtctataaaatatggggaaacacatttctaaccctggtacttatggtcatacaagatatgtttgctccctaagtaggagctagaggggagggcaatgtgtctttttacatgatttttagccaaatccagctgttctgatactatgtttctgaatccttttctgactgtaaatactgcctgcagaggtcccggttgacagccttttctgagactggtcctcagccatgctccttgccagctgttggcacattgtacatagatgcgtcgagtgtttcaatgatgttggttttctaaatgctattctctaacacattttttgaaaaaaaaaatgtctttgttgttctggactttgtgtgttcgttttacaaaaacatttcctaagatttaacaccaggaaaaaatattttaaaatacactggtgctaattggaaaagaagaaaatttttaacttcaagatttacaaaagaaaatgatcacagcagttaactgcactttcccacggggatggctgctgtccacttacaatgggcatcaagaggaccagcaaaagtttacagtagtgatgacccattgatgtgtcatagagcaaggagtccttgtcccccagagaggaggatttgctgggtagtcctcaaagcatgtagtagagaagggatatagagttaactctttagaaatagtcttctggtccttggactttcatgttctgtaatgcttagctgtaacaatgaatatggtgttgccaatctagtctgacttcattgtcaacctgtactgactctgtgtatggctctgtccttggcttgcactggcacaaaccaagccagaacacaagtctttcagaaagaccattctgatttctatgatgttcacacacatgaatttagatgcacttgtaactggttaattaccatgaagtaagtctaacttccacttaataaaagtttttttgtg

SEQ ID NO: 327 - protein, 461 aa, Mus musculus
RRRARRGARRPVVVEVVDGDEDDEDAEERFVPLGPGRALPKGPSRGAVKVGSFKREMTFTFQSEDFRRDSSKKPSHHLFPLAMEEDVRTADTKKTSRVLDQEKETRSVCLLEQKRKVVSSNIDVPPARKSSEELDMDKVTAAMVLTSLSTSPLVRSPPVRPNEGLSGSWKEGAPSSSSSSGYWSWSAPSDQSNPSTPSPPLSADSFKPFRSPAPPDDGIDEADNLLFDEPIPRKRKNSMKVMFKCLWKSCGKVLNTAAGIQKHIRAVHLGRVGESDCSDGEEDFYYTEIKLNTDATAEQTVAPVSPSQSLASAPAFPIPDSSRTETPCAKTDTKLVTPLSRSAPTTLYLVHTDHAYQATPPVTIPGSAKFTPNGSSFSISWQSPPVTFTGVPVSPPHHPTAGSGEQRQHAHTALSSPPRGTVTLRKPRGEGKKCRKVYGMENRDMWCTACRWKKACQRFID

SEQ ID NO: 328 - DNA, 66315 bp, Homo sapiens
  misc_feature (1)...(66315): n = A,T,C or G
cagactgaatagtatcgctgcatggaggggcagtgtccctcttaatctaatactttgaggttgaaatgagactttactaaaaacagctgaatagcctgcctcccatttcctccctttccttaaattttccattttcactcatttcttaaatacagattgatcaccttactcccgggttcatgaatgttccatggatgcgctttgcttataggaatacaacaaaccactcatcctggcacacacacccccatagtctggctcaggctctgctctccttttccaccacatccctcacgtaggacccttgagtagtctcccagtaagcccagggctcaccggcttcccttccttgatgtgtttctcccatcttgaaatcctgttcatccacagaagccaggtcagcttcaggaacaaatcatgtatagagtgacaacgaatacttctgttacagattgagtatctctcattccaaaatctgaaatctgaagcactccaaagcccaaaactttttgagcaccaacgtgacaccacaaatggaaaagtccacacctgacctcatgcagcaagtcacagtcacacaacacacagtttgttcagcgtcccctagggtaaaataaacttacctcaggctacgtgggtaaggtgtatatgaaacataaatcaattttgtgtttaggcttgcgtcccatccccaatatcttacattatatatatgcaaatatttcaaaatcaaagaaatctggccgggcgcattggctcacgcctgtaatcccagcacttcaggaggctaaggcaggtagatcacctgaggtcaggagtttgagaccagcgtggtcaacatggtgaaaccccgtctctactgaaaatacaaaaatcagctgagggtggtgacacatgcctgtaatcccagctactcgggaggctgaagcagaagaatcgcttgaacccgggaggtggaggttgcagtgaggcaagataacaccactgcactccagcctgggtgacagagcaagactccatctcaaaacaaaacaaaaaaaatctgaaatccaaaacacttctggtctcaaacattctggataaggaatactcaacctgtatttttaaataattccaaatttaagtcccatactattcaagtatggctggaggaaagattaattgaaaaggtaaaagcctttagcaaacatgagtcttaaggttttaagttgtagattgaaattcaaattaggagagaatatttaatatcacctctagtggtttgttttttatcaataactccaaatctaccagaagggctttgcagcagttttctcaaagtgtaacaaattctactttgtatatcatctcttcatgtttaattataaggatttgaatttacagtaccagttaatcagtaattagatagtagtgtaccaaaagaaattaaacaaagataaaaacaaaaacacaacttagcacaaggccatatcatctggtaatgtttcatgtagcatgattaaaatattccctgagaaatgcaggttaactgagtcattgtgatgtattcctttgactttgttgttgttgttagtgatttccagtgccagcaggaaacttaaaggtaatccaaatccaaaaacactctgattatactaattattccttttttcattcttcattgtaaatctctttatgatgctcaataattattttgaaatgtggtagattttcgcaatgcaaaataaatgtatattttataatgatgcattctgtattgattgtcatattttaaaaaacacataaatcagtatttgagttaattatcaattagacctctaaagcaaaatgttcaccttaggtgtggaaaatcaaaaaagatacaaagcagattgagagaggggcaaaaaggtccctgaaaccaagatgtagaagacggaaaaaggttgtttagcaagtcattgtaagaatcaggggagggggcgaggggaccctctccttaccaaatcatgtcatccacctataccaggtgcacgggcctcctatcctggttcttaaacctttggttagtaagggaataaaagtggactggccgttggaaagagaagtcaacagccctcctaattcagtcttggaagagatgtgggcagcagccagctcaggtgtgccccactctgggtgatcctggagctgggctctgggaagggcagacagttggaggagccccaaggtagattagtggatatgcagcaagccccaacttatcccttctgtgaccagcgttacatgggcagattgagccaacaaaacactcagaattacctgaaggtgctttgcattctttccctggtgccatttcaagaggctttgtctgttttaagaaaatggctttacctttactcccaagtacagggatcttgtaaactgtgaatactgtaaaatctttaaatggtatgccaaatgaatgaacagttttttttgcctctaagtgtatgaggttgtcttgaaaactttgtatggagtggatttcattgtgcactcttaagcttgttttacagaagtattttaattgtcagcctctgaaacaagtaatttgtcttttgatagaagaatttgctaaaaaagagcataaggtgctttgagaagaattattgaagaaaatttcaaagatttccatctgttggtaccttggattgaaagaataggctttgtttaacaatttagtatcatgggtggacatcagagagccaaactgtaacaatttttgtaacttcatgatgaaattaattgagcagccccccaataattgggaaccatttgtttttttctccaatttaagaatttctcttcccactgttttgtgaagcagtgctatgaagtttctatctctaagagttcattgcttttacaaattagacagcacacctgtgaatgaaagccacatttgtcaaagtgacaattcatttgtggatatggcttattaatcctctgttgggcttcttcaactgttctctaatttgaaaatgttcgtctctcaggaggtggtacaatttatttgatttcatcgtacgacacaaacttttgcctctcaattttacctcctttattgaaataagcttaaacaagttgactccggtcaccatgatcataatcttatgaacctttattcagggttaactggccaaaattaatgaaccagagcaacctcttcatctcagtgaatgattaccagtggctcttcactttaacaacatggtaactattcccatgacctactctttctatagtaagtagttttaaaaaatttttttaaagctcaggagttcaaacacccctagttgcatttctcctccagcctctcccatctcagtaaatggctctagttagtgcttcagccaacacctgacagccttcctcgctcccttttgctcatctcccatgtccaagtgcatcagccagtcctgctgggtctcctgccactgtccccaccctagtccaagctcgcctggactcctagcagtcatctcctaagtggcctccctccttctattctaccttctctaagatccattctccatatagcagctcagctaattatattacaaatattcatcatattacttcactaggcctgcttaaagcctcccagggacttcccatttcacttagaataaaattaaaacaccttccatggccactggaccccgtctgactagctctgcaccgctctccccttctcacactctaggatcagcctttaaacattcccgcacattcctgctgccatgcctttctgcaggctgctgcctctgcttgggatgtacttccctgcccctcaggacagactctccctgaccttcacagttcacctcagacgtcactgcctcagagaaacatctgatcaccttagatgcagcccctacaggcaggcactgtcacgttagcctgtttatgcgcttcatagcccttgtcactatcagaaatgactttgttcctcctagcttgtttgtttcctgataagtgtgttgcttcccaccgtcctctaggctccatgaaagcaagaaccttgtctgctgttcacctcatatcactcgtggctagaacagagtctagcccacagcacactctcaatgaacagttgttagatgaagtatggatgatggaatccttgtcttcctaatactgtatgactttgactgaaacacttcacttcatgggcttcagcttcctcatctataaaataaagctaacagaacatcggttgttcatggggataagttaatggagtaaatgcgtgacagcgtgtcacaccttgtgtggcccacagcagatgcagagtgaacagtcaccagtgtcccttcctgttttacaggaaatcttcagaggaactagacatggacaaggtgacagcagcaatggtactaaccagcttgtcgactagccctttggttcgaagtcctcccgtgcggccgaacggtaagcccaggatatgggacttagggaagggccccttgacaccaagagcagggcctttctttgagatgtctcattcctgtcaagcgctatgaaccactgaccctcacccattagcaggaagcaaagagaaacgtggaagaagtcgaggcccccagagctgtcagccccctcttcatcttcccagggagcccactgcttctcattcacccatccctccattcaactcacttttattgagctcctttgttttctgccttgccaggacgtctttgcagtacttgtgtcccttttttcccaggtaaatgaagattgagctaatgaattattttccctagcattatttctgtttgactggggaggcagttggatcaaagaactctcagattaaataatttttaaaaacattttctcagactccttaatcaaatagaattatttaggtcattcatttattccacacacatttatcaggtaccatgctagatgaattgaatacctcattgaaaaagtatccacactcccaggtagtatactatctctttggggaagaaagaccatcaatcatagccatattagtggctagcatttattaagcattactatgtgtcagtaaacaaatactatgcttgccttatcgcctgtaattcccacaacaattctatgaggtattattatcactattttacagatgagtaaactaaggctcacagagattaactggcagaactgaaattctccatatctttttgattccagatttattctcttaatcatgatatgattttgtctcatataatccaatacaataaataaggaggtcaggcagtaggaggtgaagttggagagactgggagacctatcaggaggggtcatttatgcctggctaggagtttggactttatgctgaggctatgggagcactattaaagtgattctagcactgcaaagttatgattaggtttatcagccaaaggaaaaaaaaagatcttggtggtcacagtgcaggtagatacgacataatcgagaaatgtgaagaatgcagaatcaagagtttggtgctggacagagagagtgagcaggagggtgtgtcaaggatgacttccaggcagttggtgtgcttcagcaaggggaggacattcactggggcaggtgacagacgcacaggaagagatgtattggcaaatgtttggttcaagagctgaagttgctgaagaagacaataggaaacatgtttaataggcagtgcctgaggatcattcaaggggcaacatctggtagagatttgggcacatcttgggagagagatctgggctgaaggtacagaattagaaggcaacatttggaagccatgagagtagatgagatcatcatgagagagttatgtaaaagcagagtgagaagagaagatggccgaggaaggaagcagtgaagctcaccatcatgcaagggattggcagtgggaaaagagccgaggaagaccctgaggtgaccagagaggtagaggaagaccaggagagtgtggtttcatggaaaccaagggaaaagcatgttttaaggagaagtgtctgatgcttcagaaggtcacgcattaaaaagactgagttttccatcaagaaggtggtcactggtggctttgtcaagagcactccccaagggagaaagccagttgcagattgcagttcactgaaatgtaatgcactgagaccactgaatgagacttaggatcaatgaaaaccttctctcaaaaaccagcatggtcaatgatgagattaagatatggttcacacacaatttggttttaagcatgaggtgttaaaataaatttgttgaacatacattgaggccttaccaaaacttactccaacctcattataagagggaaagaatgattaagatgctaggaattcaaattaatgtcatgaatcagtattgcccaacaacatcatgattcatcaagctgggataacacttcctctttttttttttttttaatttgagatggagtctcgctctgtcacccaggctggagtgcagtggcactatcttggctcactgcaactgccgcctcctgggttcaagtgattctcatgcctcagtctcccaagtagctgagattactggcatgtgccaccacacccaggtaatttttgtatttttagtagagacagggtttcaccatgttggtcaggctggtcccgaactcctgacatcaggtgatccgcctgccttggcctcccaaagtgttgggattacaggtgggagccaccatacctagccgacacctcctctttatatagcagtagaaaagttgctcttgaaatgggcctgactactcccattcagtgacctgactgctcttctggggggtctctggcaaatgggtactctgatttacctttctcactttggcagtgctaaagaaggattatagtaaaggcaaaactatagtcaggtatggtaacacgcctgtagtcccggcctaggattttggggttgcattgagcttatggtgccactgcacttcagcctgagtgacagagcaagactccaactctaaaaaataaaaaattttaaaaccctggaaaacccccaagacatattctagggaaaaggaattgtagaatttcatggaatccttcgaggaaaaagaaaagtgtattttaaagtaatcattatttttaccattggcttcattttttaattgagaacatttttagtgttcctttgtacttaaaggtcagaattaaaataaaccttttggctcttcaatgcaaactttcgttagcacagtaataaagtaattcagtgctcatttatggtttaaaaactaactactcaactaataaccccaaattgtctgctgtctctcatttagtctgtaagaaaaagcaaattcttaaataggggaagcaatttattataatgaaggctttttttttttttaggaaaaaaagattttctctagaattattgcacatcaatgagtttttggaaactgttgtgatcattttctgtgcctaaaaaggatcattctatcaggaagtgagtctgcaaagagggtgagagtccagcagtgcctgtctccattcttgacaaacagaggtttaatataaggaggctctgtcccctaagaatattataaatcagacctgactttttttctgagaaaaatcatttctatatcacttatagtccttctgactaaatagtctttctaaaggaaatgtcattcacaaatcagtaagcaaattcacttttggcattgacatgaagccatgtaaccacactgtaataatagttggttttcaaaataaattcagtgcctcatacttaacatgattatacatctagcaccattagctttattttattttacaaatgcatactacagtatatttgtaagccacccgggcctgccaagggagtttttcacactaagtaaaatcatcaagccttatattatgctcttcttgaactcctgttgtactaaatggagctttcttatttacaataggcaaatctagtctggtgagcgtatcagtctctgtgtagactgcagggagtgagatgctagtttggttttgttgatgctggcaaagcatgagactgcataaatgaccatttcattctaaaagaacctagctgtaatgagatgggtagtttctcctatttcaacttaaagcttcactcctctaacttaactttttgcttgacatagttgaggaatatggtagaaatccataaataggtaaaggtagttatgaaatctccccatgaatgataatctaccatttgtcttcactccattactaattacacagacattaacagtatttttttaatgaggcatttggggatgttttttcctcgtagttagaacatagttttaatatattcaaaatgcacataaatatggaggagaaattatccaaaaaaaagtaaaatttatataaatgctaattaaggtcgtgcatcttgaaaggtaaagcaaatcttcagtgattaaaagagcacccagaagacttttttttttttttttttttttgagacagagtctcactctgttgcccaggctggagtgcagtggcaccatgtcagctcactgcaacctccgcctcccaagttcaagtgatcctcctgcctcagctcccccagtagctgggattacaggcacgcaccaccatgtccagctaatttttgtatttttagtagagacggggtttcgccatataggccaggctggcagaagacattctaactgggcagaaatctctccacattagcaaacatttcataatgctttccaccacaaatgggaaggtaatagccaatagcaatcttagagtaattattgccaataaattcttatcctatcccagctttgccagagagaatggaggttgtttacagcccagggactgcatgcactgaagaaataggtccaacctcttcctggtggcctgggcccatgagggatacttaccagtcatgtagcaagtcactttgcttcctgctgcctcagggtcctcatctataaaactgggataataatccttattctgaaggacagatgttgtgagaatgcttgagactgtgcgaataagctttgtaaaatgtaaaacactcacaaaatgtaaggcattactatttgttgtaataagcagaatggaaaggggctttagataactatccagaaattatttctcttagattcttaagtgttagactaacttcctataaatgtattctaagaataacagtcctataagaaccccccaccccccaactttttttctgaaacaggatctcgctctttcacccaggctagagtgcagtgacccagtcatagctcactgcagcctcaaacccctgggctcaagtaatcctccctcctcagcctccagagtagctgggactataggtgcatgccaccacgccgggctaatcatttcattttttctgtacagacagggtctcactatgtaacccaggctggcctcgaattcctggcctcaagcgatcctcctacctcagcctctcaaaatgctaggataagagaagtgagccactgccctcagctaagaaatccctttttaaaaaaatgttgaaatcggaggggttggggtgagagggaactctgtgaccaaaccattcaggagaatactgcaaatgatatttctttcttagaaatactgtagtcgataaacccagagctccccaaacttagtgaacaagaaaatcttttttttcatataatccccactatgatcccaaggaatttgtgttgcacaatacaaaaacacatcagaaaactcttagaaaaacctattatcatgaggttaaaataattaaatgtttataaactacaatgtggcttttgggagggggcgtataaatagaacaaaaacttacatacccagctgttgcagatgattgagagggctggggtggtttcactggtgtagaaccaaggctcccatttccccactgaaccatgcccgggcacgcaggggtcctggcactgactgtgtttgtgtgcatgcagagagcctcagcggatcctggaaggagggcggctgcgtgccttccagcaccagcagcagcggctactggagctggagcgcccccagcgaccagtccaacccgtccacgccgtcgccgccgctctcggctgacagcttcaagcccttccgcagccccgcgcagccagacgacggcatcgacgaggcggaggccagcaacctgctcttcgacgagcccattcccaggaaaagaaaggttggtggtcagccacgcggtcttctgcattcagtttcctgaaggtgctttctgtcccctctgaagggccggtgtgagcttaaccttggacctacaccccctttctgtggaaagaagcagcttacgttcctctttaatgttcttgaagtttgaatagaaattgttatggtgataatttaaaaatgacaaatactggtaagtttcctgaaggtatatacacacgtatcccatccatcctctggttataaattgctgacctgggacttaccagtatttgtaagttagaaaattggacctcaggcttgcttcggtatgaactcgctctcttcgtgggacttatttttttcatatgtaaaatataattaatatatttttctcttttctcaatcagccctgaagggttattgggaagaatattttgtatctcatttttatgcagtcatctgtgaaatatacataaaagctgagatataaacaaacttccattcttacatcctagagattatatattaactaaataaaaagtgaaaaagggccaggcacagtggctcacacctgtagtcccactgctttgggagacagaggcaggaagattgcttgagaccaggagttggagaccagcctgtgcaacatagcaagaccctgtctctacaaaaaaaaattaaataaaaaaaaaattagctcagtgtagtggcatgcacctgtagtctcatctactcaggaggctgaggtgggaggatcgctttagtccaagagttcaagactgcagtgagctatgatctggccactgcactccagtctgggcaacagagtgagaccctgctgctttaaacaaaacaaaaaggagtagaagaaaaaaaagacatctaattaattgatttagcaaattaattgattacacatttgtttaatcctcccagcagtcctatatggtaagttttgcatttccatcttgttatgaggaaactgaggatcagagagattgattgtacatttaactggcccctgtcaggcaggttagaaagggacagagccaccattcaaacccagatctgcctgagcctcaagttcatattcttttcattctctttaggtacatttcagttatgttcactcataatttttcgaaaacatttccatttcacagaataaaggaaaactaccactatactaccactaaatctgaagacatttggcattatttttaaaatcaccacataaatgtaaaactgttgttatatgtattggtttttaaatgttgtattggtagcttcattatgaatggctgttcacaaacaaaaatccaatacaaagccctgaggactgcagtgcaaacttttttcctcccccaattcatttcaaagaggaaaacaaagagatggcattgatccaacaatgccttccctccctgcatctctcagcatcattccacatgtgtaacagtggaggtgatatgggcactctctctgagtgtgtacatgtgaaaaaggctgacatttttgtccagaaaagaggatattactgtagtcccctgaccttcccagaggcagtggcctgaagagttgctgtttcacaccagtctgtcatgcaaaggggctgaagttgttctggcaccctgtgggtccccagggacactgggtcttcacttgaccagtaggggagagaggctggcacttgtatcagtgggtacctgcaggcaggacagtggtagggacctgaagtcttttcctgttactttgagcttcacagactgtctccctggggttttctgagtgtgtagttcgaacactcaataggcatggcccagggttgtgacaaggactcacggcccagggttgtgacaaggactcacagtacagggaaccccaatgttatttaaggcacattaatgaaagcctgtcatacccttccatttctgatgtagccactgagccaaaattcacactcttccatcacaattagactgcacttgttagcctcatatggaaggtctacaggctttaactaaattaaggtaaagtcaccaaaggaaaaggaaaaaagcttccttttttacattttttatttttttatttttttattatatatatttatttttattggatgagcacaggcccactccagaagaagctggatagtgggaaggaatgaacaaataagaatagtgtttatccttctttctttatgacttctccctctattcagactttagatgtccccaagccgagacgaataggatgctgattgtagccactaatgtttaatgcatggattttacacagaccaagttgttaccttggccttttgaatttaaagttactttgaacagtgaaaataacaagaaggtgaggctgatgctattcttttttaaatttattaggtgaaccaatatttattgagcacgtatcaggcaaaatgcttattgccctgagaataatgcatagttttttccttcaaggtgtcaaaagttgggtggctggaaattgatgtgtaaaaaggcaataattacaagtggtaaatgctgtgttcgtgatgtgacagaacacagtaactgtaatacagttattttagagatttaaaaaatcatgtttcaaaagatttctaagagttaatttgcttaaaccagacaatatgttctgtctagttggtagaactttctgagttcatcttattttcctctcctttccctcagtttcatagtacccatttaaaacccattgtgatagtcacttgttctgtgggtattgtttgagaaccttctagatcagttttttccaactgcacgtctcaatccaccagagggttgtgaatcaatttaatgagtcactctttaatcaataaaacagaatagaatacactgtacataataaggataagtattgtttcttgacaattttgtttcagtgtatacatatgtgtatgtgctgtgcaaaatgtatttcttattgtggctcatgagcaaaaaagtttggaagcttctgttctttgttataaagagataatacaatttgtggtaaattaagatgtcctgattggaaatcaaaagattcacattcttaactctgctaccctgagaacctaagaatatcatttcacctctctgatcatcaacttcttcatctgtaaaacaggcaaacaggtattaacatgcccctctcaggatagttatgaagattaaatgtggtcttaagtgctggaatgtggcaacattttaatagacatttgaggactctaaacaaaaggggagggagcattgcctatatctgactatgaagcaatgatcctgacctttgtcattattatggaagcttccttatctcttctcccacctccccccacacagagatggctcactcccacctcttgtggagatccatgttccacttatgtaaagaagatgacagtgtgtgatacactgcatagacaaggcattctctcttactatcagtagtgaggaggaaatatttgctgataatcactatatttgcttatttagttacagtttaccaaatgcttttaaatgtagcatttcatttcatcatcccccaaatctttggtgtattcttatccccattgtgccaagaggctcattgaggttatgttaactgtccaaggttgtgtagcttataatgtggcagagatcagtttaacttaaatagcagaggaaacgtttgaggccaagttaattcagtgaatccatatttccttcagcccacagaggagaaaaacgtggagagaaaataatcagacatagctacagctatgtggcagggtgggagcaagggtgcagaaagttcagaaagaaatggagagcagagataggaactccaggctgtctgccggagagcttacttcccacatgaagtatccgtcacccataaggaacctgcagccaaggtaggtgagagtgtgagaagggaaatgaaaggcttctctatcctagctctggaggtcagccagccaactttgtcaagcccaggtctagcagaatttttcctctgggatttcaagacagactggcagaacttccaagctcagagaaaaaccaggttgtgtgagccaggactcttgactttggggaggtgcaatttccgtcatgaccacaaggtgatgcagtgaccctaaatacagccattcggggagttcgtgggagaaaatgaattctatggaaggccaaagagttaaccatcaattccacaagaccccaagaaagtcaagaagcgctgatcagaaatgatttgtgtgccctttccatgccagatccctgattctgtcagattctggattctgtgcattccaaaattgtcatgccagctttaggacttacatgacttaagcaagtcacttggcctcttcagcatcagtttcctcatctgtaaaataaggaaaatggtggcaccatattgatgtggctgttgtcaggaatatacgagaggccctgtaaagagcaataaatgttagctgctaatactttgcctttcctcctcccccctcccccaccgccgtttggcaactgcctgaatggggaatttgagaagcataggtgtggagagaagggggtgcttgcctccaccctccaccctgacccacactgaccgtgccaatgccacagtggctcaggataactccagatccctcagccaccctgtgctcaattgggtgtgcattagcccccctgcaatgcactgggtgagtgcagcaaggacagtagcagaaattgggggcataaaaggaaatctgactcaggactctgcatttcagaacattggcagcatctcagaggcaatttctaaatttcagccttcatcatttccatttatttcacaggtatgtgtcttaaccatgaacagttgtacctgtgtactaggaagaacctcaagttagagaagaaagcactgagttaacataaggtgcttcagtaatagttgtacagtagcaaacaattaatcatttgctccactctgtatttttaatcttccagagccaaaaagctatgaatcactttaaattgtgaatggctgctccaagaagaaaacaaacccgtaaaaccctcacgaataagcatgttgccagtctctctgctgacttaattcctaacccactaattttgagcagagagtgcctcttgcaaaaagaacggctgttccagaaatagatccatctgttaaaactgctggggagggcgatgctaagaacagcagcttggatcaactgcatggatttcatggtgatggtacatacagcattgtcagccagggcagggagctgattggcctcatagagaaaattcaggataaagaggagtgatatctaggtaacttagtgacaagatcttagaataacctgccatgcagtatataggctctgggacattggagttcgaaggactttggaaatcttctagcccagtctcaatctttccaagttaaaggactactcagtatgtctagaaatgtccagacgtccccaaagatgagatgcacttttagaattcattgattgaggaagcacagaatgactagggatttctgttaattcagaaatcgttttgttgtttggtgttgctgttatagaaatcatttaaaatcaactttattaggtataattttcacagaataaaatgaacccattttaagtataccatttagtgagttttgactgtctctacctgagtaaccaccactctaaccaaggccagcactcctcatacgccgcttcagtcaaaggcaccaccaagccccagacaggcaaccaaccactggtataactttcatcactatagattaatgctgcctgttgtagaatttcaagtaaatggaattatacagtgtgtatttttagtatacaaaataccaaatgttggcaacaggaactctcatttattgccggtagaaatgtaaaatggtacaaccactttgtaaaacagtttggcagtttcttagaaagttaaatatacacttaccatatgacccagcaattccactcttaggtatgtatttacctaagagataagaaaacacatgtccacaaaaaaacttgcagacaaatgtttatagcagctttattcattatcaccccaaactggaaacaacccaaatgcccatcaacaggtacctggataaacaaattgcattataaccatacaatgggatacttcaccacataaaagggagcaaactactgatacaagaaacagtgagtgaatcaaaaaaaacattatgcagagggggaaaaaaagccaggcacaaaagaatacattctgggttattccatttacagaactgttttgttaattttgtatacacgtatcaccacagcatctataaacagcacatggaggtgggaggtgtttcatccgtgcttggtatacattgaattcacctgttactttgtattaaccccacacaccttgaagatccaaaatctctactctcattcagtcccctcatcttacaaataaataaataaagcccccaaaaggtaaggcaacatgtatactgtgtaaccgtgaggtagcatgaggtaacatagctgcttctggaacccctaccagcttctaggaagttactaatttttaaatacacgagcgcatttactgatcttttggcacctgctggggatctgtgtggacctcttgaccctgaaagagccattggagccgctgccaaggtgtgtgggttttcatgagacaggcagaggaagtttgtataatgcagccaactcacctgcacagaataacttggccctctctgtccgtcaaggtccctggtcctctctggagaggcttggatgtgtaagcccctgtccctgccctgccattccaaaaccacacacacaagtcacaatacaaaaaaaaaaaaaatacctgaagatccttttagtcacctcagaacatgacgttaactccaggctgctgactgataaagtgacgttcatgtgctttctagaatatagctttagttggacttacacgtcatatgcatgttatacaatactttgaagcacttcaaaaatgttacataattcttcaaattccagccatgtttccactcttggaactgaaggtgaccttcagcagtcactatatcaatcctaagtatcactctgggttctgtcaagaaaatagaagctacttcgtatattccaagtatgaaaccattttttagaaacaggattgaggcttactattggtagggcaagcagagagaaaatcagggacaccttggccaaaggtctcagccaatagacccaaggaagttctagagacagttcagaagctgctgcaaaggcgaaaatctctgggaagttctctccaaccattgtggcccacagcatcaatgttgagaaattctaaagagtttgtctggaagctgctatgcatctcacatcaggcatatgtgagattccaggagtctgctcacgactgcgtggagcttcagctcctcctgggcctgttgcgggtgttaaataaagtacacgtggaagctgctagcacaggaccaggcacagagtggttcccaatcaatggtggcctccctctgttccctttgctttacatgaagaagaccattctgttagacttgaggtctttgctgacgttggtgttctgcagaagtgctttccactggtgtgaattttcagctgttatccatgagatggtggacattccagctttgcaaacatctgttagctctgcgaggagaagctagggtagaagcacagatgggaccattcagatttggctgccgcaactctgccagaagctttgcttggtttggctttcttgggcaggcttggacccatgcagcaatctgggcgttgtttatttagctattttttcatgttctcctcctcccatggcttgcttttctttagtgtaacagcaactagtctgtttgtagacaaaggatttgtttcaactggatatagttaggggactttgaaaagtactgaactaccatttaaagagcctcatgctttgctgcaagaatgtctttggcctatgtagagacaaatcactttacaaaggtgtagacagggttaggggaaatcagtagggggtggtgcaggactccaggggctaacaaccttggaaggccattattaaccctaacccgtagagccttaagaggctctacaagggaggaatttctacaatccagaaggttaccagaactctggaaatatagctgttggagaggttacccaacagatagggtaacttttggaggagagatgtagccactgcccacctgtggccaggcagaaggagagagccaggaggaatcaataccttcctgctttccaatctctcctgcctcccagctgcctgccggtgcctctcattagccaaatccaaccagagatctatgaaccagaagccctgttaatgcagcctcctgggaccctgagcatggtgcagaaaaggcatggtgtagacctgacaggtcaaatacgacaggtcatcaagtcccttaatagatatgtaacttttcacatcaaagaagcttttcttacaacttcatgtttaaggtttaatatacagtcatatggcataatttaaccaatcccctgttgtcaaccttgaggttgtttcttatttttatctagtgtaaaaatctgtgtgatgaatgaatatacatatgtctttgcaaatattttgaattactgtctttggaaagattcctacaaattgaattggctcaaagttataggtgtttcttaagctcttattgccttaacctgtattgccctcaaatttaaagatggcccctatctgtgcatgtgtaaactatgaaggtagagctctgacagtctggactaaaatgggataataaatgtgagatgagatattcaaaaggaatgtcaaaaggaagaggaatgcaaaaggaagaggtcgaggagaaagcagaactttgttttgcgattgccccctcctccaaaacagttgacagtcttcccactatatgtaattatgtttctgagtccacatttgcaactgccttgcaaatccacagcaactttctatatctctaggatgcaacattgttttctaatcacttttgctaatgacctgagtcattataaattagtaatttttcctacagcagattttccattgtctggtggtgaactcagactttcctcaggtagctaccagtgtagggtatgcaagattggaagagaaatgtacgatataaagtgaagagaaaaccatcttataattcaatcctcacaatgcagggcatcaccatggatgtcccctgagaagttaatttacagccaggtaggataagcaagtgttaatcatactgagaaacattaaattctacagaacaaatctttttgacaaacattctttgaacacagatgattcactaagtaaattttacaaagtgctatttaaacaaattaagatatcccaaatgtggctcatctctgaggtcccaaaacacaacctttctgagattgaacataacaaatatttattgagccagacactgtgaggcactgggatagaatatagtctatccccaaagtgcctcttgaaaacccagcaaaaggaaaaaaggaaagaggagacaaagttcatcatgtttcttaatatcattacctaattttctttgggtaacagatttctttggaacctttagcaggggttcaaggaaggtgtgtgtatgtgtgaggaggagataaacaattgctgttggtagttatcctaattccaagtgacttgacagaggataatggtcagcttccttggattctgggggtttgatgcctccaaaatgtatcatctacctgaagtaacaaatgaaaattatggaaagaagttaaaccaatgatatttatttttctgtaatcaggaccaaccttaactacttgtcaatttaaaaaacaaatgcttgacatattattgcaaggacgaacagtaatcttgtaaatagtacttgttatggcacaaaaataccactgtgattatcatatcctaaaacaatcagcaatttgaggccttaaaaaagtcccatgatgtaggaggaatttggctttatatgtcgtacaataattactattatattcagtatgaaagcctacatctgactgactcattggtaagagccatcagatgacactgggtaagtcttgtaactttctggagtcttgtttcccatcatgaatatcagaaatatggaaatagtatcttatgctttgcccattcctttcccactctctaaggcgggggtccccaactcccgggcctcgggctggttatcagtccgcacacagccggttaggaaccccgccacacagcaggaggcaagcgagcattaccgcctgtgctccgcctcctgcaggtcaacagccgcattagattctcataggagcatgaaccctattgtgaaccagattgcgcgctccttatgagaatcttaactaatgcctgatggaacagtttcatcccgacctgtgccatcctctcccaacctgcgccacagtccctggaaaaattgccttccatgaaaccggtcctggtgccaaaaaggttggggactgctgctgtaaggcaagtattttatccttctcaagtatcctcaaacttcatacacaaccttccctctttgtcatcagttctgaccccacttcctgcctcattgaaaaattagaaacagtcatacaggaattcctttttttcccttctccaccaaattagcaaattaactgcatctgcagccaccatctggtttccctcctttttccagcagagaactgtcctgtctcatccaaggcagcccctctccctgtgctgtgtgtattggcgctgctctcctgaccttctgaagaacctcatcctgtagctaacccctgcttctctactgcaccatcagtttccctgtctttgcagtcactcccatcagcatagaaacgcaccttagtataacttatctttacaaaccctcccttgactgctcataggtcagcaaaatttcttgaaaacattggcacttactctctctgttttcctaaatcccacttactctccagtctattaccaatctgatttccatccacaacactctacgagatttactgctatttgggccaccagcatcctccatatgccaaatccaaggaacattcccagtccttgttcaacacagttggtcacatcttccttcctaagacactttcttctatttgtgcttttaatatcatgatctgctgaccacttctctctcttactgctccttctcaatctccaacataaaatattggatgctgcagtgcaccctaatcatctctaactgcatttttccctagatgggctcatccacacccaagctttcagtgctccatctcctgaccccaaatttatatctctatccctgactctccctgattccaggttcacatatccagtgtcctgcgtgcaatctccttttgatacataataggcatctcaaaattaacatatccaaaactcacccacaactcacccagtcattcaaacctaaaacatggaagtcatctttaacaccatccctcttatcattcctcatagtcaacccaacagcaagtattattggatctgcctccaaactatgtcttgaatgtgtctatttttctccatcctctctgcccaaagcctctaagccaccatctcttctcacctgcagtgacttcatgcactgactccatgctggtgattacatttgttttctatcccaaaacagagtaatattaaaaaaaaaaacaaaacaaaacttaagtcatacagtgtcactctcttccttcagtaacttctcttttattttagaagaaaatccaaattccttacctttgtctgcaaagtcccacatgatctgaccctgcttctgcactttatctcaaacaaatcactccctcccacatttcattctaaacacaccgtcattctttctggcctccaagaggcaaggtctttctcatcttcaggcctctgcttttaactcttcgctatgcctggaaaactctagctcttagcttggctggctccttctccaactttcaggtcccagctcaatagtcaccttctacaggcctcatgctatatctgaaatggtcatcatgtattataatttatgtctctcccctactagaatttcacttccttgaaagaagcctcatttctttttttgttctctatccccagaacgtagaatattccttgctaaatagatatttggtttaatgaatgaaagaatgccatcagcaaaaaggttaggaatgaatcaaaaagtgttttcatctatcatgacttcatttccagacagatacttggactgttgggtacgtgtatttttgcttgagtcattggttctcttaagtggaagatattttctacaatatagcttcatcatttgaaaaatgggcaggaagcatttgtagtgtgaggacttgttcattaatgtttgccatagtttgatatggttcatttacctccaccaaaatctcatgttggaatttgatccccagcataggggtgttgggaggtggggcctagtgggaggtgtttgggtcattggggtgcatccctcttgaatggcgtggtgccattctcacatggcatgagagtctcactctcatgagactggattggtttttgagagaatggattagttccctggagagtgggttgttgtaaagccagaacaccccttgggttagatccctcttggcatattcctgcatcacctttgacctccactatgatttaactcaacacaaaaaccctcaccagaacctgagcaggtgctggcgccatgcttcatatgcagcctgcagaaccactacctaaataaacctcttttctttatacccagcatcaggtattcttttatggcaatgcaaaatggactaagacagtattgttaagttatatgctttgaataaaatagtattttgaattctgcagaattcctttttgtgaacctagcaggtttgaaggtgggatttaaatcgccccatctggcgcatcttacatttcatgtgtttagatcactggcccaaggaggtcaggaaggctgaaatttgtgaaccgtctccttggaataaatacaggctcataaggatcatgtacttaaagtctcctaattgtgtctttgcttctccgcattttcacgtccctcaaagagcttcagctgtaactcatgtagctctgggtcctacgcccagcactgcacactgcaggtagaacatcatggagctgggtgtgtgtgcccaggagctgcagaagaaacagcaagattgctgtgctgtgaatgctggccacccaggcagagcctctggggcacagtgggccctgggctcacgaagcccatgtgaacagtgggctccttccgtggttggtaatctgctctagcagactgctgcaatgtgctgccacatttgtcctctgcttgccatgcttaaggcaaccattcaccaacacatgagcactcttcaattctggaagctcccaagtaccattttcaattcagaaacctatggaaaatcttcagcatggggtggctgtccagataaatcatctggatactgattccatcagtaatagctgatgagtcgtcttctaaatatgtgaatgattgcttcatagactcaagagtatgatggtgtgaaccagaagtacttgatggcagatattctagcaggcacataaatcaagctacatcagttccatcagtttgggaaagatgccaccactgctgtatgtgttggtcagggtgggcttactattggaacaacccatttttctcacatgtcagtagcttaacacaataaacgtttgtttattctcatgtcacaatccagtcaggtcagtggaggttccgaagagggtggatgtcttcgctccaaacagccctctggggatccaggcttcttccttctagtgcagaccttcttaacctggaatccacagatccccaaatggatacacagaatccaggaagtcggtgaacctgcatgggggaaaaagtgtatctttattttcaccaacctcttaaccataatttaacatttcctgtaattatgatttaaggcatgaagccataataatgttagcaccacctgtgactttaatacccatcaaaatcatagatgtttcatatcacattacaattttagtagatatcatgaaatatcatttattcataacactactttaaaattatggtaggcattaggcccacttcaaggtattgttatttactacgttaattagagagtatgcatattgccgtattacaaaattttttttttttaagttcaacttttattttagattcagggtacctatgcaggttcgttacatgggtatattgcgtgatgctggggtttgggatacaattgagcctatcacccaggtagtgaacatagtacccaatagatagtttttcaacacttaccccactccctatttccctcctctagtagtccccagtgtctgttatttccatctttatgtccatgtggacccatcgtttagctcccacttagaagtgagagcatgcagtatttgcttttctgtttccgcatcaattcacttaggataatggcctccagctgcgtccattttgctgcaagggacataatttcattctttttcatggctttgtagtactccatgatgtatgtgtaacacattttatttattcattacactgacacctaggttgattccatgtctttgctactgtgaatagtgctgcgatgaacatacaagtacatgggtctttttggtagaatgattcattttcctttgggtatacacccagtaatgggattgctgggtcgaatggtacttctatttttagttctttgagaaatctccaaactgccttccacagtggctgaactaattcacactcccgtcaccagtgtatatgcatcctcgtttctctgcagcctcgccagcatgtattattttttgacattttggtaatagccattctgactggtgtgagatggtatctcattgtggttttcatttgcatttctctgatgattagtgatattgagcgtctttttcctatttttttggccacttgtatgtcttctttgagaaatgtctgttcatgtcctttgaccactttttaatggggttacaaaatatttaatgtttttttctagctgtatttcaatacacttgcatttctttataattttgtgtattttattttaaacattaaaaaccactattctgagaaggattcgtaggtttcaccagactgccaaaagggttcatggcaaacaaaaaattaagaactctgatctggtggttttgctataccctaagacctttgtgtcctttgcatctagccagcagagcagactgggggtgacactgggaagtagttgaggggcaaggcttagaaggaatgtgtgtcacttctcatccatcagccctaattcagtgatgtgatcccatttgactgcaagggagtctgggaatcaaggtctagctgtgtacccagcaggaaaaggaaatggggcttggtgaacacatggaagtgactgtcaccatacccaagggaacagtcagcaaagaggtggcatcccaaggacaagggacctccctggagaaaactcactttctataaaatttactctaggatgcataatcataataatcctgtaatagctgctgttggttgaatggttattcctgtcagcattctgctaactgattcacttccatgatgtcatttaatcctcataataatgctgtgaaacaggtactgttattattcctattttataaataagagcactgagaactcaagaaataagcccaaaatcagtgctctcaatcatggcactggactgttttagaaaatattgccgcagcctgggcaacatggcaaaaccctgtctttaccaaaaatacaaaaaattagctaggcatggtggcatgtacctatggtcccaactacttgggaggctaacgtgggaggatctcttgagcccaggaggcggaggctgcagtgatccaagattgtgccgctgcactccagcctgggtgacagagtgggacccatctctgaaaaaaaaggaaaagaaaatactgtgacccttgttgaagaggtggaattttgtactggtggaggggatggtttctggagccagagtccctggattcgtatttcaactttgccagtagctggttcattgactggacactttttatggagctttctatgcgtctgtaaaatggagattaatattagtatctgtcttttaggattaaaggagataaacacttaagacagcacctggcacatagtaagtgctcagtgaatgttatccactgtttagacagccagaatggccctgtgactaccttcatgaacatgatctgaaatattccagcagagcccatttctcttgaaggatatgaggaaataactgaggtcaccaagatactcacaaacctagggatgcctacaatagtgtgctgagttatagtcaagaggctggggatgctgctacttttctaatgaaggaaaaaaatatgttgggatgacataaagaaaatgttgttagaaaatagtttccattctaatatcactctctcccctttacagaattccatgaaggtgatgttcaaatgcctctggaaaaactgtgggaaggtgctgagcactgcagcaggtatccagaaacacatccgaaccatccatctggggtaaggcagctctctcttcagggatgcagcccccatctgctcagtctagggccacccgcactcagaaattgcacaccacactgtgccttaaaggttctggacactgggctggcttggtcttcctaatctctagagagatggccactgcagatcatctaagccaatatggcacagtggaaagaacaaggatataacatcctagagcctcattagttcacttactgagtcactttaggcaagctgctgccctgagccccagttccctatggaaatttataataatgtcagctcttcagggtcaagtgtgagtgccaaagataaaatgtatgtgagagagactttaaagtacaaaacactagagtaacctggaatctgtgattggacttcaaggggtccttgaacccactgaaattacctgtggaatgaaatgtacatttattttccagtggagagtattcatgactttaagcctcacaagcatatatagcctaaaaagagttcaagagtcaccacaccaatcgatgctgctgttgctgttcttacgaaatcactttctgttgctcagataagccatttatttgtaaaatctatacttttcctcattatataacagccttctaaaggaaagataaagtgaaggtttaggagccatagcagttacaggtcaccccaggggggcagtggtattccgtcagtcttgtgctttttgccctgagtctatcttgcccagggatctgagaagggaccttgagaggctgtaagtcagaaccagtgttcataaggcaaacacaaatgcacggccaggctcctgtgtgcttggacacagaggagtcctttccacaagataagtgcagagaaataaatgcagcagtcactttacccagcaagggatacatttagaaaatgcttcatgcccaacaagtgatataggcagaaggtgaaaatagcttctaaggtaatctatgagggtggctccatagtgaccatggagagaaacagggatctagctctctaatcatccaggctgatgtttggggacacaccagagccttccagagcatatggcctggagagcactggagataggacctggtaaggcttccctggccagagtctaccttatgtgtaagaaataccaattgaaatacctcagggaagaacaccctccttctgctcctcaagccttcagggaaggaaatcctgcagtgtctcccctgaaatctcatcgtcaagacaattcacaatgtaagcagctcagtttttttaaaggtttagaaagaacttcccaaagctagagccaggaggtagggtatttgttttaaagtctgtctgcccagaaaattgagtcctattcggtcccatcagaagcatatgctgtttatatgtatttatagaccctggaattggtatcacgtgttagtcctgtgagttcctggggtgctctcacagtgggtggaatctaacatgcaaccactttgctttcctgggatcccctttttcctgatgtgcttttagaatttccctggtgaattatggttcatagccctgccaggcaccgtacaggaatgggcctgggttagcaggactctgaggctaatctatgcttatgaagcccggggcctgtgctctctgatgcactgggagagggaacatacatttgcctttatccatgaactcaattacatggctgtaggatgatggggcatttttaatgagtattagctggtgaggggatgaggagggaaacgtgtcaaagccagaagaaaatatgccgtcacctctgatgtgtctgcagtacacaccatgcctgtataaaaagcacacacttttcaatctcactccattcttgtacaccaggggctggtcctgatttaaccccacgtgggacacgcagtgtcccccaggcctatgtgtctattagcagcacttggcagccagcagcagctcaacctgcctttaactgaaaaggaagtggggacaggaatagaacagatgctcgttcttcttcccactctctggggtctttaatggtatgctggtcacaaggccaagccctgccagacctgatacggtacaaagacacctccccaggcgcctcagcctgggagctcaggggaaatggagctaggctgggacaagccactgatttgaacaaaaagacaggcctgtgaagaggtgaggcatggattttatgttagattctatgcagggctcattagtggggaaaaggtatgttccgagtcagggatctgctgctgctgctgcagtgaggggacacccgtggcctctgcccagccatccccaaagccaggtttctagagaagagaagcaccacttctctacaaactcacaaattatctaataaacattttctgacattatagggagttattttattttactcaaaactttctgtggaaaagtataatgttctatgtttcagggagaggaactttgaaaacacctaagaagctacttttcctggtgatggtgaaaattgagaccttctaacatcatctttctttttatttaataagcattttacgtagtgtttatattgtgtaagatctgcttctaagcaccctatatttattagcttaatcatcacaaaatctggtactataattaatgatccccattttataagtggagaaactgaggaacgggggctatatgtaggccaccaaaatcatgcacacaactagaatgtgtaggagtcagggtttgaacctaggaagtctaacctcagaatccattctcttaatcactgtgccacaacaacgtcagctccattcattcactcattcattcaggcaacatttgctaggtacctaccctctgccaaatacaccgatgtgtgtggagtgacacatgatgaacaaaacacatccctagagaatcagtcatagtgaagcgacaaagaggtttaacaaaatacagacaggtagccagtgattaacaaaacgatgagtaaacacacttcagagggagcacagagcactaacagttaggagtgaagtcctaactcccaaccttcagaatacacccaggacttaacgtctcagcccttgcactgcttgcctgtcctgctcatctggaatattgctgacaacagctccttggtggcgtctgcttttgcttttgtcttcctgtcctctatttcccagacagtatccagagtgatccttttaaaattaagttagagttctgaaaacccccagtggcttccaccacattcagaatgcaagccaaagccatcgccgtgggctgcaggccctggatgaccttgcctctgccctgttctcactcctcccgtcactccctggggtcccgagctccagcctctggcctctctgccaggcccacccacttgagagctgtgtgtcacttctccctggtgtgttctcactgcgggtgccagcatggtgtctccctcacttcctccaggcaggtctctactcaaacgtcacctcctcagagaggcttcctctggccactctctttaaaagacaaaattgacaaatgggatctaattaaaataaagagcttctgcacagcaaaagaaactaccatcagagtgaacaggcaacctacaaaatgggagaaaattttcgcaacctactcatctgacaaagggctaatatccagaatctacaatgaactccaacaaatttacaagaaaaaaacaaacaaccccatcaaaaagtgggcgaaggacatgaacagacacttctcaaaagaagacatttatgcagccaaaaaacacatgaaaaaatgctcatcatcactggccatcagagaaatgcaaatcaaaaccacaatgagataccatctcacaccagttagaatggcagtcattaaagagtcaggaaacaacaggtgctggagaggatgtggagaaacaggaacacttttacactgttggtgggactgtaaactagttcaaccattgtggaagtcagtgtggcgattcctcagggatctagaactagaaataccatttgacccagccatcccattactgggtatatacccaaatgactataaatcatgctgctataaagacacatgcacacgtatgtttattgcggcattattcacaatagcaaagacttggaataaacccaaatgtccaacaatgatagactggattaagaaaatgtggcacatatacaccatggaatactatgcagccataaaaaatgatgagttcatgtcctttgtagggacatggatgaaattggaaatcatcattctcagtaaactatcgcaagaacaaaaaaccaaacactgcatattctcactcataggtgggaattgaacaatgagatcacatggacacaggaaggggaatatcacactctggggactgtggtggggtggggggcgggggaagggatagcgttgggagatatacctaatgctagatgacgagttagtgggtgcagcgcaccagcacggcacatgtatacatatgtaactaacctgcacaatgtgcacatgtaccctaaaacttaaagtataataaaaaaataaataaataaaaaataaagaactatctgagactgggtaatttataaagaaaaaaggtttaattggctcatggttcacaggctgtgcaggaagtatggctgaggaggtctcaggaaacttacaatcatgaaaaaaaaataaaataaaataaaataaaatagtgcccgcattactaatcctgcttaacaacactgttatgctgttgaatttttctttctgggacttagtaacacctgatatattaaatatctattttttaaattattttttaattttttaaatctctgttttcagaggttgaatgggggggtacaagtgcagttttgttacatggctgtgttgcacagtgataaagcctgggcttttagtgtaaccagcatccaaatagtgaacgtggtaccccttaagtcatttctcatccctcacctccctcccaccctccccgtttcgaagtctctaatgtctattatttcactttctgtgtccatgtatacacattatttagcttccacttaatatctgtttctttaggggtttcttgtctgcctgtaagttcccactataagttccatcagggcggagtctatattttattcactgtgttatcaggagaccctggaacagtgcctgaacatattagattctcaataaatcgttgttgaataattgattgaatgagtgaatgaattaatgaattgctttaagacatcaaggaagggttccctggaagtggacagttgaactgagtgctgcaggataaggaagagtttgcaaggcaaacaagagggaggaaaagcattccagacagaggggaaatgcatgtgcaagatttcaaggcaagaaaacagattggcttagtatgattgttttactctcttttgcattaggcgcgttggagactctgactacagtgatggagaagaggacttttactacactgagatcaagctcaacacagactcagtggcagacgggctgagcagcctggccccggtctcaccttcccagtccctggcttcacctcctactttccccatcccagattcaagccgaacagaaactccttgtgccaaaacggagactaagttgatgacgccgttgagccgctcagctcccaccaccctctacctcgtgcacactgaccatgcttaccaggtgacttgcaggggactgtgagagcaatcactttgaccttgaccaaaaccaggggccatctggcctatgagtaaaagacaactcagtggaaaaacagcatcacacacggcagcccggtagctttgatttttctccctttaaagcctaagatctcacacagatagggtcctatggtctagtctcagattgcccaatgctgcctgtggattcgatcccgtagagattgttatgatgataaaaatcccttgggcacagtggctcacgcctgtaatcccaaacactctgggaggctgaggcgggcggatcacctgaggtcgggagttcgagaccagcctgaccaacatggtgaaaccccatctctactaaaaatacaaaattagctgggtgtggtggcacatgcctgtaatcccagctactgaggaggctgaggcaggagaatcacttgaacccaggaggcagaggttgcggtgagccgagatcccaccattgcactccagcctgggcaacaagaaaaactctgtctcaaaaaaaaaaaaaaaaaatccctaatgttatctgggcatggtggcgtgtgcctgtagtcccagctacttgggaggctgaggcgggagaattgcttgaacccgagagacggaggttgcagtgagccaagatcgcaccactgtactccagcctggcgacagagcgagactctgtttcaaaaacaaaaaaaatccctaatgttgcaaagccctcaaaatggtgcctggcacattacataagtatctgtttaaaaaaaaaataaggccgggcacagtggctcacacctgtaatcccagaactttgggaggctgaggcaagtggattgcttgaactcaggagttcgagaccagcgtgggcaacatggtgagacccccatatctacaaaaaatacaaaaattagccaggcatggtggtgcgtacctgtagtcccagctacttgggaggctgaggtgtgggaggatcacctgagcccagggagtttgaggctgcagtgagctgtgatcatggcactgcactccagcctgggtgacagagtaagaccctgtctcaaaaaaataaataaaatgtaagcattggaaagctttggcacagtggcagaatcacactccaaatccgggacttcatgccctgccttctaaatggataattaannnnnnnnnnnnnnnnnnnnnnnnnnnnnnnnnnnnnnnnnnnnnnnnnnnnnnnnnnnnnnnnnnnnnnnnnnnnnnnnnnnnnnnnnnnnnnnnnnnnnnnnnnnnnnnnnnnnnnnnnnnnnnnccacccctcttcccaccctcctctgtgccccccaccaaccctgcattctgttttaacaggccctccagggaatcctgagtcatgctaaagtctgagaagaccttagggacaaatcctgcaaatttaggacatgggtaaaactcccttttttcctgccagaagttactttttttttttttttttgagacagggtctctatctttctctcaggctggagtgcaattcactgcagcctcgaactcctgggctcaagcaatcctcctgcctcagcttcccaagcagctgggactacaggtgtgcactaccacatccagctaattttttaaattttttgtagagacgagctctcactacattgcccaggctggtctcgaactcctgtcttcaagcagtcctcccatgttggcctcccaacatgctaggattataggcttgagccaccatgcctggccattaattcttttaaatgttgatttgtttttatacaatgttaatacattcaaattttaagaaaatatttttcacataattctcaactaccttattcaactttttaaaatctcctttacatacttgtaattatgttctcccacccttgttttataaaaacttttcatgtaactaaataatatccaattaaattgaaacaccaaattgttttaatcattcttattgttaggtatttactttttaatctatcctgttttttcgtcattaataactccactgtaaacatctctgtgcctgctgtgttttgttttttgtttaaattctcagaagaataattattgagtccgaggatgtaatatgagggaacagtttatggctcttactatgtattgccagaatgctttccagtggtaccaagtacaaagccactgccactagcaaatatatttgtaattagaaaattacacctatagaggaaaaatttagccacttatttagcagacttaaactcaagagtaattgaatagagctaatatttgaattagttagtgtaataaatttcattcctgactcttattatgttggtcaaaacgaataattcattcatcttcatttatcactgtttcacttaggtcagaaatcctgggtactaacttagttaaatcattttgctcatctatataatgagagagttggaacacacactagttgatctacaaggtccttcccaaagcataaacttagaaatattgagacttttctgtttatagaaattataaatgttcagcatagaaaatattaaacacagtaaagaaagaaaattcatccctaattccaaaccttagttaatattttttgtatgtacttcaagactttgttctgtgtttatacatttgcagtttttaaaagggatctgttgcagaactgtttttactgtattttattttttctatttaatatatcatgaacattttcccatgccaatgaatcttcttcaacaacagtattttaaaaattgatgcctaatatttatacgtatttgtggggtacacagaacattttgttatatgcataggatgtgtaacagtcaagtcagggtattttgaatattaatcgccttgtgtatttatcatttctgtgtgttgggaacatttccagtcctctcttctaggtattttgaaatataaaatacattgttgttagctatagccatcctactctgctatcaaacattagtactcattctttctatctaactgtatgtttgtacctactaaccaacatctctccctaccttgtcccatcacacccttccccatctcctgtaactatcattttattctctacctccatgacatcaattattgtatttcccacatatgagtgagaacatgtgatgtttatcttcaagtgcctagcttatttcacttacatagtgacctctagttccattcatatggctgaaaatgacaggatatcattctttttaatggctgaatagtactccattgtgttcttaccacattttgacacttcatctgttgatggacacttaggttgattccatattatctttgctattgtgaatagtgctgcaataaacatgagagtgcaggtgtccctttgataggctgatttcctttcctttagataaatacccagtagtgagattgctggattatatggtagttctgtttttagattttgagaaatctccatactgttttccataataggtgtattaatttacattcttaccaacagtatataaaagatcccttttctctgcttcctcaccagcatctgttattttttgtctttttaataatagccaatctaactagggtgagacgatacttcattgtggttttgatacacatttttctgatattagtgacgttgagcattttttcatgtacctattggtcatttgtatgtgtgcttttgaaaaatttttattcaggtcctttgcccactttttaatggaattatttggtttttgctattgagttgtttgaattcattgtatattctggatagtagtctcttgtcagatgaatagtttgtggatattttctcacattcaacaggttgctcttcacgctgttgattgtttcttgtgccgtgcagaagctttttagtttaatatagtcacatttgtctattttgtttgtttgtttgtttcttgtgcttttgaagtcttagccataaaaatatttgcctgggcccatgtcctagagtgtttttcttgtgttttcttccagtagttttatagtttaggatcttacatttaagtttttaatccattttgagtggatgtttgtaaatgacaagagctaggggtctagtttcatgtttctgcacgtggatatccagttttcccagcagcatttattgaagaggatgtcctttccccagtgtatgttctcatcgccttggtcaaaaatcagttggttgtaaatatgtggacttatttcttggttccctgttttgctccattggtatatgtgtctgtttttatgccattttaacaacattttgaattactctgtaggtatatcatgatttatttacctttttccctattactgggcatttgtgttatttccaggtttttttttttttttttgagacaagatttcactctgttgtcaggctggagtgcagtggcatgatcatagttcactgcaacctcgaactcctgggctcacataatcttcctgcctccatctccaaagtagctagaactacagatacactccaccacccctggctaattttttttaattttagtagagacgaagtctcactgtgttgccctcgctggtctcaaactctgggctcaagcgatcctcctgcttctgactcttaagtgctgggattacaggcatgagccaccacgcccagccccaattgttttttataatatatagttgtgcaaggaacattcttgcgtacatttctttagaatgaatgcctagagtggaatagctaacacagagaatgctaagaatttttatatgtattgtcaaattaccttccaagaacattgtactagttcacacccaccctcacagtatagcagggtgtattccccaattttatagtgaagaattctacctcacaggtatcctaaaataggtatatgtacatataataaaatttcttttcagaaatcaacagtcaaaaaccatctctttttataccttagatagcttgcttaggtatatatacaaagtttatttctggctactccctttaaccttgtttaatctcttcctattagataattagtccaagttattaatatagctgagaccatttctgaggtcctcctttggtaataagagcttaaagctccgaaggaaaatattccttcataacagctttctctgttttttatttgacaggccacaccccctgtgaccattccaggatcggccaagttcacccccaatggcagcagcttcagcatttcctggcaatctcctccggtcactttcacaggcatcccagtaagtagaaaaacgaaaaagccaaaaatctggtcaaagccaatgtagactaaatttagcgaacaaatagtagaggcatgcaagaaaaatacaaacatcagaatgccagaagtactatatttcttaaatgatatttgtaaactcatcagcagatatcacttcttttcgaaaaggtgttttgactggcatttcagaaaactataagagagtttcaactgttcataaacaacttgttggaaatatatcaagattttttgtgtgttggtagtgtatttgtatgtttccaaaagactgtaaaattaatagctgaactcagatcttatatggaaaaaatggtgtttatcattataagtaactataaaatttattacttaggaagtgttctgtacgtatgtcattttgaaggctcaaaaaatacatcaaaatcattttttctttcagagtctgaataatccatgctgatggataatctgaaactaaatgagtgctaaaatatgcaatcagacttaagtagtacataagaattgatttgacatattaaatgattcctgtctgataaatcactgtgaattaacttgattcctaaccattcatttaaaaaatatattggatcttttatagtttatcacagaacagccacatgcatgcacactgttgatgctcacagtggtgtataactcctgataaggttcaggaagtggcttatgataacagatattaaccttattttctcttctccacccgtctccccaaggacctcacaaaagcttcttattgtcaaccactggcatctcccggaggtttccagcaaagtctaacgccttctgtggaactgataaaaatgaaagtggctgaatgaattgtgctgtgctctgttgatgaatatttattaaattccatagaggaatagccaagaataaaaagcatactgctagaggcaatttgggaaatggtggcttccagaaaagactctgggaatgtgatttgtaaacaacaccatgggtctgaagtcatttttaaagttgtattttcattgaatagtggtaacttctggtagctctgcaagagtgaccttgttagtagacgttagaagagggcagcttagacgtgttggtattagttttgcttctggcaagaacactgatccactgatgtaggtgtcaggggttaacaatctgtttggggacttttttttttttttggtagacataaaaagacccagagtggctcttgatacatttttgagacagccactctgtattaacctaaaatggcagccacagttacagaattattgagaccatcttttctgcatcctattaattcctgcctttgacttgggaagaattttcaatgatgtatgggaagcatacaccatgttgctcatctggtactatagcatgtagatggaacagcccagttcaaacctctttcagactacctctgtggccaagcaaactggaatgtttttcccctttgcttttctaactaaattatcttctgaagtatagggaaatcactctgaggggctctttactagctccatgtcctccatggttcttatgtgtcttacacactaggataccagccaggataccttatatcactcgtttttcaacaatagaatgttaaaactctgctatggacactgtgtatttctaccctcatctcagtgcccttgattttttacagaatccctcatttcactctgtgttgattacctgggacattctagacaaaagctttgacagaaagtatatatatgatatataaaacataccatatatacgatatataaaacattccgtatatatgatatataaaacataccatagctgggttaagtaggtattccactaaaatcctatgtgagctttttttttttttttttcttgaaacagggtctcagtccatgacccaggcttagagtgcagtggtgccatcacggctcactgcagcctcaacctccctgggctcatcttccccacttcagcctcctgagtagctgggactacagaagcacaccatcacacctggctaatttttgtatttttagtagatacgggggtttcccatgttgcccaggctggtcttgaactcctgagctcaagcaatctgcccacctcagcctcccaaagtgctgggattacaggcttgagccactgcgcccagctgagagcttctaatttattctttcaccagagaattcccaattgtgctgattgtgtaacctgtttcagcaaagactttagactgattttagcagtcaagcttgccattcctatttaaagataaagtaagggtggggtggaattttcaaaggtttttgttttaccctagaaagacaagaaggctacaactaagaatgttctttttgttgctaaactctctggccatgctctaaaaaaaacaagcaggtgctgctgtcctcctcctcctccttctcctggtgggctagctctcataacagcccacccacacagatgcaggactgttgtacacccacggacagcatgccagcagctgtccctgaatgctccaggagtgccaggcaagccacgtagaatttaaaaacgtgaattcttaccctctaaattggtgtaatagggttttcagaccaaagctctaaaagttgtaagttataatgaatttgtattagtgatggcttcaattgtgtccaaactgaagaacagagaaatattcatgtgataaaatgcttttcaaaaaaaaaatacctttatccttgtactctaaaataaataccctgaggttgtcaaccctgtttagagttcacttttctcccacatctttgagacgtggtattgaagagggatacttttgtacacttcctagaaagtgagaaaaacccctttctgaaaaatcccaagggttgcaggattttatttattcatttgcctatgctagatttcctgaacattggactttaataagttccctgggtaagacctcttcccggaggtgtgtagctgagaaggctgaactgcatatttaacaaatgtaactggaagttcagtcttttgtagcctaaggctgtggggagaggggtaggaaagagaacatccttaattacaactttctttgacatgtttttccctaatgacctgccttctctcctaattatctccatttctttctctctcttttcatgacagaaaactaagagccgttggcccctttattaatcagctcaagactgccataaaataccacagacttggcagcttaaacaacagaaatttattttctcacagttctagaggctagaagtccaaatcaacgtgtcggccaattcagttctggtgaagaccccttcctgcttgtagatggctgccttctcactgtgcatgcacagtcgagagagaaagagagagagagagaaatcgagagagagagcacaagcacatgccagggcactggcaagccagggagagcaagcatggaggaatgcaccagcctctgctatcccttcttaaaggacactaatcctgttgggtcagggccccacccttatgacctccttaaaggccctatgtccaaatacaaccacactggggattagagctttatcatatgaatttgagggacacaaacattcgatctataacagcccctaggaaagcaagtataagctagtcaacctgctatccaagttctaggaggcttcaggctgttggggagggtctccaaagctgaaatagcagtgcttatttgtcaaatgcttagctggtttgaggtttcttttttaatgccttgagggaagattcagaattatatgaggttaaaaccaagccagaggcctttttttcctccctcttaagagaaaaacttacaagaaaagaaatttctcctgcatacttacagaagggcacagcatctttagtgtgaggcttacttgcaaatcctggctctggcatttgtgaacgccatgtgatccttctaaagtaatatcctctactctagttctacctcttagagttgtgtcgttcacacagtgcctggcatgtagctgacaatgcagatttcctaccatcattgctgcctttactgtgtctaagcactgtataatgggtcagagaaagcggctcctccctatttaggattgattcctgtaacacagatatactcaacacatgggagagattagtcacaatttttacagactataatttaaaattctttttttttttatactgggaactttccaaatacgttttgtttttgttcttttttttaaattaaagttttagggtacatgtgcccaacgtgcaggtttgttacatatgtatacatgtgccatgttggtgtgctgcacccattaactcttcatttaacattagatatgtctcctaatgctatccctcccccgccccccacaacaggccctggtgtgtgatgttccccttcctgtgtccatgtattctcattgttcaattcccatctatgagtgagaacatgcagcgtttggttttttgtctttgcgatagtttgctgagaatgatggtttccagcttcatccatgtccctacaaaggacatgaactcatcattttttatggctgcatagtattccatggtgtatatgtgccacattttcttaatccagtctttcattgttggacatttgggttggttccaagtctttgctattgtgaatagtgtccaaataaacatacgtgtgcatgtgtctttatagcagcatgatttatactcctttgggtatatacccagtaatgggatggctgggtcaaatggtatttctagttctagatccctgaggaatcgctacactgacttccacaatggttgaactagtttacagtcccaccaacagtgtaaaagtgttcctgtttctccacatcctctccagcacctgttgtttcctgactttttaatgatcaccattctaactgatgtgagatggtatctcattgtggttttgatttgcatttctctgatggccagtgatgatgaacattttttcatgtgtcttttggccgcataaatgtcttcttttgagaagtgtctgttcatatccttcgcccactttttgatggggttgtttgtttttttcttgtaaatttgttggagttcattgtagattctggatattagccctttgtcagatgagtaaattgcaaaaattttctcccattctgtaggttgcctgttcactctgatggtagtttcttttgctgtgcagaagctctttagtttaattagatcccatttgtcaattttggcttttgttgccattgcttttggtgttttagacatgaagtccttgtccatgcctatgtcctgaatggtactgcctaggttttcttctagggtttttatggttttaggtctaacatttaagtctttaatccatcttgaattaatttttgtataaggtgtaaggaagggatccagtttcagctttctacatatggctagccagttttcccagcaccatttattaaatagggaatcctttccccatttcttgtttttgtcaggtttgtcaaagatcagataattgtagatatgtggcattatttctgagggctccgttctgttccattggtctatatctctgttttggtaccattaccatgctattttggttactgtagccttgtagtatagtttgaagtcaggtagcgtgatgcctccagctttgttcttttggcttaggattgacttggcaatgcgggctcttttttggttccatatgaactttaaagtagttttttccgattcgtgaagaaagtcattggtagcttgatggggatgacattgaatctatgaattaccttggacagtatggccattttcacgatattgattcttcctatccatgagcatggaatgttcttccatttgtttgtatcctcttttatttcattgagcagtggtttgtagttactcccttgaagaggtccttcgcatcccttgtaagttggattcctaggtattttattctctttgaagcaattgtgaatgggagttcannnnnnnnnnnnnnnnnnnnnnnnnnnnnnnnnnnnnnnnnnnnnnnnnnnnnnnnnnnnnnnnnnnnnnnnnnnnnnnnnnnnnnnnnnnnnnnnnnnnnnnnnnnnnnnnnnnnnnnnnnnnnnnnnnnnnnnnnnnnnnnnnnnnnnnnnnnnnnnnnnnnnnnnnnnnnnnnnnnnnnnnnnnnnnnnnnnnnnnnnnnnnnnnnnnnnnnnnnnnnnnnnnnnnnnnnnnnnnnnnnnnnnnnnnnnnnnnnnnnnnnnnnnnnnnnnnnnnnnnnnnnnnnnnnnnnnnnnnnnnnnnnnnnnnnnnnnnnnnnnnnnnnnnnnnnnnnnnnnnnnnnnnnnnnnnnnnnnnnnnnnnnnnnnnnnnnnnnnnnnnnnnnnnnnnnnnnnnnnnnnnnnnnnnnnnnnnnnnnnnnnnnnnnnnnnnnnnnnnnnnnnnnnnnnnnnnnnnnnnnnnnnnnnnnnnnnnnnnnnnnnnnnnnnnnnnnnnnnnnnnnnnnnnnnnnnnnnnnnnnnnnnnnnnnnnnnnnnnnnnnnnnnnnnnnnnnnnnnnnnnnnnnnnnnnnnnnnnnnnnnnnnnnnnnnnnnnnnnnnnnnnnnnnnnnnnnnnnnnnnnnnnnnnnnnnnnnnnnnnnnnnnnnnnnnnnnnnnnnnnnnnnnnnnnnnnnnnnnnnnnnnnnnnnnnnnnnnnnnnnnnnnnnnnnnnnnnnnnnnnnnnnnnnnnnnnnnnnnnnnnnnnnnnnnnnnnnnnnnnnnnnnnnnnnnnnnnnnnnnnnnnnnnnnnnnnnnnnnnnnnnnnnnnnnnnnnnnnnnnnnnnnnnnnnnnnnnnnnnnnnnnnnnnnnnnnnnnnnnnnnnnnnnnnnnnnnnnnnnnnnnnnnnnnnnnnnnnnnnnnnnnnnnnnnnnnnnnnnnnnnnnnnnnnnnnnnnnnnnnnnnnnnnnnnnnnnnnnnnnnnnnnnnnnnnnnnnnnnnnnnnnnnnnnnnnnnnnnnnnnnnnnnnnnnnnnnnnnnnnnnnnnnnnnnnnnnnnnnnnnnnnnnnnnnnnnnnnnnnnnnnnnnnnnnnnnnnnnnnnnnnnnnnnnnnnnnnnnnnnnnnnnnnnnnnnnnnnnnnnnnnnnnnnnnnnnnnnnnnnnnnnnnnnnnnnnnnnnnnnnnnnnnnnnnnnnnnnnnnnnnnnnnnnnnnnnnnnnnnnnnnnnnnnnnnnnnnnnnnnnnnnnnnnnnnnnnnnnnnnnnnnnnnnnnnnnnnnnnnnnnnnnnnnnnnnnnnnnnnnnnnnnnnnnnnnnnnnnnnnnnnnnnnnnnnnnnnnnnnnnnnnnnnnnnnnnnnnnnnnnnnnnnnnnnnnnnnnnnnnnnnnnnnnnnnnnnnnnnnnnnnnnnnnnnnnnnnnnnnnnnnnnnnnnnnnnnnnnnnnnnnnnnnnnnnnnnnnnnnnnnnnnnnnnnnnnnnnnnnnnnnnnnnnnnnnnnnnnnnnnnnnnnnnnnnnnnnnnnnnnnnnnnnnnnnnnnnnnnnnnnnnnnnnnnnnnnnnnnnnnnnnnnnnnnnnnnnnnnnnnnnnnnnnnnnnnnnnnnnnnnnnnnnnnnnnnnnnnnnnnnnnnnnnnnnnnnnnnnnnnnnnnnnnnnnnnnnnnnnnnnnnnnnnnnnnnnnnnnnnnnnnnnnnnnnnnnnnnnnnnnnnnnnnnnnnnnnnnnnnnnnnnnnnnnnnnnnnnnnnnnnnnnnnnnnnnnnnnnnnnnnnnnnnnnnnnnnnnnnnnnnnnnnnnnnnnnnnnnnnnnnnnnnnnnnnnnnnnnnnnnnnnnnnnnnnnnnnnnnnnnnnnnnnnnnnnnnnnnnnnnnnnnnnnnnnnnnnnnnnnnnnnnnnnnnnnnnnttgcttggtagatctttcctccatccctttattttgagcctatgtgtgtctctgcacatgagatgggtttcctgaatacagcacactgatgggtcttgactctttatccaatttgccagtctgtgtcttttaattggagcatttagcccatttacatttgaggttaatattgttatgtgtgaatttgatcctgtcattatgatgttagctggttgttttgctcgttacttgatgcagtttcttcctagcctcgatggtctttacaatttggcatgtttttgcagtggctggtaccagttgttcctttccatgtttagcacttccttcaggagctcttttagggcaggcctggtggtgacaaaatctctcagcatttgcttgtctgtaaagtattttatttctccttcacttatgaagcttagtttggctgaatatgaacttctgggttgaaaattcttttctttaagaatgttgaatattggcccccactctcttctggcttgtatagtttctgctgagagatcagctgttagtccgatgggcttccctttgtgggtaacccaacctttctctctggctgcccttaatattttttccttcatttcagctttggtgaatctgacaattatgtgtcttggagttgctcttctcaaggagtatctttgtggcattctctgtatttcctgaatttgaatattggcctgccttgctagattggggaagttctcctggataatatcctgcagagtgttttccaacttggttccattctccctgtcactttcgggtacaccagtcagacatagatttggtcttttcacatagtcccatatttcttggaggctttgttcatttctttttattcttttttgtctaaacttctcttctcacttcctttcattcatttgatcttccatcactgataccctttcttccacttgatcgaatcagctactgaggcttgtgcattcgtcacgtagttcttgcgccttggttttcagttccaacaggtcctttaaggacttctctgcattggttattctggttagccattcgtctaaatttttttcaatgtttttaacttctttgccatgggttcgaacttcctcctttagctcggagtagtttgatcgtctgaagccttcttctctcaacttgtcaaagtcattttccatccagctttgttccgttgctggtgagtagctgcgctgcgttcctttggaggaggagaggcgctctgatttttagagtttccagtttttctgctgttttttccccatctttgtggttttatctacctttggtctttgatgatggtgatatacagatggggttttggtgtggatgtcctttctgtttgttagttttccttctaacagtcaggaccctcagctgcaggtctgttggagtttgctggcggtccactccagaccctgtttgcctgggtatcagcagcggaggctgcagaacagtggttattggtgaacagcaaatgttgctgcctgatcgttcctctggaagttttgtctcagagaagtacccggccgtgtgaggtgtcagtctgcccctactgggggatgcctcccagttaggctactcgggggtcatggacccacttgaggaggcagtctgtccgtcctcagatctccagctgcgtgctgggagaatcactgctctcttcaaagctgtcagacagggacatttaagtctgcaaagttttctgctgccttttgtttggctatgccctgcccccagaggtggagtctacagaggcaggcaggcctccttgagctgtggtgggctccaccctgttcgagcttcctggctgctttgtttacctactcaagcctcggcaatggcgggtgcccctccccagcctcactgccaccttgcagtttgatctcagactgctgtggtagcaatgagtgaggctccatgggcgtaggaccctccgagccaggtgcaggatataatctcctggtgtgccgtttgctaagactgttggaaaagcgcagtattagggtgggagagacccaattttccaggtgctgtctgtcacccctttctttgactaggaaagggaattccctgagcccttgcgcttcccgggtgaggcgatgcctcatcctgcttcggctcacactcggtgtgctgcacccactgtcgtgcacccactatctgacacttcccagtgagttgaacccggtacctcagttggaaatgcagaaatcacccatcttctgcatcactcatgctgggagctgtagactggagctgttcctatttggccatctaatttaaaattctttagactcttctgaggtcacacctaaccaacaaactatgtacatatagcccaataattttatttagctagaaatattatcatattatactgtccaagcacattatatgctttataaaacatgctacaaaatagaacttggaaatggttaagaaataaacaaattgaaatgcagagaccactaagagagagagtatttgctttatagggctttattttagggcacacattatttacatcaacgatatggcaggatggaagagtgcaaaaagcagggctttgacatcattcggaagtgagttccaaggccagctgtgttcaagtcagacaatggtgttcaaaccctgagtccatttactgtgtggactggacagtgcacttaacttctccattttctcatctataaaatggaaattatggctatgatagggttgttgcgaagattaaaatagataacatatggaagacacttagcttatatagcaggctctcagcaaattacttctgctgctacttttgcctctgggatgttctgcaggccatttccctgctcaaagcctaaatttctctatctgtaagatgtagatatagattatttattttgcaagttttctgtgagaattaaaagagataatagataacctacttgcctgtctttcacattcgcaagcactgaataaatggtagttgactgccccagttactcccttggtttctccaccctcatcctcaactaaaataagaagctgaaacatgactgtcttgccattaaaagtctgaagaaaaaactcacatgtcatattgagcctcctactgaactcagccacatatggaagtttgaagtgggtcctcgaaatgcatgtactgaactccagagttaagagagccattagcaggaagaaggactttggcgaggggtcattcctgcaggaggtccatgttgtggtttgcaagtgtcccccaaagttcatgtgttggaaatataatccccagtgcagcagtgttgagaggtggaacccttaagaggtgatggggtccagaggactctactctcatgaatggattagtgtcattatcaggagagtgggtttgttataaaaacaagctcagccttctcttaagtgaactgttacccttccaccctttgccctgggatgacacagcgagaaggccgttgtcacatgccggcccctcaaccttggactttccagcctccagaactttaaaaaataaatttctgcttattataaatcatccagtctcaggtactctgttatagcagcacaaaaccgctgaagacaatccatgtccctcaaaccctgttcctggaattttcaaaagcctgttcctcatgcctccccgaccctgctgcttctgtaactttctcatctcagaaagtggcaccactgtgcctcctgccacttgggccagaacctgggattcatccttgactcctcaattcatccttgattcatctagagatgcaattttctttgtgccccatcctaacccacaagtcctaggctgtgcctctaaacaacaggaatccagaccctccccaccactgccgccatacctagtctaaaccaccagtatgtctttgcctggtatactgcaaaagcctcttaactccagggctcctttccaggctgtctgctgtccattctccaaagtgccaaagtgatctgtttaaagcattaatcagatgtcttacttttaaaaacactccaatggcttacttattgccgttagaataacattcagatcccttattgcaggtcagaggcatagcttgatacttccgtctcctctcctcccaccctccacctcccacaaagtgcccacccctttttctgcagtgccttgtaggtgaaaggtaacctcctcaggaagccttctcttaccactcaagataaataaatgtcctctccttctattacactttagcctgttatcctatttcatttctgtcagctacttatcactaaaatgatcttgtgtgatttcgtatttattgtctgtcttctcactagaacgtaagctccatgagggcagagaatttgttttgttcacagctatatcctcagaatctgtaacaatgcctggtacatagcaagtacttaataaatatctgttgaatgaagagtatccaataatctcatatcacttcatgcaaaagggctatggcaactttgcatgatctagaaacttccacattatccgtggctgatgggagtagtgttactgtcatgtcaaccaaacttttccagttctctgactaaatgaagtacagtgttcttgggattctataagttctacaagaattgttaatttttatgtttattttcctgataatttaaaacaattcatataagcatatcagagatcatctacagtgactgtagatgtctcaggtattcactccctctagtttgctgttattcatcctgtacaaaaccaaagccattatgagatggggtgaggaggattctgctcttggaggaagctgcgtatctatacacatgaaatgaatgcactgaactccaaagcttttatttttaaaaactctgaatgttacctctgctggcccttgctccacccaactttagcatgaagaccagtggtatagaatagttcaaactcatggcaacaatggttccaaatgttagatttttacttacctgtataatttttttttttttttttgagatgtgtctcactctgttgcccaggctagagtgcaacggcacaatctcgactcactgctcccttgaactctccacactcaggtgatcctcccacctcagctgagtagctgggactttaggtgcacatcaccaatctggctaatttgtgtatttttagtagagatggggtttcaccatgttgcccagactgggctcaaactcctggactcaagtgatccattcaccttggcctcccaaagtgctaggattacaggcataagctaccactcctggccctacctgtataattttttaaatgtctaagttttgtgctgctataacagaataccttagactgggtaatctataatgaacagaaatttactgactaacaacctggaggcggggaagtccaacatcaacatgccagcctctgttagggcctttatgctgcatcatcacatggcagaaggtgagagggtgaggggggccaaactggcccttgcagaacactaatcccacccatgggagtggagccctcatagcctaatcacctcttaagggccccacctcttaatactattacaatggcaagtaagtttcaacataagttttggaggggacaaacattcaagccatagcattaaaattaatgtctgggaaaataacactgatgatctctattaggccatacttgcattgctataaagaaatacctgagatagggtaagttataaagaaaagaggtttaattggctctacaggctgtacaggaagcacagtggcatctgcttctggggaggcctcagggagcttttactcatggtggaaggtgaagcaggagcaggcacgtcatgtatgaaagcaggaatgggcataaaacaaccacagtcttatgtaaactcaagagtgagaggtcacatatcaccaagggaatggtccaagctattcatgagggatccatccccataatccacacacctcccaccaggccccacctccagcattggggattacttttcaacatgaaattcaggcagagacacacatccgaactgtgtcatgtgcattcctttacgttgaaagagaagagaaagtactaatacctgtactagagaaaagcaattctctaaggatgtttggggaatgttcccatgacttttaagtgacaatgctattcctgtgaccacgttggctcctaggtttttaaatttattaaatgtctatcctcctacatatggcaatactgattaattagttgaaacattctttttccgggaggttggcggcgcggggctgaaggctagcaaaccgagcgatcatgtcgcacaaacaaatttactatttggacaaatacgacgacgaggagtttgagtatcgacatgtcatgctgcccaaggacatagccaagctggtccctaaaacccatttgatgtctgaatctgaatggaggaatcttggcattcagcagagtcagggatgggtccattatatgatccatgaaccagaacctcacatcttgctgttccggcacccactacccgagaaaacaaagaaatgaagctggcaagctgcttttcagcctcaagctttacacagctgtccttacttcctaacatctttcagataacattattatgttgccttcttgcttctcactttgatatttaaaagatgttcaatacactgtttgaatgtgctggtaactgctttgcttcttgagtagagccaccaccaccatagcccagccagatgagtgctctgtggacccacagcctcagctgagtgtgaccccagaagccacgatgtgttctgtatccagaacacacttggcagatggaggaagcatctgagtttgagaccatggctgttacagggatcatgtaaacttgctgtttttgttttttcctgccgggtgttgtatgtatggtgacttgcggatttatgtttcagtgtactggaaactttccattttattcaagaaatctgttcatgttaaaagccttggttaaagaggaagtttttataatctaaaaaaaaaagaaacattctttttcctttgttaaaaaaattaatttgttgcagcttttaagaattccagaagctgggaagattacttagtgttaggagacaggtaatgcaaagggctgaagtgagtaatccaggaggggctgaggacagtaggggccctcctctatgactgagggacagaaaagcaacagggttaaacacaggtcctggtgccagggagagctgcagcacagccctgggtctaccatcacacatgccatgacctttggcaagttacttaacctccatctgccttagtctcctaatctgtaaaatgggaacaatagtaatactgcgtggggtcgttgtgaagactaaagctgctgtgagtgtacctgcacatagtgagcgctcagtaagtgttcggtgggtggcatacgttcttgatttgctcagactctctgcctcttgcctttattccttcctgttgggacgtgagagtctgctgatggggtgttttttacaagaatccatgtatttagtggcagtgattgatccactagagccaacagaagacctagacctgcactgtgtcattgtcgcttactagctacgtaatgttaaataaatctcttaacctctctaggtatgtttcatcctctaaaaagggaatcatgagccttgccctacttgacagggttcatgaggatcaaaagaaatagacaggaatgtactttaagatttaaaatattattcaagtgaaaatatggtattatgagccacttgaaatgcatagatatgaagtaaaaaaatgtttgagatattggctgttggtgggtcttctctgtttgggaatgcattttaattctgccatgagcagccctcctccatttaatgtgtggtctctgtgaggaaagtatttcatttcatctctgcttctttttttttttttttttttttttttttgagacaggatctcactctgtcacccaggctggagtgcagtggcacaatctcagctcactgcaacctccgccccggggttcaagcagttctcctgcctcagcctcccaagtagctgggattacaggcacacaaccccaacttggctaatttttgtactttttggtacagacggggtttcaccatgttggccaggctgattgaactcctgaccacaagtgatccgccctccttggcctcccaaagttctgagattacaggtatgaatcaccgtgcctggcctcatctctgcttctaatggtcaaggatcagtgtccacacagcaaaggttaactaactgcatgggtggagaacctgccccatcaactttcttttccatgtattcaccaggtgtcacccacacatcatccggtgggcacaggagagcagagacagcatgcgcacacggtcctgtcctccccacccagaggcacagtcagcttaaggtacgacagcttaaaaaactccacacacctcaccacaagggaattaactgtaaaacagaacagcagagagaaccctgagaaatgatcttctataaaatttctccacaattgacaaaacaccctttctttttttcccatggtttttaccatccattacctattaatgaagatttgttgtttcggggggtaatgatttacaataaggtttttgttttttgtttttgtttttgttttacagaataggtaatggtgattattgggtctatttggagccatgttgtattaatctctatattaaatgaactataagatacaatttttaatgcagatcaagagtgatctccccagaagttccttaaccaaaatacaatagtccccttttatccacagttttacttttctgtggtttcagttacccaaagtcaattgtggtccaaaaatgttaaatggagaattccagaaataaatgattcataagttttaaattgcacaccattctgagtagtgtgatgaaatttcgtgccatccagctcagtcctgcctgcgatgtatgttatccctttgttcagtgtatctacactgtctacactactcgcccattagattgactgtaacgaactgtacttgtgttcaagtaacccttcttttacttaataatggacccaaagtgcaagagtggtgaggctagaattcagatatgctaaagacaagctataaagtgcttcctttaagtgaaaaggtgaaagttttcaacttaacaaagaaagaaaaaaatttttatactgagattgcgaagatcgacagtaagaatgaatcttcaatccatgaaactgtaaagaaagaaaaagtcatgcataatatatatatagggtttgtactatttgcagtttgaggcatccactggaggtcttggaacatattccccacccttagcagggactgctgtactagaaattgagaatggtggaagcatttgaaagtacctacttaaaaacttgaaagagcaatgttgctctctactggcatttcttgtgtttacttgtttaattcagttttatgaagatgcccaaatggacatgtccacaagtagacaaatagaagcctaagggatatggtagcaaattttaacagttgagtgtagtggctgtgaaaacaaccagcacatattagagtctgaacctagagagaagtcgctgtctcccaggctggagtgcagcgcgatcttggctcactgcaaactccacctcccgggttcaagtgattctcctgcctcagcctcctgagtagctgggattacaggtacatgcctggctaatttttgtgtgttttaagtagagacagagtttcaccatgttgacaggctggtctcaaactcctgacctctggtgatccgcccacctcagcctcccaaagtgctgggattacaggcatgagccaccatggccagccttttttttttttttttcctccctcactcttgcaagggatttttgagctctccatagaatgcccattgaattcctcccactaaactaaccttcctcgtctgtcttacaggaagcccaggggagagggcaaaaagtgtcggaaggtgtacgggatggagaaccgagacatgtggtgtaccgcctgccgctggaagaaggcctgccagaggttcctcgactgagagacccccaggcagaggggctcagggccctgagccgctcctgccctggcctgccactgcaggtgttggaaagagcttttcctactgaataaaacacagttgaagccaggaaaagccctttcaggaaccttggaggaataacagcaaaaacacagaaaaattgtttaagtcaccacctatgacaaaagaaagttgctcttactgagaacccagcttggagcagctataactagttttttttccttcaaaagaaaagtcaactttttttgctgtatgtctagacttaaaactgtggacttctgtagcaattgaaccaacaaagcccattttacctagaaaggaggcatattttgataagctttctgaattatgccattttcaagatttttttgacacttaaaaaacaagctacaggttattcagtagcatttgtacaaagatcaatacttacttttgttgtgaataatcttttccgtatcttccatttgacttcttggagcagtatatgtcaggatgtgttgcaagacagcgcagcactctgggcatcttttctatggctttttgtttgtttttcttttaagaatggccccacactgaaccatggtagagctattagtttgtagggccccagatggcataaactcgagaagggattgtccacggaaatcaccagcagacttcagcccgaagctgagttcaggaagtccagctgtcactgttgggaaacatctaggagtcttccttggatccataagaagctcttcccctaaaggcagcacagctaactctactctctacctgccacaactcagtcaagaattggcacctgtagccatctgggtaagcctcgatgcttctttcagggatgtgacacaaatggcaactcggagctatttgttactgcttgtctgtcaagattgtagccaggttaatgggtcattttccttctctccagactccaccactgactgatttcagaagaggtagagaactccaaactgtcccagcaggtttgctttagacaacagagcacagcccacatggccctacctgttcagaaagtcatgttagatcaacaaaccacttccattctgagtgcacttttataggttttatgctttagcatgtccgggagatgagttaattaacaatataaacattatgtgagtaaatggaaggtccaaactttaagtttttcttataaaaatattggagctattcatttaagaatttgctcaaaagggaacataacgccaaaaggaaaatgcatgtaggtataggaatttctcagtttagtagggccagggcttgcactatgttccatttattgggcttcgtaacttacttgcttgtttgtttgggggatagtggtgtggggagaggggagtcgtcaagccctataaataagctcattctctatctacccgactctcaattgccctgctaaagagttatttctcctatacctatgcaaagtaggaagagcaccttataggaggcactgtatagggacaggggacatgggatcagccataggaatgttaaatgaaattgcacagaggaaagtttaatatatgtctagagattatacatacacttttttaagcgtaaaaagaagacatctagtaatgacagatattctttttatatacaagcaaaagaaagtataaggaggttctacagtgcaacatccacaatctgtgcattcacatattatgggacttttattttttaaactctcatataaattttttaaaattactccttggaagagatcctggtttttttcttcatttatttttttctttaaaaacatttattttaagagaagagaaaaagagcttcatctaattttgcatcttgattaccaatcagtactagtcacagcaccagcaatactgtatgttttagactgacaaggtcagccaggaaatggcatttttttaaacgcagaaatgtgtttgtttcctctactctaacacgtcctttctcctcctggtgtcctgtcaccccccatgcagcaccactgatgcgagatgatgctctggcctggtccaggaagccctgagccatgggcagattgcccagtggccttgggcggccagagcttgtcacctgtttaaacaagttcaccatgtgtttaaatgacagggtacagtcctggaccagaggtttttctcttcagcaaagctccctggcccttgatcgttggactgttactaatagaaaaagattcaagtcatgaagtataaaatccatcccccatcccagaactttgaaacacaaggagggagagatctttgctatggagcagtcctggagcaaagccccgtggcttccacccccagatatataccccataagtagtgctgagctccagcttagctgagccaagctcagtccttatctggtgttcagccagtgcacaggtataagcagaactacagagctgaatgtagcttccctgggatctcttctcctttctaaagcatttttcacacagttctgtacctcctacccaagttggggctgctttctgcctgctagcccacggctctgtgtactttcttttctggcttcaggtgcagacagaccctcagtaccttcctggacacagacacatattccctggaccaaggcgtggaataactagtagaccaccaagccacaggtggctggtcttgaagaaaagggattatactccttacaggccacccagaaagctatgaattccaatatacaccactgatcgtgcaagttagggttttttttttttaaacgtagcattattttgttatattttggaactaaatgaagtgccaaattaaccagacattcgtttgatgccatctctgtggaaccaagttctctgtgtgtgttcgtttggctgggaggagggggaggactgggcagactgctcccacagcaggctggcagtggaactggagccctggccaccgcagggagctcagaggccaatctacgcaaaaggcatgcaaaacaatggattctggtcccaaaatatttctaagtaaggcatgatgtagccttttgattttttttttatcctttgacaccccagccttcagaaaaggtttttcatctctctccaaagaagtcatttcatagtgactgacaggacattctccagagagcgacaaagcagagtggccagcaggcagtggtgttaagccttgggccttcccagcagatgtgtgctgcattggtgggtgggaggcagtgtgacagcctggagaaaacacacaggtagcaagggagtcaggggggaggtacaagagggctgtggacacctggctcttgctcatcttcttggtgctgatcagctggtggtcaccatccctaagtacctcccagggagctgccattttctcctctgggagcagctgcctgaagcaaggagagaatgacctgaagggaagtacctccggccaagagtgcagggctgctgtgcctagcctgagcgggccatctctagcagatatggacttctctccaccacactagctgaaaagttttctcccttggttggcaaaagccagtgtcaggaaaaaagctgtgggtttctgaccaagaatgtgtgcgcttagctgcaaagtgcctgtcagcagctccaggcaccaacaaggtgcccttttattagacaattcctgcccgaacataaccatattgcagatgaaaattttcaatagagaatgacacaattcttgacctttctaaaaacttttcaaagagatagtcacatgtgtatatgttgcaaaagatttttgaaactgaaatgtcctccattaaatctcaagagcactcgagttttaagtctgctgtttctggtgtcacactaagacacacttttgaaagcagccctgggttctgaattagttggcactgctgaatccatgttcccccttcatcagactccaaagtgcagcattcacttgcaaaggttgagagaaaagtggccagaattgtacatataacagagaataccttgagaatagtagcaaaatactgtaaataatattcatttcctcagggaaaaataaagggcatgcaaaaataggtctggagactcctgaaactaggaagaattttgttatcactaaagtcttttatagtcagaacaatttttttttcaaatgaacatggtatcatttcaagacaaatttatgtgaactgggcagtactgacatttgtgaggcataggggagtgccctgggaaaacggtttggagctgacctgtagcctaaggctaacatttgaaccacaggtgcaatgcctgggggtgggggagggggacggggtgggggtggtattcctagactcacgtaaggctttttctgaatgtaattgtgaatacaaagccttgctggtcctttttatcattacccaatggatgactgtttattagctatcagcagaattccgtaggcgaaagcaagccgtgaacgatgtacattttgctttaatagcatgttagcgaacaaacttccatggacttttgtggacaaggtgctgctttttctcatgaccctgtagaattgctatcgaccacatcttctgtagcactgacctgtgtgaactcagggaagaatttgtgcatacaaatgagtggaaacagagcaggattcatgaatatgaatgagaatgtgaatcattttggagaatgccctgggcacacgggtcaactggaaatttcatttctctaagaaagtagccctaccagcggcacggactgttcctgttcctcatacctgtggggattcctccatattggaactgtttcatgtatcttttttgcattgtaactagccaaacctgaagtcagtaaataaaatgagattagcactttttttaggtaccagttgtatcactgagtaatgcacaccaatagagcaagaaagtataaaatgtatttaagaccaactggtttgcttattatgactgactttgaaaaagcccatatccaatgatatacatgctttaaaaggtatatctatcgtaggaccaggaaccaaaatgggaattttacttctggtcctgttttgtaaatagttcctttttttgaagacaatctcatgttttataacttttgttgtgggtctgagaatcacaatggtaatatgtcttggcaaaacataacctttaaatacaaaaacaattataacttaattttccaaataaaacaagaaatacactgattaggcttctacagttctaagagacatgacactttggtaataagcgtcagtactctacttctcaagttaactggaaatattttacaagatgcagtgttttgtaatcacaaagaacgcagacattttgtgagaaatgaccttggttttatacattgtagcttattttttaaaatatagtattttaccaggcaggaagtattaatattataagtaattcttgctcaccaaacaaagggctatgtctcttttaagcaaatgttttgatgcatatctttttaattaaccctctgcagcaagggtagaaatacagatcagatggaatgggtattataggagaatcaagatagcaacagctactccttttaccattactagtgtgttttcaaagtatggaaaaagatgcctgaagagtcattttatatattttaaatctaaaaagtgttaacaggtatgcttataggccatgggagaaatattcttataaattttttagtgtaaaatgataaattctgtgtcacaaagacaagtttaccacttgacctaccagaatcacagatacttgcatttaactagcaagtatcatttggtggaaatttctaaaatcatagtagacaggcccaaagatagaattcttaggtgatcagtagtgtttaaaataattttgtcctcagcactaactatataactgtaatttctacataagaacaagtgcttccaaaatatagtggagggaaaaaataaaaaaggaaaataaaaaaacaaaacaaaaagaacaagtgcttgatttttcactgtgaagaactagcaggcacatgaggttgtgatcagaaagtgactgagttcccaagaaccaggaaacagaggggagttgtgaagagtttattaaaactgtacaaataattcagagctttgccaaaaccatttcataatgctgtacagttttttcaagcccactcactgttaaaacaagaaagcaccttttctttctaagattttagtaatccaaaagctagcctaattagccaagtatgcagataacatcaaaagcaaagctgagatagaacagccatacacccgttgggcagctcttatgaggtggtcagaaggtcactcagaccttggtttcaaataggctttagaatctgcacacttgaggactagaaatgcacagagttagggaaagccatgtacaggcttggctcctagtctttgagatgaggcgtcttgcaaatctctgttttcactccttggaatgtctccattgttagcattaaagtccccaagaagtttttattgctgtacggttttgaacccaatgagtctcatttccaaaagattcctaattctatataggagaggttgcaaatgtcagtgcctcagaaggaccaggcaagttctgtaaatgattgatgtggataaggcaaagaggaacacaagaatggtggagaccaggttgaactgcagaacacatgccctctttgaaggggtgcccacactcagctctagacaatcagaaccatgcagaaatcaggcccagggctgctagatcttctgacgtggaagtatgatattacctgacacgtaagtgttgacaactaactcaaactcttggccaacactgtgcagaccaaagagaagctgtacacagacaggtgcagcctgcagcccccagtttcaactattgggaaaagtggatttcacattccacagttgtcaggtcaggttcatccatcagccccacaaactcacatgtcggcactatctgggcaactaaaataaaagaggggaaagagatcatttctccccagatatcattctcatggcagacttgaatatagatacgctgagttatccagctctctcactctgcctccttttggcatgcccaggctgtgccccgtaaagtgttgaatcactgttatcctaattttcttagtgttttctaccgtggccactgtgatgaggggctggcaaagagcagcctcgtgccttccgagaaggctgccaggagcctctgaagcttgaagcgagcacacattgcctccttgtgccaaagcccttggccagcctccccacactccttccctctccatccggcctcatgagtcttcgttaccaagtaaaattaccactgcttcacctctgatacagcagaagccttgcttcagaactggtaggcatttaggctatttcagagtgtccactaacctcaaaaggaggtttttccacatacaaaaccctagcatctttgaggggaaagcaaaatgagaataaattatgtcatgaaaaaaattagaagttgcttccttcatttagatggactaagttattttaaactctatcttacatcagagtcctgatggtgttgggatagtcactgaccctttcacgtatgtaataagatacgtctcgttcacacactatttcatttgatctttgtaagaacccagtgtagaataggaatatttaaaatcaacattacccacctccaaggccaacccagagtagtcttgaacctgagtcagcctcagtattgcttgcaaggaagagggaaggggctcattaaaggcctggctcaaaccttagtcttccagactgactagggacgtaagaagacccagggacccaccatgttctcaaaccatctattcagtccaggcctttcagcatagacataaagagcccacccgttactcagtcatgttgccaagtgcaaactgatttatccccagatgaatccctttactgtagcagatccctaatccctaaatttcagccaatttggtagttaattataggagtttattagctaaatgtatgttctgagtaaaagttttgactctttggggaaaatttattttgctgctagcatacaacatttgctatgtatataaacttaagtcaatgccagaaattttaaaaccagctcaaatttataatctgtaatgatcaaatcaaaacatactgtaaactcagagttggaaacgcctggtaatatggttaagtcatgtttaaatatgaatgcaatttaaatgacattggcaatgcctgagatttctttcattgtgaatgattaaaaggcagtccaatatatgaatggatttcatcttacctttctcccgttaatttactaggtgtaacatcttgagtgtaaagtcattcacaggcagttgggttgtggagctagaaggagcctcaaaaaaaaactttttggccagactcctacatcatgaacagggtttttgatgaataatatttattattatgtttctaaagtaatacagtgttggagaatgaaacagtttagtcctttcctcttctgatggaaaagaatcatagcgccgttgccatgacaataacaggatgtagaaagacccatgaagaaagaaagaagaaagctatggttccgaaagcaggtaaccacagattttgaaaggaggcagagatggtgattaaactgtagtccttgttttttaaaatgttctttcatgttaggcaccaccacatagttaataactaccaacttctaaagagaagatccccttgatttatttatatcatgaaaatactaaaaatcaattctcaagtctaattaactattacattatcttgctaggtccttttccctaaatttttaattcagaaaattaaccagaattggccagatgcagtggttcacgcctataatcccagcactttgggagtccaaggcagatggatcacttgaggtcagtagttcaagaccagcctggccaacagaggaagaaagagtgaaaacaaaagaagaaagagggaaaccctgtctttactaaaaatacaaaaattagtcgggcgtggtggcgcacacctgtaattccagctacttgagaggctgaggcaggagaatcccttgaaactgcaggcagaggttgcagtgagccaagatttcactgctgcacctggggtgagactaccattaaggaaggaaatttcctttaaacagaaaaaaacaaaggtgctcatctatttcttctgaattctctctacatccttgacttaagaggaaaaccagcactcaagaaacagctttaaaagagaacagtccccattctagctaccagtcttgctttcccccatcttggcaagccccagtgaatttgccattgaaagattaccctcccctttgccctcatctgcctgagctagaggccaggctgttgttaatgttttttcagttccaaagcccctgatgggacattcttgtttctgtgctactgctttctctctcttaaattaaggtgcaaggggataaatattactataactgggatgtaaggctcagtcagtgtggctattccctcccttcgggggaaatattccatctgtctgaacggttttaggtgatcatgaggagagcggcttagtcacacagccagccacgctcatcacaaaagatttgttcagactcactgtaaagaatgacaaggcagatagctaatcctttcactgtgcctcaaagcccgccgtgcaagtcaccaaccctaccggtcctctccacgtgcgaggctaatagagtgatcagaaccaggaatgtgagctgggttccaccttaggaggggacaatgaggacagagcaagagggctccatgtttaattactccaggctctgacttctgcccacaattacagagcatgaaagcagaattggcctttagtaagtgaaaaggaagtggctcctgcagcatataattgttataatttcgtatttatggaaagagaaaaggacttcagtccactcatgttgttaagcacttgtccctcactccactggagcccccttcctatgttttgggcacagatggctgggaccgagaggaaagaggaagagcggctgccagagtgtgaatatacccctcagggatatacagcggagtttcatgataaactacccatactttcccaaaaaaggttgaggagcaatacataactttgcagattacaaacccttgttttactttttaaaccttttttccatactctgcttattggaaatcgatggctgtgatgtgaccaacacctgtgatgatagcaaagcccctcctttcacagtctcctgactgttcggggaacctccttggtcattggtagaaagctttagaaaagacttagctttttagggaagaactaaaaaatctccaaaacat

SEQ ID NO: 329 - DNA, 1313 bp, Homo sapiens
agagcctcagcggatcctggaaggagggcggctgcgtgccttccagcaccagcagcagcggctactggagctggagcgcccccagcgaccagtccaacccgtccacgccgtcgccgccgctctcggctgacagcttcaagcccttccgcagccccgcgcagccagacgacggcatcgacgaggcggaggccagcaacctgctcttcgacgagcccattcccaggaaaagaaagaattccatgaaggtgatgttcaaatgcctctggaaaaactgtgggaaggtgctgagcactgcagcaggtatccagaaacacatccgaaccatccatctggggcgcgttggagactctgactacagtgatggagaagaggacttttactacactgagatcaagctcaacacagactcagtggcagacgggctgagcagcctggccccggtctcaccttcccagtccctggcttcacctcctactttccccatcccagattcaagccgaacagaaactccttgtgccaaaacggagactaagttgatgacgccgttgagccgctcagctcccaccaccctctacctcgtgcacactgaccatgcttaccaggccacaccccctgtgaccattccaggatcggccaagttcacccccaatggcagcagcttcagcatttcctggcaatctcctccggtcactttcacaggcatcccagtgtcacccacacatcatccggtgggcacaggagagcagagacagcatgcgcacacggtcctgtcctccccacccagaggcacagtcagcttaaggaagcccaggggagagggcaaaaagtgtcggaaggtgtacgggatggagaaccgagacatgtggtgtaccgcctgccgctggaagaaggcctgccagaggttcctcgactgagagacccccaggcagaggggctcagggccctgagccgctcctgccctggcctgccactgcaggtgttggaaagagcttttcctactgaataaaacacagttgaagccaggaaaagccctttcaggaaccttggaggaataacagcaaaaacacagaaaaattgtttaagtcaccacctatgacaaaagaaagttgctcttactgagaacccagcttggagcagctataactagttttttttccttcaaaagaaaagtcaactttttttgctgtatgtctagacttaaaactgtggacttctgtagcaattgaaccaacaaagcccattttacctagaaaggaggcatattttgataagctttctgaattatgccattttcaagatttttttgacactta

SEQ ID NO: 330 - protein, 222 aa, Homo sapiens
MKVMFKCLWKNCGKVLSTAAGIQKHIRTIHLGRVGDSDYSDGEEDFYYTEIKLNTDSVADGLSSLAPVSPSQSLDPTFPIPDSSRTETPCAKTETKLMTPLSRSAPTTLYLVHTDHAYQATPPVTIPGSAKFTPNGSSFSISWQSPPVTFTGIPVSPTHHPVGTGEQRQHAHTVLSSPPRGTVSLRKPRGEGKKCRKVYGMENRDMWCTACRWKKACQRFLD

SEQ ID NO: 331 - DNA, 52787 bp, Mus musculus
  misc_feature (1)...(52787): n = A,T,C or G
ttgaatggcagtttttagaatccccaccattctctactgtgttacactcagtttgatgtaactaacactgctccagtctggcctcttctccaagtgcttgagttttctggggttttaaaagttgacttagtttcatgtagtgccaggaacggaccccagcctcaagcaggcaggacaagtcccaccccagccttgagctttcactctctgatcctaacctgaattcctcccactacctcctgctttctgtagaggctcctgctgtggttccctcccttaagttccagcctgaacatggaagaaacatgggtgttgcttttttttttgtcttataagagttgcaagtatgtggaaaagaaacaggagagaagtcttcctgtgtggagagacaagaatgaacagatggctgaaggcaaaattctaggaacagcgacaagtttgcacgggccaggagaggttttgctgtgtaatggacacctcttccttctccccaacgccgggttggtgaagatagatacggtcaggattgccccggcatttgccgttgtatctgagggcttggtgaagatatggtcaggattgccccggcatttgccgttgtatctgagggcttgatgttttgtttgagggcctgttcagtcttattgtttgcaaaatctgaaaagagtcaaaaggagaaagcaagccattctaagaaatcccgactagctttgtgacagcaactgtgactagaaaatcaagttgtcctgtgtttgcaaagaagctctttctcctgacattctcttttgtacatatgtacaaatacatctgtacatatggtatgtatgtgtgtgtgtgtgtatatatatatatatgtgtgtatatatatatatatataaatttttttcttggcaaagttatgaaaattaaatttgatcacactcataaaggggcctattttgaagcatgttatggtctaggccaagttctgtctgtttcctatattgaaaggagatcccacccccgacctctctggatttttttttttagacaaggtttctctgtatagccctggctgtcctggaactcactttgtagaccaggctggcctcgaactcagaaatccgcctgcctctgcctccggagtgctgggattaaaggcatgcgccaccacgcccggttgtggatttttttttgaaacagggtttccctatctatatagctcggcctaccccaaaactatgtagaccaggcttccctcaaattatgagatccacctgcctcagcctcttgacagctgggattgaaggcctgcaccacaacattcagctggaaattctcagtatttggttctgaatatattctgcaaaatgtagtgactcagagactttatacatcaaaaggttgcatttgttcaagtccttcaagagaaaatgtatgtctctgcatttaattgttctaaattttaaatgactttgctctgtaattaccatttcaccagacaattaaaaacaaaaacaaacctgaaagatttaaagtgaatctacagtgaacaaaaattcttcagatatttaagagataggatcggtgaccacccgactaaggtactgttcccaaaggcaaaggacctggtgtgcagactgacttcatgaccttctgccacatgccacagaagagccggtgctcttgctgtgtgtacttgagtgctcatagttatgaataaccaagtacaaaacccaaagtggtttttatcagtaagaagcattgaacatcccctcttctgagtctggcatggtggcacacgtacatctttaatcttagcactcaagaggcagaggcaggcagatctgagttcaaggccattctacctaatctacatagtgctctagggcaagccagggagggcgatagagtgggatgctatctgaaagtttactaaatgattaatccctacttaaggtaggcaattgcagggaggctgagtggtttgcagtcagactcatagactacctatcactcctcttccctgtgctactattatcctagaaaatccagacattcagacttggacatagacacacaacatacaacatgcctatagatagcatgctttcctcatgtgactattttttacaaagcttcccagattcatcacctcaagatttctcaggtcctagtggccatatctataccccaagttggtatttcctacccttttcatgccatgatacaactagaccatgccttccggatacagaagagttcctggatgaggtagctggcagctaaactaggaaccactcaggacttgagcatcttagtcttgctctactgttccaagggcttaaggcatcaatgctcagtcacacatttttgcccatttgaggcataccagtgcattcataaattgatatatagtattcataacctaacaataatacttcagtgacagaccacaggtctggttttgtctgtaataaaggggacactaagtggtggtggtgcaaacctttaatcccaggacttgggaggcagaggcaggcatatctctgagttcaagactagcctggtctaaagagtgagttccaggatagccagagctacacagagaaactgtctcaaaaccatcaacaagtatagagaatccagcaatatggctgctttggcaagagatcacatccaaagatcttctatatctatttgatcctgctggaatgcagatatgccctggattacagtatgatctggctggaataagacacatccttagtgcatgcttttaatccctaacagtttgttgagtacatacacttcaatacagttcagacaatccagtggagttcagctgaatgcagtagagttgagtttgtttgtggcacttgtgcagagatagttgaagtcagagaataagaaagagacagaagattgtaacaaattgccagagttagtttgaggccaagcagagtaattcagtcagaagccaagggaagccgggttaaaccagtaagcttggaaagaaatttgggtcagaacatctgagttaaacctccctgtccccagccagagttcagaaagagctagaaagagtattaagcttctaagacaacaattatatcaggtgaataaaagatacatttacaaatgtcttagggtttttactgctgtgaacagacaccatgaccaactcaactcttataaggacaacatttaattggggctggcttacaagttcagaggttcactccattatgaacaaggtgggaacatggcaggatccaggcaggcctggtgcagtaggagctgagagttctacatcttcatctgaaggctgctagcagaatactgacttccaggcatctagaatgggggtcttaaagctcacacccacagtgacacacctactccaacaaggccagacctactccagcaagggccacaccttctaataatgccacaccctgagttaagcatatacaaaccatcacaacataggaacaaaaataacaacaaaaaattataaaagggctaaaaaattcatactatctccaacattatagctgtgatgacatccttgtatcacatatgactcctgtttgaggtaatgccggtataaacgtattgtcctgtcagcaatataaaataagtatagcaatataatcatgggcagcatatagtaactgaaaacggtgataaaaattgttattactttgtatgctttaattttaattttttaatatatgcttacatataaaaaaaagtctgctatgaaacactgccaggatattctggtggtaacctccaatgtgtcctgtttcccacatatctggattgcatcaaggcatggagtgactgaacttcggcagttaggtttacaaaagtactcacacagtgatgagtgcaaacagttctcaaaaagcatctccagacatttaagagagtgatgactgagggctggagaggtggctcagtggttaagagaacgcagagccccaaggttctagccccagggctcaccatgtggctcacaactgtaaactccaaggtgagtatctgatgcccacttctggcctcaaaagcaccaagtctgtaggtgtactctgtagtgtacagacatacaaataggcaaaaatataaagtaagaagccaggtagtggtggtggtgcacacctttaatccagcattagggaagcagatgcaggcaggtctatggagctagtttctgggtgaccagagctacacagagaaaccttgccttcaaagagacggggtgggcagaggagaggtaggcatgactgtactctggtttaagacactaagatacaaaggaggagatatcatatatccatatacaaactctgagagaaaaagctgccaatagcgaggaagttgtttctagtgggtaccgccaacaatgttaatcatgtttgccaaagcacttgatcagacctctcttaacccttttggtttggaaggaagcatctgtggaggaggaaacagacgttaatgatttaaatgatttacttacgtttagtaatgtggaggcaacttagtttaatcacgtgtaatcttcatttaaatggacctaactgcatgctaacagttaatttgtaaataatggttatgtttagcaaacagctcccaacttctgtaactttgagaatgcagattagctgtgcacagcactgcctgacagcaagaccagtgtgctttagctgtgcacagcactgcctgacagcaagaccagtgtgctttagctgtgcacagcactgcctgagagtgtgctttagccctccttctttgctgtgtgtgtaactgttatgtagagtggtgatcaccacccagagacagtcctgcatcctcctagccattgctttctgtggccctgagtaattgctacctctctggagattggttttctcttctgtaagggaggagtaccatagtccttggcctgctcactcgcagagtttgacagaattacgctgacaggtctctgactatgctgataaaagacttcattgtgatggtcatttatttcatcactcctttccaaccaagctgtcattggtgaggatgaaaactgttgccacttcacttccaaggatgtggtttagtttaggatctcgcacaacgccaggaatagatgagaaacaccaaggtgaattgttttcaaggagtccccttaaaatttgctagtagtaactaattaaaaatagttctccagggctgggaaaatggctcaatctgtaaagtgcttggctatgcaagcgtgaggtgctgatttcagattctccatatacatctaaaaaagccaggtgtgccaggcttatactagccaggtgtaatcctagtataggggagatggagccaggaggcagcggatagaggcttccacacatgcatgtggctgcacacccacatatacgtacatacacatccactgccctcagttacccagctacctcccatccccctttactaagctttcttctcactctaacatttgttttcaagtcacctcctccaccatggcacctcattttatttatttactctttgtgaatgtccctcattataaggccagtttgtgggggcagggaccattcttattgatgtcactgaccacaggatccagcccagtgcctggcacacaatgactatctgtcaaacagaggcacttatctgataagagctagtgttaagccacccgctgggtcgaggggaaacctttcaccaggacttggctggtagcgctcacacttcacatgtttctcagggaccaggaggcacagaggcagcagaagatggctggctaccccgccccccacctcagtggtgatgtcacacagggcattgagtctaatcattcccactctttaacagtcctgtagacagctgtttttcattaccatgatatggtgaggggggagagggagggaggggatggggtggggtaccccatccctgaatgagatcagtttagggctatctcatatgttcaagttcaggagaaagtgggtaacagaaactgcattttggattaaactattcaaatcaagaaagagaaaaatgagggcaagaaaggaaaaggaaataaaaggagtacagaagaaagggagaagagagtcaagaagaaagcagacaagaggatacatgaagtggctatgggagaaacaaaagcccaaaccaggtagtgaagcagacagaggaaaggacagatggatctctggcctacttggctttgtgcttgggtagtgctcagcttgctgtggaaggatggttggctggctgggggagggggcttctcaggcatcctggaggatcatttacatgcggggtgggggtgggggagcactctgagaggcctgggttaggccacctcaggactgagcctctggatgcatccatcatagttattcaataagaatgtaaccccccaaattttttcttttaaaatcaggattgtagaggaaagggagagagtactgagtttaaattaaatacctcatctttaataacggagagagtattgagtatactaggctttaatttcatatattaatagttttaggggtttgtttgtttttattttttgagacagggtttctctgtatagcccaggctatcctgaagctcactctgtagaccaggctggcgtctcacagagatctgctggcctctgtctcctgagtgctgggattacaggtgtgtgccagcactggcctaccctaatagttcatgtttcgtattaagtgtattgggctttagcttccctgtgtctttgcctcaagtctctcaagtcctaggcaacgggaacacagtaagttcagaactttgacactttaccttttgacttcctttctctgtgtgtgtgtgtgtgtgtgtgtgtgtgtatacatatatatgcagaatatgatggttttagatatgtaaaatgatcaaactgatatttaaccaagacttcaacaggggttagaggattaattaaagtcttacagttaaaacctgaaaaacagttatccctcttatttccaaagtccctttcctcatggtggtcgcatctacaatcccagcactcagaaggctgaggaaagtgtgagtttcaggacagccagggctatgtgtttctgaggtaatatgtgcatattgtgtctaagtgttagaaattcagagacttaatcttggtgacttgagactggtcataaaggaagaactaacacctgggaagtagcaaacacaacagataaaggcttggctgtgccttcttgtctgaatgtaagaatgggattgagaaaggcttcctgtaggaactaagaacttcctgtaggaactgggcgtgccacatctttgacttttacttggctgtttatttttgagaccctgtttcaacaccaccaccaaaaatttgataatagaagggaatatcaaaatcaaataactttcattagacaatattaatgtctaattccgagttcctaaatgttaaatttatggcccacaagtttcctcattcacactacaaatggtgtccagagacacaactgactggctgtctgtgatatactgactggtcagactcctggaaaaagaaatctcatcattatattttatatattacatactatatcaaattgtattttttcttacctcttctgttactcaagttttcttacaaagataggacagagagactacaggaatgtaaacctaaaaacccagacaaaaacctcccaatttcctatcatgtgtactgccacagatgactcagctcttcaacgagaaaatgtattgtttaagagcactgtagacaggtgtggtggtagggatgtggaagcaggaggaccagttaaagtaatcctcagtttcacaagagtcagcctgggaaagccaagactctgtacacacacagacagacacacagacacacagagcactaaatggtggctgtcacaacatgacttttgtatgcccatcgtgcagtaacttgttttaagtattaatagtagtactaagaattgagtcaggtatggtggcacatgcttgtactatcagcaatccagaggcagtctgggaggatccttgtatgtttgaggccagcaagcactacatagagaccttgtctcaaaaacaaaacaagcacataacaaaaaccctaaccagggctgaggacagagcttaatggttgaggacttgacatggttttaatcctcagcatccccacttaacaaaacctaaacaacatattgtatataataataaaacagcatttcattaaaagatttcgcacctaatttcatttatttctgcacttgtatagaaaagaattaagaactgtatagtgaattttatttttactttatatacctggaggtgctacaaattcatcgtattcccaaaatactgagtgatttggagggtcagtgaagatagtgtctgctgggaattggcagtctcacatgtggtcctgccattgatgtcaggtgtaaaagtgaagaaaagggaatcatcttccataagtcgtggtgaaaatatcagaaatggttaccacaacatccaaaatagagaaatagtttgcgggatgacagccggcaaaagcaggttgtatttgatctaagagtcaagacaatggagtggtttataagagacacgaagtagcggggtggcaaactgcagtaagcaccagagaaaaggggaaggccttactgaaattaatcttgttactggtctgaactcaatttggctaatagttttagtatttttttttttaaagcattagcctatttcagcggaatatatgctttttctttgtattatatcagaatctctcttaaacttctattcctgcgaatttggttgtaagggttaagctggtgactgaaaagctgggaaggcacacccaaccaatgggaactcatactggtgatgtactgctttccagctctgattcattggctgcctagggtttgtcattctatcccggcgtcggcaagcagcgtgggtcgggttttctgtggtcgagctagctaaactggattttggccgcctgcacgtgcagttaccttttgctcatctctagctctccgtgaaagcagctgtcacgtttctgattatcctctagattttgaaaaaccctcggttccattagccccactggaggtctttggaggtgcccgttgagcccgaatcacgtgaccccgtaacgtgcacataaatacaattcggaatccctgcagggactcggggacaacccgcgagaagctctagctaggcacgtgtcccaaggcgtgaacggtttgcacacgcacgtctgcggtatggccgcggcactcgtgtgcgcctcgtggggtcgaaggggcaggctgagtcccctgtgccgggcgctaaccgagactgcacctggagaccggcgtccgtaggcaggtgtaagagtcgggtgcggacgacgacgacagccgggtttggagaggccctctgcgccctagcgcgaaggccgcgcgcctggctcgcacccaggacgtcccgctccctagggatcggccccggcagcgacctaggagcagcgcagggcannnnnnnnnnnnnnnnnnnnaagccgcagttccggccctcccacatccgggtctctccagcccatgggccgcgccgcagctgcagggccgggggtgggggaaacggcggcgcggggcggggcggggccgggcgaggggcagcggtgtcgagagcgcgcgtgcgcggggccgcgctagaggcggcggcggtggcggcgctaggggcgggagcgcgcgcaggagctagaacgccgtggtctccgcgccggccgggtccgcagctcgggatcgggtggctggggcggggggaggggggcccaggcaggtggggcggaaagcgatgagtcctcggcgcctcctccgcctcccgcgggccccgctctctgcctcccgctccgacgcccggatgatctgagccgcgagggctccgagagccgggggcccggacccagcccggctcctcccctcctccgcccgggcccggccgccgtcgcgggaccccgtgcccggccgccgtcgccaccgccgccccggccgaccgagggacccgcccgcccgcggctgttccgggtaagcgcggcgcgagggcgagtaagagggcgagggcgggcgggcggagggcctgtgcggcggcggccaggcctggggcctgtaaacaagccgggcgtctgcccgggcgatcccgggaggagacgcgacaactccaccccctgggcggcctcctccccgagcccgcgccgggtggcgaggggttaacacgcggcgggggcggaggcggggtgtgtgcggcggctgggagggggcgcgaccctcggccgggcggggcggacactggcggccgcggaactttcggggagcctgcagcggggtctccccttgaagcagatcagcccgtgagttcactggatttggagactcacccgctgggttgaaagtgaggcccccaactcagtagtgatgcctccatttcattcattattccggcttggagcaaacccattgaagtaaactacaggttttgcatcattttggcctgatatattggaggaaagttctttatgttagagtttagtttaggcttggctcccttctgcttgtaggttgtaaacacactcggatccccttcttgaaagacagctggctgtggagagccttctgccaactggagttttagatcttttgcaaatttcatcatccaaagtgtttttctcttttctcaaacactacacgatacttagaaatccacaaaggtcagagtctaagcaatctacgatgccgcccccaccccaagtttcctgatagttggaataatgctcctggtatatttttaaccgcgcggttagagtataaggagattggcattgtttgagaagaataaatgattttgacgttacgaaaatgagtagttttccacggttcagagaaaaaaacaaaaacaatctttttaaaccctggctttcagatttcaaacatgactactactggatggaggagaagcctgctgaagaatcatagaacttaaatgattgttttctgggccttaggattttagggtttctgagggctcactacatagtgcttggttctcacctccctttaaccttttctgtattctgggcctttgccaaagattatttctgtagttacagatgaggaaactaaggaccagaaagatagtgagcacacacccacatacttatcttcaataccgcctttattgccttaatgtctgcttgactgtttaataatttgaagcacaaagcagatcatcttcccagtgctacagttctgggctgcatttttgtgtgtgtgtgtgtttgtttgttttgcattgctggggatagatttagctcggggcctcttgaatggtgcaagaccaagttctcctcacttgtcttgtatatacctgattgaacagtcagctatgttgggatgactgcttttaacctagaagcttacagcagtaataccttgaaattataatgaactatatgtgcaagtttcttcaaacatttgtattaatactaaacacttttacatctggggagtaattatgttggtggtatcaaatattaagatggataatgttttatattagttgtaatacatgtttgaaaaatagtaaaattggccactggaagcatcaagttgcttcttgcagggtttgtgtccctatttttcacatggaatgaatgactacatttcagtatgaagggctgtagtgaccagccataattatagtataacctgttgtaaggaatggtgctctgccagaaatgtgctcgaaaatatctgtgcccagggacaaggcatttgaccctttgagctttggaatcagtaatgccaaggggtagattacatcatcacatgtatatttattattattcttttgccattctgtgactgttgaacatacctttaacaactacatacctgatagacctgctacttagatgttttaccattttgaagttgtttttctttctgggctctgttctattgagtttgtggcccggctttagggaaccttcctgtagtggccttcactgatctttctttctcttgccattgggaagcctagaagatgtcctgggacatctttggggacagcatgcacctgagacagcatgtttgaagaagctggggtcctcagtggttggatatgatgagcattataagaatacattgtgagcttctttgtgtctatgtgtccgtgtgtctgtgtattttggttcaagccaagtgttgttgatcttgtcttaacttaaacttttgtttggaaattcacctaatatctagttgtcatcttcccccacccccctaccaaaatgtatagcatcctcttttgttgccttgtaaatattgctaagtgcttactaaatgtctgcatctttctaattttttcaaacctcaccttggctgtttactttatggccagtagaatgtattgctgttcttagtctatactgatacaaaaataattctgatatatatttgatgttcctttcaaacaatcatctattgtctgagtagtacccgtgagtgcttttcatctttaatcaaattaaaagacagtttaaaaaaaaaaaaaccgggctcaaggggagttgacacagttaaactaagccttggccctgtgacatatgcaggatggccctcaggagagcagaagcacaaatgtgcggctgttagatttcctgtattgttgtcatgcttgccctgtcttcaggtaacacaaatacttatcaattcagtggcctcatgggttactttgttgtttttagcaagaatgtatgtattttttggcatgttataaaccattctcatttaagaagcttggattaatgtataaagaaaggctgactatattctttattttttctttcttcatgctttctaatgtttcatgttctgcatattatatgacatctaaaattattcatttatctatttatttattttgagttttttcgagacagggtttctctgtgtagcctggaactcactttgtagaccaggctggcctcaaactcagaaaaccacctgcctctgcctcctgagtgctgggattaaaggtgtgcgccaccatgcccagctctatttattttttgggacagggtcttactacatagccttggctggcttaggattcgctatgtagacaggctggccttaagctcacagagatccatcttgtcttgatgcttgtctcccagtactgggatcgaaggcacatgccaccacactcagctataagtaacacctttttgcttcattatgtgtttacagaatgaatgaatgaatgaatgaatgaatgaataaaaaaatatatataatgattgtaatctttatattgcctgtctgaatactaccaaggcaagaagagccagagaaagtattgagtgtgataagctctatctacctttacataaacattttttttatgtatacaagcatactgtagctgtcctcagacacaccagaagagggcatcagatcccattacagatggctgtggttgctgggaattgaactcttgacccacaagagcgagcagttaactgctgaactctctctccagctcatgacttgacaaatgttacaagaaactaagaagtgcaaatttatatatgttgaaaaacctggctacgaacatttgttgttttttttttttcttttttctttttctttttttttttcagtaaagaactgagatttgatttccagcatattatggctcataaccatcagttctagttccaggaaatctgatgccttctgatctccgcaagctgtggtaatataggcacacatgtaggcaaatacatacatacatataaaacacaagctgtggtatgtagacacacatgtaggcaaatacatagatacatacatacatacatacatacatacaaaataaaaaggtaaattggactgtagatactgtgttcttaatatcaatattttttttaaggtttcactttgttttttattttaagatttatttattatacactgtataatttattgtatactgtagctgtcttcagacactccagaggagagcgccagatcttgttacggatggttgtgagccgccatgtggttgctgggatttgaactcaggaccttcagaagagcagaagcgctcttaacccctaagccaactctccagcccaatatcaatattttaagcactgagtgagtgataaggaaggaactccagttttcataatcattaatttttttatttgcaacccattgatttaagtgtatttgttattaatatttaggatctgaattaaaattcattagtttttgtggcaggtaataatttgaaaatcatgacacattattttatttatcttcaggataaaaaagggaagtaataaattattacgtacaccgcaatggtggtgcattcctttacaggcagatctctgttagttcaaggccatcctcatctacagagttccaggacagacaaggctacacagagaaaccttgtctcgaaaaagacaaaaggcccctatcctttattgactctgtatttgtgtaaagctttcattttttcacaacagccttctgaaataggtgatgatcctttctctgacaattagttttccacctctcgcttcaatcaacctagagttaaactttttaaaaattgcctatgtttctaaacatttatagactttcttgtatttattctctaaaccatatagtttaatttacacagtatttctattatatttgatattaaagtgatctaaaggtgatttgaagtgtgcagtgggtgagataggttacgtacagcagctacactattttaaatgagagacatgtggaatcatacacaaatcccttgttagcagccattggatagctatatatgggcttagtgaacctaaatgacattgcagaatcatgtcaatagatttaaaaatagtctttaaaaggtcctgagtggattgtttcaattaaaagagccttgttcctggaaccagaattttaaaagctcactgttagggtttctgaaatgtagcgttctgccgtcgaaatgcatgcctgtaagtgtacacagttgtcttcatctgcaagaatctgtagaggttctgcctcccagccccatgctcctaaaaataagacccagactcaaaatatatttacaggtatcttggccatatagctaggttctactcaggctagatcataactaaaatacccatttatttaatctaccttctgttatgtggctgcttacctgtgctcaggtaccatgccttccatctcttcacagcttctcaggtcaatctcaagcacctggatctatcccagaattctttctgtctcccagatgtcccacctgcctgcctaagctataaggtcataggtttttttaactgacaggtgatgcatccatacagtatacaaggttttccttgtgtattgaagggatatacaagaatcccttcagaaaggattatgatgatgcttttccccccatttctagggctttagaagttaaatcaaaaaaatttgccttggctcaccacctttgagattgaggtgtagagcttatattcataaatggttgagggccttagtgtagaacctgaggacctgagtagatgagaccaatgcagcctcagaggaggatccataaagaagtataacacaactatccctcaaaagctagagctcagcccccgctttcctacatacaggaggtagtcttggctaatttacttgatttctcagttttccttacctgtcacatggaaatgtctcttatgtgagtgtcttaaagatttggtagaaaaattatatcaagacatgtattgggcatggtggcccacacagcatgtgatgtgatctcttgagtttcatgccaacctggtctatatagggagctcaaggcctgccaaggctacatacttagcaagaccttgtctcaaaaagaggggtgggccacttgacattttccatcaaaaggaaagtaccaaataaatggtagctattgttactaagtttatgggatcttaagatacttgggggtttggggtatgctggagagatggctcagagattaaaagcactgacagctcttccaaaggtcctgagttcaattcccagcaatcacatagtgggtcacaaccatctgtaatgggaaccaatgcccttttctggtgtgtctgaagacagctacagtgtattcatatacataagataaaattaaaaaaaaactacttgggggaaatactgaccaatagtgagtaaaaaattgagaacaggtaaagacttggtatataaagtttgcatatgcacagaatgaaagtcaatcaagacaaagattaagtatgagcatttacttggctttctggagttggaagggtcacgcctcggtttggagttggtgattaagcaatagtaggtggtaaacttggtgataaagaagagcagtaatagagcaaaggtgagacgggccagtaagtagggaagagttgacctggtatttcgtagagctaaatttcatggttagaaaagaagaataaagaaaccacattattctactgtttttacaaacttgcctttgtaatggatattacgtttcgtgcttgttctgggttgttgaaggcttactacctctatctacagagagcagttccagtgctctacatggaactctcccatcctgcaccctggaattggccatagttccctccctttaaatcaaagctcattttcagtggcatacctgcatttttatgatttgaaatcatgtattttacttctaggcatgtatgctaattatgcttaattctgaaagaggaagtacaacaactacttcctgaggcctaccacagtgcttatggatagtggacacgaaggtatttggtaaggataagcacactgtacctggcagtgggcattaactgctgtgggatagcggacatttgtgtaagtgtgaggttatacacatctgaaatggagcaagagtgttcccttggtgtggagcttaggttggctggttgtgggctccactctaacttcttatcttttggctttgagggttaataggatatttataatcacatttcttttcagagtagctgacattgcaaatattattatttcatagttattcttgtaatcataggggaattatgtagtcacaggaatttgacagtgcattaattaaagaagagctaccaacaaatttaatctgaaccagattgctaatatctacctagtctgttcatatacacctctaaggtagactttatagctgatcccaaaatacttaagctatttctagtatttagaaaataagttaatattctgttactagattttaagtggataatttcttgtaactagttacttaaattcttggactataatgctagtgaggtcagagccatgaattggatcttcatgtgcctctttctttcctgaccttgacgaggactgtaacaacaagcattttatataacaggtactagtacctgaagatatttaaattgtcttcaaaactttgcaacattcctatcagttagatagcattattagttatatcctaacaaatgagaaaattgagacagatttacagctggtaaatccaaatgcatgttctgggacttttgaaagtaattctaaatgcaaatcaatgcctttctttttctttttctttttctttttttttttttttcaaactctctattgattcatcatatcatacacgccagggagttcatctccctgtctcctcatgtctgcctttcatctttgcaaccttcacccaaaattaaaacacacacacaaagcatagagaatatgtcattgtggagcttgtagtatgtcacagtgtgtcccccaatgtgcaacatgttcgtcacagtgagtgtttggtctgacttagatctctggcttctgtaacaccatccatggtgtatcctcacctagactcctccagatcattctttgctgccctatgtcatgaggtcctgcagctttaggaagcagaactggcccttacacgcatcccaaccattcacagatgataagatgttgggatgggtcgactcagagccctggatctgggcctaggtggcagctgagctgattggcacacctgctgtcccttatccacaccaaacagggtgagctctccagtactactctagctaggccacctaatactatagtcagcaggaggcagagctagctccactgtgctgcctagtcaaggcatgaggtgcactcttccaaggcccactcttccaagtgttgcagcctgtgaggtgggacagctctcccatgctcataccctgggctcatctacatcttcataagtgtccgctctactgtgttgcccaagcgaggtgcagggtcagctctctcaaatcattgtgaggagcatttggggggagggcatcaccgccacacccatgcagataagtggtgaagtcagctctcctgtgcccttggggtttctccaccagggctagctctactgattgtacttctgttgctgttgctgacagtctagtggtggtagtgacattttagtctttgtatacaaagggcatgacttcagttctattgtatccagagtgtgactcttgtagtgagttggaatctaatggcagtgtataaagcatgtgaaaaacatatctacttacgtttcctttagaacttttcaccaggcagagttatatatatatatatatatatatatatatatatatatatatatatatatatatatannnnnnnnnnnnnnnnnnnnacacaaaatcatagtccagggaataatcactttccaatctcctgtccatagcatctaccctaagtagccattttccaaaagaggcagacttgccaataaaaagatagaaaggacattcattgggccatgtcttacaagggtggattcttatctcttaactgtcacaatttctttctgttccctcacacacacacacacacacacacacaattctggggctatggtacaaaagaaagtccttggaaactggggccttgcttcacttactggaaatagtttctcagtgtgtgcctatttaattgtttcattctcttttggtttctgatcacatgacaataaattaaatgtgagccagaaatatgtcagactatgagaaagtataggtcatgtgcacttcagtttaaatttagactggtactttgcatttatctgtcatctccagcagagatgggggaaatcatttttacccttgctatgtatattttaattattttagtgaatgtatgaagtatatgttctgtttcaaagactaacataattgattaccagctttgaattcttggtgctgctttctgtagtatgactggtagaaactttcatcagagttgttattacatctataggatatggtttgccttccattgttaacagaattcagaagcgaaaaataaggaaaccataactatgtattttgtcttgttcttgttttctgtgcaaaaatgtcagaacttgccaggctttagaaaagcatctttgcagcccccagaattggggagtggagaggggggagggtagaggagtgccctgccctggcttggaatatattagagccttcccactgaggtacagaaggcatggatgtcttccaagtgctagcagcctttccatggtcagtccacagcttagcctatgtgagacagctctgtgatgtgtctgcaaacatgattcctgtgctgtgggtcattcagcatgtatccagttaaaggactgctggccctgcactggctgtgggcaataggaaagtagctcttgtactacagcttccatactgtgtcagaaggggctcccgctcccatagttagtccttgtcatgtctgaattgccttattcttggcttttcataaaaaaattttttttcagagttgtattatgtaggcagtgttctgcctgcatatatgcctgcataccagaagagggcaccaaatctcattgcagatggttgtgagccgccatgtggttgctgggaatggaactctggacctctggaagagcagtcagtgctcaacctgtgagccatctctgcagcccatgagaagaatttttaatgaccacatctatagctctctagtttgatgttttcctggggtggggatctattaggctgcccaggctgctctaaacaactcctcagaaggtgccgccgccctactcatcttccccacttcatatgcatactgccatgcccagctcaatgttttcctatttatttgtgttgcattgaaactgagtgaactatgcattctacaggataaacaggatggaaacggtaagacatggtttgctggcaggtcagcttccaggagagtgtcttcctttgtagagcagattcactgctgacaatgggaaagtcaagatggcagctgccactcatttcctccacatgtaccctattcagtgttatcctgtgctaaatactggccccagagtcgtcttcatgaatcttaaatatagagactgctctgacagtaagtgcctctctgagcgtggtggctgatgtcagacccgtctcctgagacagggaaagtggtgtggggacttggtgttcctttgggccatgtcattgaagtgaagctattcaaatatatgaggcagttggatgtaatttttttcatcttaagtttttattcctttccctgcatccctgtgctacattggaattctctgtgtcagtgtatagatttcgtttgtgctgtttgttttggaagacacatctctcaagtcttgttagagcagctgcttttggctgtctttcctagaggacacaattatatgtaaaatatttagaatccccatgtattcgttgtgttgatgaagaatgtctcaccttaagtgttaaataagttacatttctcccttcttttgacttaagtacacaaggtttttagcaaatgtttaaggtgttcagttgaggggcttgtttttcagcaaaagaagaaagaaagcccgcaaagtcagctattggattccattctgaagcaaggattaaaaattagaaaaccgggctggtgaggtggctcactggttaagagtgccaactgctcttccaaaggtcccgagttcaaatcccagcaaccacatggtggctcacaatcatccataacgaaatctgatgctctcttctggagtgtctgaagacagctacagcgtacttacatataataaataaataaacaaacaaacaaacaatttaaaaacctcgggattagctattttttaaaaatttgtagttattattcaaaagtgattaatttgaatctgcatatgaggatacttgagattaatcaacattcttagagaagttaacagaggaagtagctctatgccatttaagtcgggactataatccttagagaaaatgtgttagtctctaatttttagagtcactagatagagcccttcaactaaatttagctcagatattttttcaagcagttatttggttcttgtaaaatttcctttaaaaaattgtgtgagacacttgtaacagttgtgtcagttaccttatacactcgcaatgcaaatcccagcaggcctagaggatgaagatagcttttaacgcattaggaaacacaggcatcaactctattatgcacgctgacactgaggccaacatctggacaaactgattggctggaatacctgtaaatttttaccggcctggcaagaactaattctctcaataatttaggggttagaaaaataacctttagcatagtagacctttgtcgtattttgattggtttaatgagttgattctagttgcattttaaaactttttagagcttctatctggggacatatttgatgcaggggttcatttgcattagaattctttgaagctttgttgttgaaggaaggtgtaaataaagatttaattgaaaagtaaacatttagtgaggctatacagtgaacgattgggcaactgaggaattttccagtaatttgcttctcctttagaaaaacaactacagatcttttccatattagtatgtctagtcttatggccattttttttaaagccagtttatgtaaaataaaatgcagaaaaactgatagtctttgttttttgtttttttgagacaggttgctggctttgagcgtctgtacaacaaatcattctagagacctctgctgtcgcctcaagcccgggaacacagaagcatagggagttaatatacctgcacccaacattcctttgagcctgtcggtagctgcagattgtttgttagtcattaatttagcttgtatatccttaagaatgattcatcccagtctatctgtatgaaatacttaaaaacaaaaaaacccgaaactcatttgcctgtagttagatggctcaggtaagatgcttgggcttgggtcaccccaagaactcaggcaagggattgacaccctcttatgctgacctccaagagcactgaacacacaagtggtgcnnnnnnnnnnnnnnnnnnnnaaaaaaaaaaaccaaaaaccaaaaccaaaaaaaaaaaaagaaatccaccttcctctgcctcctgagtgcccagcgatttttttttttttaaaccattgaaaacatcattaatgctcaaaagagaacaagttttaggtaagattatccaactaacaactgcttctttcctgtctgactagggggaaaacatacgctaattcaaagtgtccaaattaaattgagaatggaacttgtctctagcataactgaatgtgtgcattagcctctagggcttcttgatggtcactcactgcgggattcctcgccttttaaaaatgctaccattttggtcttggtggggcttttgtcttgttttccccctcctacttctgctacccaggctttgctaagtttcaccgaagtgtttgtctctgtggctgtcaggcttggattcaggggctcctttctgcccaagctgagaaaggcggacttgaaagcaagacgtggaggaggagcattgcttgaggtgtggctgagtagagtggtgagcacaggattgcagtggctttcagattgcagtgacactgggttttggacaatagaacgcaagcgaggttgttgaagagaaaagcaaagctaggccatctggggcacacctataatcccagcactcaggaggcagagaggcaaaggccagcctggtctataccacaggttccagactagtcagggctacatagtgagaccctgagagaaatggggggggggggggggggtcagaggaacacttgagacaaagatgtagtgtgaaaaggggtaaaaaaagaagggtgaatttaaaaaataactctgctgtatgaaactcaatcatacttcagtgataaaccaaataagtttctgatacttagttcccttaaaatttctttttctaaaatcttgtgtagaaattttgaaaatgaacagtagtcttatccaagatactcaggttggaaccatggaagagtagtaaagacatatagtaaacttgaaataggttcttggaaaagtctcccagagggctcaatagcagcatccttctgggtttccatattagaggaagcctagtctggatgctgctgtccatactgtgttgggaatctgctcattgtgagaaataaggtctgtatattttatgtgtatgagtgtttagtctgcttgtatgtctgtatgtgggggtgtcagatcttggagttcaacagacagttgtgaactgccatgtgggtgctctgcaagagcactcagttctcttgactactaagccatctcctaacaaggggtcttaaatgccaagacttctcttattttcttagagcaaatggggtttgtttttgaggttcattattttaacatttcaagttgcctgattaattgagcttgtaatagaaacagatttataatgtgtatactatttgttgatacttggtaaccctctccaggctgtcctggaactcactttgtagaccagctggcctcgaactcagaaatccacctgcctctgcctctggagtgctgggattaaaggtgtgcaccaccacgcccggcttggaagtggctttttatacttagaaaaagttcataaacctgtaaggggagtgtttagtggtgtgtacttctgagacaggagggtcacacattgaggacagcaagaccctatctcaaaaacaaaataacagaacagcaacaccaacaaaaaaaatcctgaaagataggcaattttaagtacctgcaatatatgagacaaaaacacttcaaaggccctttgaagacaaaaactactgagttatcattttcagactgagtctaccatatccagggctctggagctggctggggcctaagcagcttaacggcctaatcctccaacatgcaccccaaggaagaacacaaatttcaaagaaaaggaaatggataaaggatgacaggctggtgagatggctcagcaggtaagagaactgagtgttcttcagaagttcagatcccagcaacaacatggtggctcacaaccacactgtactcatacataaataaatcttaaaaaaaaagaatacgaacaggcaattaaatgaataaataagacaaatagataataaacacatggagcaatgaccaacctcactagttattacacaaacatatttttcacatattgccttctttgtttgtacaggtgttttgtctgaatgtatgcatgtgcaccacttgtgtgttcagtgctcttggaggtcagcataagagggtgtcaatcccttgcctgagttcttggggtgacccaagcccaagcatcttacctgagccatctaactacaggcaaatgagtttcgggtttttttgtttttaagtatttcatacagatagactgggatgaatcattcttaaggatatacaagctaaattaatgactaacaaacaatctgcagctaccgacaggctcaaaggaatgttgggtgcaggtatattaactccctatgcttctgtgttcccgggcttgaggcgacagcagaggtctctagaatgatttgttgtacagacgctcaaagccagcaaagcgtgctgcctcatccacagtgagccaaatctcattcagcaaatgttctaatagctctcaatactttatatcaaagagaaatctgtgccaccatatcccctggaactggagttacagaagactgtgagtcgccacgtggatgctgggcacacctgtgttagtaacagactttcctgcatggtctattagttggcagtttacaaagccaatgttttaggatgtgacactaatttccttctcagatttatattctcagatttctcttgacttaattattattttaaaacaaaaaaagaaagccgggcggtggcgcgcacctttaatcccagcactcgggaggcagaggcagatggatttctgagtttgaggacagcctggtctacaaagatctgaaagagccaaggaagatgcgtgggaccccgaagagtctctgaaactcagttaagcctggactcttgctctcacaagagggtttatcataggcaagaaacagcctatttgaaaagaaatacgtgaggcagaatgagttctggaaggagtttaataccgtttgccgatcaccactcccatgtcatctccattgtaactcttagttttatatttttttcatttctagaaaactgtctcagtatgcctttttaaaaatgtcagcattgttcagtgtcttcctgtcttgatgggtaggttctgatttatagttattacaatctacttttttaaacttttaaaaaaagatttatttacttattacatgtaagtacactgtagctgtcttcagacacaccagaagagggcatcagatctcattacgggtggttgtgatgtggttgctgggatttgaacttcggaccttcggaagagcagttgggtgctcttacccactgagccatctcaccagcccttgacttttttttttttttttttaaacttggttttttgagacagggtttctctgtcctggaactcactctgtctgcctctgcctcccaagtgctgggattaaaggcgtgagccaccacagcctggcttttttgactcttgatgaaagacacaaccttttatgtataaggtgctacacatttgtgtggtgtatatacatgtgtcctttaataataattttagttttttcccctcttggcagtagaggtatttaagaaatgatgcagacttgtaggcagtgaacaatgttaactctgaaggaagctggtttttgttgttgtatgtgttctctcagaaccttgagcacttcctgttgtctttaacaggcctgcaacccttcatttccacgtgtatgtggtagccacgtgcatgtgatggcgtgtagaattggagtgtccatctagaaatctggatccccatctcagccttacctctattttcctgtgccgccttgtttttgaaatagtctttgacagcttacttctgtatttatatcagaattatatttgtaaatatagatgtatttcagttttatattctccttgtaaggtctttactcccaatttgctttagtttttttttaatttgtttacgtactcccccccccccttcatttctatggatgaccttgagggagctgccttaattaatcatggcttgggaaattaaaaagttctttgtgtggtttaaattatgctttttagagatgtgactgtaagcagtgtgtgttgcttcactgaactgcagctgttcatgtgttaatactattcagcatatactccagaaaccagctgacccttcgaggacaaaattcatctagacataagcacggatgagctatgtaaaatttaaaaatctgatggcactagtacatttttattttgcatccccctgcatacagctcagatttgcggtgttgtgcattgcttcctatgcctttagtaggtgttcccccatcacccccactctttccctgagaaacttcttgcctcttaactatgtgcacttcttctctctgtgaagtttctttctacctttaggttgctctcataggcagatctgtttcagatatccccgtttttctaaccatatctatttgaatgctcatcagaggcctctgctttttcctgaagtgctaggaaccaagcccaggacctggcttcctgtggcagtgccagttaagcagtgaatctcatgcttaaatgtccttgaatctcaccaaaccccaccataaactaaactaaatagtgctgcacagagcaagcagggcttgacataaaagcattatgtggtgtcatttgctaagagcatcgttttcctcacagtgtttgtgtaagtctatttggcatagagacttggggagttgtattagactgtgtctacaggcaaacaaatgtagtttgattcaattttttttaaagactgcccaaaatggataatactttgttatttagggactaatatgaggtcttatacgttcagtatagtgtagtatagtataaatagtatccacttctttattctaccttttgatgagtagtcaagttatttccgtgtttgctattacacttcttataaggccaacagtaaaggataagaagcttgttacaattcctagtcagtttggttcttagtggattaagcctcatgactagtagataattacagtagcttcacctagtgacagggacaaactgaggaattaggaatatagttttgctatagactgtgtgatatacatacactaggtcctggacttggtttttagcactgcaagaaaaagcagacagtggaaagttctcaatttagaggttggtttcattttaaaggactcaaaatgttcactgtagccctttgttttaaaatttagatcagctgctaatacttgtgataagtctcagcatgtacccaagtagatgttagacccagaagcttacctccccaccccacccccacacccctgttcatttaatgattggactaagtaaaatagtgtttagccatcaatgtatgcagtagtcttatgaagactttctgacatgacagttccatggtcagctgcccgagttttatataccatagagttgcctactcccctaggtttctgtaaatcatgcagactctaagtaagatttctgaattgcctactttcattttgaggaattcatttaattggcagcttctaggtatatctggtaaataagtggggcacttgttttgaaaggatagagcaaggcaacatcaacatctatacgtgatctcttagtaggaatgtagtagcaattaaagagtgacattttgcccagtgcctccattttgccagggtctctgactgacttgcaatatcctccagaaggtcagtattgatatatccattgtacaggtggagaaactgagggatgctagtctgaagagtcatccaactcatcgtaatcatgattcacacatccagctagctaggcagactagctacgggaattaacatccaggtgaggcaagttgctcttggccttgagtaggtattaacttagtggctcagattgttagtaaggtaggggtataatatgccaacattggcataaagatgtgaagatgttaatacattcattaaactggtaaatagtgcttagttggtaccactcccccacatgcacccaataaacatgagatgtttcttggggtgggggggaggggggtcttgctttttaaggacagggttatctgcgtaacactcaccgtcctggaaccaactgtagactaggctggcctcgaactcctagagattctcctgtctctgcctcctgagtgctgggatcaaaggcatataccaccacttggcaccattttacttctaagcttgtaataactcactaatatcttatttagttgctgagaggtgagggtgtaggctgtaggttactttttaagagaatcccacttgcttttaaaaacatgtcttgggttggttttctttggacttgttggtaactgtaagagttgaatatacttcagaggaagcagttgttcctcaaatccccattgtcccttcagtagagccagacttgctccctaaacccatactgtctcctcttcccagagagaaactaatacccactgtaatgtgctattgcgtttctgctgttaggctctgagtgctggagtgcacaatgactaagccccgcactcctgggtttgcagccctgtccttgctgataaccataacgctgtacatagaactgctttgctgcactactcaagatactgccttgtgatagactcatgcctgttgttgagtgctagcccttgactatgtgttctgccttttcagaagcaggttacttccgaggtctgctattatagcttagaagcggtcactgtacacaccatctttgtcagatgtcatcttttctttaagatgatgtattctcagttcttcagctgactatagtaagaatcctggtgtatgcaatcgagcttgttaatgtatgtatgcatctggaacatttgcttggagtaatggtattcgcttacctttgttgctttactccagcttgtaagatgcaggacagacaaccacaaaggtgactctataacctgggcattgcctgccgttattagcacattgctctggactaggtcactaggatcactgagctggcatatatacattttctagcttttgctgttagtaaaatcacaatagtttctcttttcctcacattcttttcaacatttgatattgtcagctaggtagaaatgacttctctttaattgccccccctttactattaatgtattaaagtatggtttaaagtgtattacacagggataagtgtgtagtttatgagtacttaacctagcacgaggctctgagttcattcagtttctaccacccccaatatatatatatatatatatatatgtgtgtatatatatatatatatatataaaataatgttcaggctttttgctaagtggcagacaaatctgttctccaggagaaacatcattctagctgattccttctactggtggaaaaacaatactataagcactgtatagtagtgtatgcagtgtaatacaacggctatactatattaagtgtttatagtgtgttagaaatgatgctaactgccctggacatttagtacttgtaagaatcccataagatcagtacctaaagctaagcatgatggtgcacacctctaatcccagcactccaggagctgaggcaggtggatctcaggaatttcagactagccagagctacacagtgagaccctgtcttttaaggaggtggggggagaaaaaagaaaagaaagattaacaccttattgcacagatgaagaaaacaattcagaaaagttaatggtctcacacttactgtggtcacacttttactaagaagtaagccagagttttacatagcagtctaatgtcagagcttgtgttttttaaggcttgatgttgttgggaaaaatcttagggcaggagtaagtggttgctagtttttcttgttggtttgtctattaaatgaacttcaatttgagctctccccacccccagtgatagacttctttcttattattcctagttgtaggtttgagccgatttttctttttggctcttatccactagcttcttttcctgtaatattttttgcaggggatgaggggctcacctgcctctactgggattataggcatgaggtgcagacctggcttttaactaatccattatacctcatgtactccatctaattcctcctcccacccctgatttgcaactttgatatgccttataaatcacatggacattttttaaatttaatcttttggattttacatatgtgtatgtgtgcacacaagacattagttcagttttctctccctgtgtgggtgagttggtcagcaaaaagaaatggtgggggtggtgattgctgcaaaatgaaattccttacttcttctttaaggggttttccataccatttctctgagtttatcacttactggttcttgaatccacaagtttgcgaacttcatgcttattgacctggatactgtctttcacccttattatacacagctcctcaacctcctctctctctcttcggtattatattctacttgaagattttctttagtgtgtgactcatttgattacttgcatcaagtctgttgcttgagcaaggagcagcctaaatcttgatctcctgtgtctgcctatgtgagtccattccagaccatggcaaaggattagatgagctgacctagatagacccttagaatctcttttatgatttattcctagggtcttcagagcataataatgacgcatgttattactactagtttaattatcagattaactttgttacattctgtatagtaaaatttgtcctctaatgtaagttgaaaattgtaatgcaagttgaaaattgaagctgactcctttaataattgactgatcttgtcaaagactgacaagcatgatgcaggaagtagaatctgaagtaggcgttaaaggatagacacaggtgtagctttcctggtagtgaagagctttgccaggggattctagctaagggggatgaatgtgcaagggttgaaacagaaacactgaaaaaaagaccagtgtgagtaattgcttttttgcttttactgaggtttctaattttggaaacaaaactaaatagcttggaatcaaactctgataattcggccaaggttcccgcagtagtagatacttgtatgttctatgaagtgatttgtctttttcttttctttttttaaagacatatttatttatttttatttgatgtatgagcgcatatgcatccacaggccagaagagggcatcagattctcttacagatggtcatgagccaccatgtggttgctgggaattgaactcaggacctctggaagagcagtcagagcagttttttttttttttttttaaagatttatttatttattatatgtaagtacacagtagctgtcttcagacactccagaagagggcatcagatttcgttatggatggttgtgagccaccatgtggttgctgggatttgaactcaggacctttggaagagcagtcggtgcttttgacccaaccgagccatctctcgccagctcccgtcagagcagtcttaactgctgagacatctctccatccccaatttgtctttttcttgattgacaaaaagtaattgcaagactgtgcatcttgagtgcatgctgaaatcttgctggttcatgtaagttgatggtcactgctgggtctccttgggaatcacagagaggcatacaggctctcccctccctgctgattcagttccctctgcttgtctagttgagccatcttggtcagcctttccctttcttgttaatctccacattctagttagcaacacaatgcttgtaggtatagcctgtgagtttttccagcttccttgtatcttatagattctgggtaaagagtgttggacatgttttgtttcaaaggcaatcacttattttcttatttctcttcctttacagacctagaggatcaagtcataatgggagcatttttagacaagccaaagatggagaagcataatgcccaggggcaggggaatgggttacgatacggcctaagcagcatgcaaggttggcgagttgaaatggaggacgcacacacggctgtgatcggtttgccaagtggacttgagacatggtcattctttgctgtatatgatgggcatgctggttctcaggttgccaaatactgctgtgagcacttgttagatcacatcaccaataaccaggatttcagaggatctgcaggagcaccttctgtggagaacgtaaagaatggaatcagaacagggtttctggagattgatgaacacatgagagttatgtcagagaagaaacatggtgcagatagaagcgggtcaacagctgtgggcgtcttaatctctccccaacatacttatttcattaactgtggagactcgagaggtttactttgtaggaatagaaaagttcacttcttcacacaagaccataaaccaagtaacccgctggaaaaagaacgaattcagaatgcagggggctcggtgatgattcagcgtgtcaatggctctctggctgtatcgagggcccttggggatttcgattacaaatgtgtccatggaaaaggtcccacagagcagcttgtctccccagagcccgaagtccatgatattgaaaggtctgaagaagatgaccagttcatcatccttgcatgcgatggcatctgggacgtcatggggaacgaagagctctgtgactttgtgagatccagacttgaagtcactgatgaccttgagaaagtttgcaatgaagtagtcgacacctgcttgtataaggtagccagatgtttttcttcagtcaactttgtaccattagttactattccactttaatcatcttggagcctggagatctcaaaaacaattttttgacacaaatataggatattctttaccaactaaaaataaagggatagtttagaaattagccagttactaccgtgtgtgtgcaagagttgcatctactgtgtgtgtgtgtgtgtgtgtgtgtgtgttcattcattctcttctcatgcacaccagaaagagaatcacattacagggactacagcagatgattgtgagccatgtggttgctgggaattgaactcaggacttctggaagagcagccagcgctctttaccgctgagccatgtctccagcccccaagtacttaggctttatagcactacagaagaatattagagattctatccacgtgcatgagagagagggtgggaaagtttgtgactcagtattgtacgtcctagaagtgctttggaactctagttcagcaagtggagcatccatacaaaagaactgaatgaatattgggtatggtgcagtacaaaatagtcttggatgaggagtcaaaaggacttggtatgagaacccatgacttgaggtaagcttttgtttgttatataaaaagaacagagatgaccctgtctggggctgttgactattaggagggtacagtggaaacgcgtacatagataagctggttgagcccctttatataaaagataaggaggctgaagcctgagaaggttctgtggacttaagagtcaagagtcaaggcctacctctgttacttttgtactcttcagtcttaaattgctcaacctcttctagaaggctgtataatatagatatctatattatatagatatttgtgtgtatatgtgtgtactctggactgatagatgataaatccatagtcaaaacatgcttgtaacttgcctggaggactcggcactctcttctaagtgggtccttgactttggcccattgtctctgccatgctgttctactttgccagtgctgttccatgactcactactggaaaacagactttatgtatccgtaaaaccttaattccgccaaaaggaaagttgatgtagcatccagcctgtgaggtttcaaagggcagcagagtgacagcctgctagtgtgccttggggacctgagcaacagcaaggtgcaatagcagagagcaaagtgcatgaagaacaaggtgcatgcagactttgtcgcactcagtgtatggcccagcagcctttcactaggttccctggagagtgctgtagagttaagtgacagacactagctaaataaaaacctggtgaattgttaaatttggatagtaataagttactgaaattatactttttttctatgccatttcagaatagtgcagtatcttagcatttgccatatttacaactttcctcataagagtctgtctttgaaattaaaatttgtttaatatatataagatcagtttttccatatagctaaattaaatattaaaagcaaagacagtgtaaggctatcagttctggcacagcgacttgaataatttagagtcactttctaaatttattttttattatacaagatatataatatagattataaatgtataaagtttgggtcgggcatggtggcacacagcttttaatctcagcacaaggcagaagtaggcggatctctgagtttgaggccagactggtatacagagtgagttccaggacaagcaaatctctgttaaaacttgatctagtttccttttgagtgggtatttgtacttcagaacatgctttaagccaataccagtgtacatttgtgaaacttgtaaagaccagcactttcggtctctgtcctgtttcatggcgtgtgtggctgtatgatacgcatgtgggtaggtagcacaagtggccaccaaagaatacctccacattggatgtaacctggaacggattcctctggggtgctggtgatagttaaatggaggcacctgacctcccacatacctgcctattctccttacaaataaacaaagtagttatgattggcaagttataaaaataatcaaggttttaaaaaaatagaaggaaaatcaaatactttcttgaccttttctttccagggaagtcgagacaacatgagtgtgattttgatctgttttccaagtgcacccaaagtctcggcagaggcggtgaagaaggaggcggagctggacaagtacctggagagcagagtagaaggtggatcattaacaaaaataaataagtagctttctttcaaaacaaaaccttccacacaaagtctaaccttttagaaaggttttagtccattacatgcctttagcatgtagtactagtgtggaaaggacgttctgtagtaaccatttgtttagctgtgttccctgggccctgtgcactatggttaggaaacttccaagtgactgaagcatggctctaagattcttgctaaacccactggcatgtgtaatgtcatgccaggcaagcctgagtatcctcctctgaaaagacgtactgcaagtctctggaatatttttaattacctgtgtttggttggttggattttgggtggttttgttttgttggttttggttttgagaacgtgaaggtcaaatgtttagcaacaactgtcgggtcccacagctttgaaactctgctttcagctggttcacggctttcctcctgagccatgagcagtttgagcttacaacacagacctggcaggaattcccagatgaatcaagaaagtagcttgcaaccccaggagtgtgaatctgatgtctctgcagatcactttagagtagaacaaatggaaagtgtttgtacctcaaaaaaaaaaaaaaaaaaaaagcaatgcatttaagtatttggagaaattaatcttttgttggtggggtttggttacttggttgtggaacttgggaccaaatctaaggttttttgcacagaagggaagtatttccctctgtggcacacctcggcccttacgtgatctttgataatgctgttcaccacgcataaaataagcattgtctcccctgtgcgtacacacaatgcatatggatcatgtaggccctataagcagaaacacttccatgtaaaaagtgtgtttgactcttctgataccataattggcatgcaagcttcaatctgccatgtccttgcatctcattgtgtcttcattattaaaattagtgtgcatcttaattttattttctccatttcagttgcttgatttcatttgtaatctgcctattagcatcatgtttggttttggttgtcagtgtttctagagaccggagacggtcttgttcttcttaccccctccctccttgtatggtaatgtctgtgtttgtactgtttagtatttcattcattgagtgtactagtcagtgcattttttctcactattttaaggttcttgtaactttttatatcttaagtaatttcaatatgttatttgtagataaaacagtaaagttaaaaatacttagaatgttacagggtgagtggtctaaattgctgatcggtagaaaaatatgcagccaaaaaatatgtatagggttaagttcctattgatgtcttggcactttaacctgggcatatgttttattggtataaagaattaataaataccttagtatttttactgtgaagtgatatccagtttttggaatgaattgctatttttctctttaagcgtgctttattttaaagtaaatttttggtggaattatcaaacattcactacatacatataactttataagttttatatttcatactatcaagtgagagttgccatctgggcagagtttacattagtagtcaatatttttgctatattcaagtgttttaacatgcagttggaggtaatgtcataaattaagatgcaactagagagaaaatgatgttcggtaaagctgctgctatttaaaggcatagaatgtgactttgcactgtaaatgatgtatgtcttaaatgaagatacacagcttctaaagcaggcaccaaatacctttttaaatacatgccttgactaagttgttgtggccctactaagcctcattgatttgctgtcgaccgttttggcctgtgtgactccaccattgggaaggataatgcttccctcctgctgctgtgtccgccttcactgaaggctgcttgtccttatgaaggcggagtgctgctgtgctgcggtccttgggccctttaaggtcatgcttacctgcgtgaccttcccaccactgctactcacctggctccctgaaaagttgctaatgtgagggagcactttattaaggaaggtgtggggggggattatgtttgtgtctgtgttcatgaaacataagagaatttcgtggcatacatattctttatgaaggtatcaagtcttttacagtctgttaaattgtatagtccaagaacaattaaaagaatttccttctcattcaatattttctagaagccaaaggaagagggagggatagtgtaattgttcagtttaaatgattgtcccacatcaaataagagattctaattgtttctaaagcttttattattcataaaatatttttcctgtattcttcacaattaaaatatcctaacattttcgtgaagatgtaagctacatcagatacagtggggtttttacttaggactgaaaccatcattggttaaatttatcatcagtgttcatttctcttgtatctagagctctaatcaaatgattgtattagcttagtagacactgtgttgtgtgttacagtgttagattgtgaacttgtgtagcttaggtaagcatcaaacccctttatttttgtatagtagattttcagcactagaaccatgtagaaaatcaatatgccaaaatgttaaagattacacaataaaggaacttggcaaaccaaatctgagatccttgctttttgttcagatttaagactgctttattttgttttgtttttgttttaaggaaaagaaggcatacaataatttaacacatggtaaaatttggcttttattttagaaagacaattttgaaccatttaaagagattttatgggtagcagtgtctgtttaacttgtgcttcaattgtgaagtaattagaggcttggtcagaatgaaaagttttcatgtgcattgttaatttcaaaggtgcttacacttggagaactaaaatgataatttcttgcctgggcagcaaagaaaatttcttaatgtaaatattgagaaacaaaaaagttgcaaatgcctttagctgaaatttgcactgaaaataaatatgctaagtttccaatgatgccttgtacttagtttagagctgggctaaggctctttgtttacaacttgggatgttttgtgataagagtaacactgcatcagtagtgcatacctagtgactggatgctttgaaactaattttaaatgcatctgtacagctttatttttgtcatgaaatttagacctttttcatttaaagccttgcttaaataacaagggaagggaatggtgtttgtgtctatgtgtcatttaaagatatagtagaggaaaatgggtctgcagagtgatgctcaggtatataatttgcatgctatttaagtcatgttgcaactataaagatataggttaaaataatagcgacaaatatgtaaattgctcttatttaattttatatgtgcaatgtattatattgggtaaagtacagaaaacttgtattcagtgtaaggcaggagttgacctcctcagcagcacctggtcagcatcttggaaaagggatccttatttgtacacacaagtcagaacaagttaataactaaagagtactttctcttttcacatttttgtcctatttttattcattgaagtaaatagtttgtctttttctgcatccttttgttcttttatttttgaggatcagtgattaattttatcctagttcagaaaatctcaagctcgtgtagtcaaagtaaataatgtctgtgataacctaagatactttaatttcagtgttttaaaaattgagttttgataacacttacaaaaaaagtacttctgattcccagaaatcataaagaagcaggtggaaggcgtccctgacttagtccacgtgatgcgcacgttagccagtgagaacatccccagcctcccaccagggggtgaattggcaagcaagtgagtatgccgtgcatgcccttggctgttgtgtgtagataactgcgaatgctcctaatctcggaagcctcttcactgttgggaactaggcttgttggggatcagtacttgaatgtcagttactgtttgtgactgagcatccttagtggaagcttggggaacaaagaataactgagataatattgtgaaaggatattttaaatgaaattaaatgacactacaaaaagtgtaattgggtatagtaacagtggtggtaagatttcctttaatggttataacactttaaggattgtcttcaatctgggcaatgttttctacatgtccttattttccagtattttattgttgactagtggatactgtcagaaagggtagacagacacttcccttcctattgcttcatagaaccatactaacttgaggtagctattatattaagtgtatatatctgtagttaacaatatacattgtggaatttaaggtggttttttctttcttattttagtgcttggcacagagggatattgtgatcatttctttaatcttccgtagtttgcacattagctatagtttttgtgatcttttcaccagggattgcaaagcctcctactcagacttgtattttttgaaaacttttcattccatgaccatctccaactaagactgtctgtaaagttgcttccagtcaattttagaaggaggatataacatgtgtgtgtgtgtgcgtgcgtgggcgggcacgtacatgtgtgtgggtggatgtgggtgtgtgtttgtgcgggcttgctaggcaagtactttgtcatttaagtatcaaagggttatccttgttttttttttgttttgttttgttttgttttgttttttgttccttgtttttgttttgttttttgagatatggtatagtccttgtatatatagtccaggctgtctcctacctcaggtaatcttgcctcagctgcacatgctgagattctaggcctgtgctactacacaaagccagattattaaaataaaataaaaataaaaactaattcctatacttgttatagaagtattcaacattttagggttttttttttggtaggagttttttttaagggatgttaagaaaagcaaagacaatatatacgatagattattatagcatgttaaagttgcttctactctgaaagtacggtcttacctttaaccagaatgtcttaagattggtattggtgttgcgcacttgtagctcaaattgaagtaggggcacacacacacacagacttttgagtgtgtgcgcatgtgtacatgcatgtgtttgagtacatggatgcagaggccagacgttacatgcggtagacaacctcttcctctgctgtcctacttatgtttgacattgggactctcactgaccccagaacccaatcgctagctgaccagtaagggccagggttctccaggcctctgcctctccgctagtgccaaagttacagacacaggccaccgtgtggatgctggcatcccggtgcaggcctgctcttgtgagatacacttttttttttttttttttttgccagctgatctgttaactccctaaggttattctgtccctctccctctcctctctccctctctgccccccaccactccccctcattgtgtaaaggcacctaagccaagcctaatggcctgccttttaaaccctctggaacccatatcgtaaaaatcgaggaattcctgcaaactgtcctctgacctctcgtttgcatgtgcacacagtaagtaaatgaatgttagagaaagaccagctggtggtttgttaaaataaatatttgtatgttaaactgctttctgctctagtattctctagagcagttgggaacatatattctgctttacagtaatggtgcctctgcaccaggacacaggtgtcttagacaggcttggtgttgtcagcagaggctcaaagtgcaagattattttttggagttctaatgagcaccaagctaggggttactttctgaaggattgactttgtgtgttttttaacatttaggcggaatgtaattgaagccgtttacaatagactgaacccttacaaaaatgacgacactgtgagtagcgttctcgcccgccctgcttttctctccctgtgctcagtgcacacacccttccctgtgaggctgttctagccacagactgaatgagtactgtgaattctgcttgctccagttcttgcatatagcagtggctgaggatataagcatggtgagtggcacctctcacgccaaaaaagaaaatctctatcatcgatcaactccagaagacctaccttcaccatttttatttaagttaggaatctcttcactcagaatcttggattattctgagtttcatgcggagtagcagtggaattgtgagtgttcatctccatgaagtgtttttatgcttacaaagatctttgccacaggtcctgaggctgtgctagagaagccctgccaataagtcttagcatggcagagtgttgtggtctcttagctgttaacttggagtcactgagagcagctctcacacattctgcagcatagcaaagctcaccaatgccgttttcctcccacaatgcaataaatttaatgaaaaaaatgaacttttaaaataacataggtgacactttataataattctcttggtttaatgatatatttatccatcctcacagtgtttttctaaatcaacgggtttatttgtttgcttatggaaaatgttggtgggtggggccaggccaaaacaagttttaatttttttttagtcaaacagattaaatattagtatttcatatatgtataaacataaactttaaaaaccaagtaagttctggagatgagtgttatagagcttgtctttctgcattagtgtctttctgaagtgtacattttagcatctggaagatttcctttaatgccttgttttgtttgttttcctatgtgaaggattctgcgtcaaccgatgatatgtggtaaagccgctcacccagccgtggactcaccttcgcctgcaaaggggaagccagctcatccttgccgagcctttaccatccatcaccgacttcacaggagggtctgacacgggtgaggactgcagcttcagcgatggaacagctagcccagaatggattttctttttttattgtaaatttgagacttatgtaagcgtgatttcaaaccgtaattcatgttgtaaatcagactccagcaatttttgttgtatgattttggtttttgtaaagtgtaattgtccttgtacaaagtgctcatatttaattatgaactgctttaaaatcactatcagtgaatgataaaggaaatttggcttgttgtgtgacacaacagacatagtcatgctgtgtctggactcggttgggatagggaaagcggcagccacatagctgcatgctacgtgcacacgattaggaagaattccaaaagcttacacagctgtcacccaggctcatggaaactgtctctgttccggcgaggactggctcactgatacagccatcgctctcacctgtctctaggatgtcctctcctcgtagccaagatattgcagctgatcctgtatattcatgagagtatctatcaattttgggctaacatgccttgattctcttgcacctctttatgagttcttacatttaattactaattggtaagcagcagcttcctacacagtaggagactgccacatttttttcctatcatgactggctgggcctgctgctgttcctagtaagatattccgaattccattttatcaataaagcttggtttaacaaacaagacatgtaatcatgtatgcgtgattcctcggtcaccccggcttcagaccccactcggggagagaaagatgtcatgtttccttaaactggatgatggtgttagcatccaggtgcaggtggatcggaagattgacgtctgctgtctcctaatctgttttaattgcgtttcttccaggctgcttacttctcattaagatgtgtgtcagcttgactttacctactgttaattaaagtaattgtcaaagtttgacaaccctaaccctgtgatagatgtgtgtgtgttgaatgtgtgtttgcctgtaacttttaattgacccacgtctttagaatctaagaggttaagatacatttgtgatttgaaataaaagcatgttgataatatttagctgttggcctttaaaaatacatttcacagcttgaggaattgtagatataaaacatgatttaattttaggcttaactccctctgactaagcatgtaagttttcccgtctgtcacattatagagactactgttctgtaccttctgtgtctccgtctccttaggtgctgtattatcaccatgcgatccattcggttataggcagatcccaataggaaacgatcaaagtacatcagatacaaagtcacaactttatgtataaaagttagcataagacattttgttctatttgtttcttttccccaaaacttggaaataaacatgtttataatatacagccttaaagacagtgtaaggttgaggacgtataggaaaacactgtgaagtgtcgcagactccagtagctacagcaccagctggctcctcagtatccctcttacttgtgaggtgaataaatgtaacttaattgtatttaattgatactatagtccagcatgaagaaaatctgaagtactctttatatttggaaattcatagcagccagaatacagaaccaatcccaaacttacaataaatgcttgatgtctaaacctgtgatagagttgggagtatggtaatattctaagctgtggctttgcagagctgtaaacgtgcattgtatgaaaccctgtgcttctggtacagactggccgcttggctgacagccgaagctgagatcctaacaggccttcgttctactgggaaaccttcagtttttgagattgaagctttcatgatggaaagctgtgtatcacactatagcagcttggttagagccttgatatcagagagtctcaacaacaacaacaaaaaggaagttagaatattcctctggtgtcattgacaccaaaggttggagtaaggaccatgtgacctgatgtgactagatctttccacaagagttggcgtcatagaactacaggaaggaggtgtgcatcataaaagcaggtatgctggaaagatgccatcctctttcctgataattaccatctcaggacacaaatgcctcaaatgttttggaagtttggcttttttgggggctttgctttttttttttttttttgggagggaaaaagaagttcttgtgtggtggtaatgtaatattcagagtatactttaatgttagtgagaaattcagttctgcatagcaggcttttgctaacttacctcttgaaagttttgtgtctctgggcagtggtggcgaacgcctttaatcccagcatccgcaggcagaggcaggcggatctgttgagttggatgccagccagggctccagagacactgtttgatctcttcacttcagagcacttctcagacatcattacttactgtgcattcacttgaccctaggccgttatgtggctgtccctgctgaacttcttaggccatgtagtagtagaagtaggggtggggcagccaggtgtgggggtgtgcctgtggtcctagcacccgagaggctgcagcaggaggatcatgggcttaagaataaactgggccacaaagtgacaccctgtttggaaggatttttttttaaaagaaattgacaatgagttatgttgatacaaattgtttgaattagctacttacaatgtaagtttgagcaggtaaaccagccaagctcagctttccacaatgtaaagtgttcccaaagcactgttctaggttaagtgcgcccccgccccggcactgtagagagagactgtaggtccttgttctcagggagtccacctttgagcagaatttagaatctactgtatgtattgtaagtggagcattcgaataaatgaagaaaactatggtgcccacctccacctcgcccagcactttcttcagcgaagtaggtcacccagaagacttagtttatctcttcatttcccagaatgatttagttgcttctccccaaaagttgaataccattcaatagaaaatcacacccagcagaagagtaaagtggactgctgaggtgtcttagtgtctattcagaggactcagttatctgtaataaatgactcttccaacagcagcaagtcacaagtaatggctgtcccaggttccttggcatccaggagggacctagcgcagggcctcctgtaggctcacagtacttgggtaagtggtctccacagcacagcatcggtgttcacaggaagctgttggactcttcagtgtgctagtattcacagtgggccatgctgccctcctttctgaacaaattactggagaatttaacaagtagattccaaagatgctcatgttttgctttgacttttaatttcagacctctaattcagactttactgattttacaatatagaatttggtatttgaagagttgtaaatattttagcatataaatgtttctcatggagatttttctttggagggaccttcaaggatattatatattctcactgatataataatgaaatgaccattttacatttactagtcttctaactagttttaggcatttgaatgtctttaattttagaagcctggttttacattatatcctacaataatgtgctgtgtgttttggtttgcagttcttttaaattatatagtatttcagaatatgcttaaaatatttaagaacctgttttctaaatgtatagtactttattgttgtgttgatcagtcgctcagctaaatggtattattagaatgctctgcagtcgatgaaccttggctctgccatattgtcaaatgagcatctaccatttagggtcaactcaacacatctcctccctcttgtctctgtattctgttactgacatgtgctttcttcctatccagttaaccagcagggtggagtatcagaaaaacccagattttcagtactgcacagcagacttttgctaacttaccattaaaaaatcttatgtcccttaacaggtgattgttaaaaaaaaaaaaagaaaaaaaaaaaaaaccaataaactgggcattggtggtgaacacctttaaacctagctcttgggaggcagaagcaatctgatctctgagctcaatcaagggcagccagggcaacacagaaaaatcctgtctcaatttcccacaccaccaaaagagaaaaactcagatagtattcaaattacatttgcttttatgagatgaggagatgtagtttaagttgaaataataaatgaccattttccttatccttcataaaatatatcaccctgacctccacttcctcttctctcttcccattcttaaatagagagagcccaatttcattctgttgaacaagaaaggccatgtattaactgatcaagaccaagtcatactgtgttgcattgagcttaaagcaagaaaacttgggatttggagtaagggggccggcaaagatcactgatggctttaaaatctgtagaatggtctttttgaacctggctgtcagaacatcgctggtttgttttctactttggcgatagtcagcacaagactgaggcaaattcagtcttatttgccatttgccacttctttggtccaaacccaatttccactggcagctttctcattaaactaaatgtttaggaagattgttcattttatatagtcctgacggatgaaagactcagtagtgttggtgtctgtgtggtcctatttgtatacaagatcgtgtggctgtaaagcaaagttggatcttgattttatacttcaaacagcacgggtttgttcttcaggggctgcttaagcttgcggggttcacacctttgagatgtgaatttgagggactgcacataggaaaatgcatacggatgtataaaactcaccaagaatgtctttctggcctgctcaagaccctctgttacaatgtagggctacacagacaaaacttccttctccaacaaagctccagatactccaagagcattaaaaatctatcagaaggaattgtttgtttcactttggaaacagtagggaggcaggtgggcacctggcttgaatctggtattaaagttggtttggtttgtttttttctgaggtcctgggttgtgaatacctatttgtaaaggtggggaagctagtaacggaggttgacactaaggtttgccattcctgaaattcaacaacggaaagtgaagtagaaatgagctgtttgtggagtgctgctgaccctctgtagtgtttgtacagtgtattatacattagctttcagggctcactcaggttctaagactccttaactactaacttaattcagatagtttaaaacaggtgttgtctatcagtgtagaagattaactattgctacagaagtttccataattccattgaaaaataattgttaaatttgttgccaaaatttcatgctaggttctggcttgatttatgtttgtgggagtaaaaacagaattcattgttttacctgaccagcccattgctaactccatagcacatgcacgggaagataccgtggcgcgccgatgctcagctgtgatcacttcatttctaagtgttttaagtggggagcaaagtacatgttaaaagcatgttgcattagatataaattcagttttttaaactcttaccaatgtaagaactgcagaaatatttttcttaaacctaatatgtaacagagtcctccactctgcagtttatgtgacccacagttttaaagcaattccataaatgtatattttgtattatgtactgtttcctggtccaaagaaaaatctgtgaactcagttctaattttaaggatgtactttttgttttctagttctttgaaaaattgcattcagcctgtgaatggttacagattgtatgtgagatgaaaagtcgagctctctggtttgcaaaatcggtgccgaaataaagcaggcaagtgcatcatgtgtgtgcttatgattgtttgactctgcaaggagcgtgcttgctgtaccgaggaatcttagaactctgggaattagttattgagtaatcttaagggaatttttcccctagtagaactcggtaaattggatgatcagataaatcaagtcataatttgacctagagttgtttctaattttagggaggtaactggtagccacaaagtgtgggttaatagttatttttatgaaaagactccataaatacagagaagccagtagttactcttcttgggcaagaagaatggtaactgaggattggaactggtctgaggaaggactgtcagccaatagtagcctggatgtgggtgtgtggaggggtgtttgtgtgtgtgctcggttggatgttgtggtgtatgtggtgtgggtgggtgggtagggaaggaaggcttcagaagggaggtgcttgcatggttctcctgacaactggccatagctgatctgtcactctgtcatgtgtttacccgtgtctcaagatgacctatagattttcaagtctgctcttcacttgctacaagtagagatttgaaaactggtcagatgattaagtggaaaccaaagtcagctcccagctgctttcctcagtgctcaccaaaagtctagtattacaaaatgttctattgctcagtagctcagacagagcttgctgtcaaatgtgctgcattacagaacataaagtttgccacaacccaccatgtggccagatataagattttgctttgctggttccctggagtcagcatgagattcatgtgtgtttctgttctaagattcatggtaatagttgtggtgttgcctatacacaatagttatgcccagaatgccgtggttgtagtttttaggcacaggcttgaatcttccagaccaaagcactctatccacagttatccctgcagtcacatacaaagtatctttcagaagttagtttccaccaggatttccaatatttgaccattattgatctacagtgatcattttaaattcttcaatttgataccctttgaaatcgtcttaaaacaaccagagtatcagtagttggtatttctccatacatatccatatacaggtacatatatttgcaaggatggcgttcataataggctaagtttacatggtgtggtagtatccagtcaacataaactgcttagctgtcaatctgtgaggagattttttttttcaacagtgttgatggaaaggagatggtgccatgctgaaatggtcaaagcaatgttctacatggacagtaaactggaaataggaagatattttgggatcaaatcacttatgaggtaaaggcactatgcaagcctggtaacctgggttcaatcctggggacctataggaagagagctgacatcagagttgtcctataggaagagagctgacatcagagttgtcctataggaagagagctgacatcagagttgtcctataggaagagaactgacatcagagttgtcctataggaagagagctgacatcagagttgtcctataggaagagagctgacatcagagttgtcctataggaagagagctgacatcagagttgtcctataggaagagagctgacatcagagttgtcctataggaagagagctgacatcagagttgtcctctgacctccacacaccttgccacatgtgcagcccctaacacacatcatgcacagaaacaaagtagtaactttcatacctgaggcaaatgcctgaggtgcctagttaacatctaagtggacctgtcttctaagttttcccagcatccttcagtccccacctgttacatgtggcataccttgctctacccagtccagaggctgggctgtccttccccaggagctccttcctaaataatccagacattctggttacccaacccttgaatacagttggcatcttagctgctgcactgttcctgtctccccccccccccaccccccatggcccagctcagcctggtcatgtccttgccactacccatgctctctcttatttacagtaaactttctcctccacaatccctagaagtcatgtcttttccttttttattttattttttcatttacacaacagtatatatctttaaaggatttgttttgaaatgcatgacaagagctggagagatggcttagtggttaagagcactgcctgctcttccagaggttctgagttcaattcctagcaaccacatggtggctcacaaccatctgtaataggatctgatgccctcttctgatgtgtctgaagacagctacagtaaactcatatatatatatatatatatatatattttaaaaatatttaaatacaagaagtaaaaaaagaaaagaaaatattgaaatgcacgactgaaatgaagtgaccattctttttagtattggatcagtgttgggaatccagtacagtcttagaaaaattctgtgaaaataattgttctctaaataaattcagtttttattctggaagggaaactaatttagactgtggctatcctattgccttctaaaaatcttttaaacttgcagtttactattatgtttgaaatgactggcaacattgtgtagaaattttttttttaaaacaatcaaaggatttgccagtttgtggcttttgtggttcagagggagttttcatgtgccttctctgtgtatataccattccggggtatctgctcgtgtatcaagcagtcttgaatgtacatttgactttgtgtaacaaaagagtttttgaaatgttcattgtttattatgctaaggacatagttctttttaattatttaactcttaactaccaagaactgtagaaactattttgtttttttgcaacatagtttctttgtgtagccctggaacttgcactgtagaccaggctggccttgaactcatggagatctacctgcctctgcctccgcctcctgagtgccaccactcaggctgtggaaacccttttaaactaacagtttcaagaacatttctaaaataagtacacacttttgcatttggggtgattgtagatatagtatagtccggacttataggaagtgattttttttaaactcctcataaggcaaagtaagagaatatccgtgtaattgatgcaaatcccacccatcgctgcctttcttcaggcacctggctgcagagatcctcagaataaaagcagccctagcatttcctgaatacgctggaactgcttttgtgtgcttcgcagaaaggaggttgacttggcagtctttttaaatgtttatttgcaatctagaggcaaagtccttgccttccctccaccatctcttgtttttagtttatatacacacattttcagactccactccgctttaggacttccatgagaagcccagagaattctaaaatcaaatctgcatccttacacacccctgggctctttttttgccttgtgttacgatttttgcaacaccgtagacactgcagctgaacagtttgaagtgtgttacgtgtgctgatattcttgttcaaagtcaggttcccagtcaccctgaccttcagagaggctcggagagcagatggacctagcacctaactggaccatggtattggtaaaaagcttcagcctgggacaatcagggtttcacagagggacttgtgcagagcaagtctccagagtgagctaagaatggagtgttgggttttaaagattacagggttggttcttttggaactgcttatattcggatttcctggactgaatgtcaagtttgtttaaagaacatttgttcaggcataaaaattgtttgtttgtgtgtttgtttgtgggggaaatgattgtaccctggacatgaagttattgaatgaagttgacattttcctgttggatctcaaagagagaaaaggcagtagagtaagggaggctggtagatggttgtacactgtagctgcctgcagatgcaccagaaaaggggtcagatctcgtgagtcaccttgtggttgctgggatttgaactcaggaccttgaaagagcagttagtg

SEQ ID NO: 332 - DNA, 1387 bp, Mus musculus
cccgggcccggccgccgtcgcgggaccccgtgcccggccgccgtcgccaccgccgccccggccgaccgagggacccgcccgcccgcggctgttccggacctagaggatcaagtcataatgggagcatttttagacaagccaaagatggagaagcataatgcccaggggcaggggaatgggttacgatacggcctaagcagcatgcaaggttggcgagttgaaatggaggacgcacacacggctgtgatcggtttgccaagtggacttgagacatggtcattctttgctgtatatgatgggcatgctggttctcaggttgccaaatactgctgtgagcacttgttagatcacatcaccaataaccaggatttcagaggatctgcaggagcaccttctgtggagaacgtaaagaatggaatcagaacagggtttctggagattgatgaacacatgagagttatgtcagagaagaaacatggtgcagatagaagcgggtcaacagctgtgggcgtcttaatctctccccaacatacttatttcattaactgtggagactcgagaggtttactttgtaggaatagaaaagttcacttcttcacacaagaccataaaccaagtaacccgctggaaaaagaacgaattcagaatgcagggggctcggtgatgattcagcgtgtcaatggctctctggctgtatcgagggcccttggggatttcgattacaaatgtgtccatggaaaaggtcccacagagcagcttgtctccccagagcccgaagtccatgatattgaaaggtctgaagaagatgaccagttcatcatccttgcatgcgatggcatctgggacgtcatggggaacgaagagctctgtgactttgtgagatccagacttgaagtcactgatgaccttgagaaagtttgcaatgaagtagtcgacacctgcttgtataagggaagtcgagacaacatgagtgtgattttgatctgttttccaagtgcacccaaagtctcggcagaggcggtgaagaaggaggcggagctggacaagtacctggagagcagagtagaagaaatcataaagaagcaggtggaaggcgtccctgacttagtccacgtgatgcgcacgttagccagtgagaacatccccagcctcccaccagggggtgaattggcaagcaagcggaatgtaattgaagccgtttacaatagactgaacccttacaaaaatgacgacactgattctgcgtcaaccgatgatatgtggtaaagccgctcacccagccgtggactcaccttcgcctgcaaaggggaagccagctcatccttgccgagcctttaccatccatcaccgacttcacaggagggtctgacacgggtgaggactgcag

SEQ ID NO: 333 - protein, 419 aa, Mus musculus
PGPGRRRGTPCPAAVATAAPADRGWPAAVPDLEDQVIMGAFLDKPKMEKHNAQGQGNGLRYGLSSMQGWRVEMEDAHTAVIGLPSGLETWSFFAVYDGHAGSQVAKYCCEHLLDHITNNQDFRGSAGAPSVENVKNGIRTGFLEIDEHMRVMSEKKHGADRSGSTAVGVLISPQHTYFINCGDSRGLLCRNRKVHFFTQDHKPSNPLEKERIQNAGGSVMIQRVNGSLAVSRALGDFDYKCVHGKGPTEQLVSPEPEVHDIERSEEDDQFIILACDGIWDVMGNEELCDFVRSRLEVTDDLEKVCNEVVDTCLYKGSRDNMSVILICFPSAPKVSAEAVKKEAELDKYLESRVEEIIKKQVEGVPDLVHVMRTLASENIPSLPPGGELASKRNVIEAVYNRLNPYKNDDTDSASTDDMW

SEQ ID NO: 334 - DNA, 64316 bp, Homo sapiens
agaaatagggcttgcagtctttcttttgaagcactataagaagaacaatctagagtttggattcagaaccaaatggtcacctttggtacagatggcatgaaggagaaaactcacacaaaaggggtccagcaatggtaagggaggcagatctttccagcagaggatccttgtcttcccttgatcccttgtaggtcatacgtacatgttccattcacaaagctgaaggactagaagttaaaacaagtcttgaaaagaatgatttttgccctataaccagcaattctagagtgaatctataactaagcccatataaaatatgggatggataatgtcaaatcatttacaatgtattattaaaaatacatgggccaggtgcagtggctcacgtctgtaatcccaacattttgggaggccaaggcgggtggaggtcaggagattgagaccatcctggccaacatagtgaaaccccgtctctactacaaaaaatacaaaaagtagccggggcgtggtggtgggcgcctgtaatcccagctactggggaggctgaggcaggagaatcgcttgaacccgagaggtggaggttgcagtgagccgaaatcgtgccactgcactccagcctggtgacagagggagactccatctaaatatatatatatatatacacacatatatatatacatatatatacatatatatacacatatacatatatacatatatacttatatatacatatatacatatatatatacacacacacacactatgtgcttaaaagtaagttatgttttctttttgtcaacttttatttttaagttccggggtacatgtgcaggatgtcaaggtttgttacataggtaaatgtgtgccatggtggtttgccgcacagatcaacccatcacccaggtattaagcccagcacccattagctgttcttcttgatgctctccctgcacctcacaggccccagagtgtgttgttccccttcatatgtccatgtgttctgctcgttcagctctcacttataagtgggaacatgcagtgcttggttttctgttcctgcgttagtgtgctgaggatgacagcttccagctccattccagagtctacgaagaacttaaacaaatatacaagaaaaaaaaattttaaagtgagcaaagggcatgaacattttcttatgtatgtacacattattgggtcaggcaacgtggtaggtgcattgtgtacaggatgtcatttatttctgcaaggtagttgatataccctgttccagaagaggaaaccaagtctgagagaggttaaataactagtctacagcctaggcaaaagagagatgatctttgaactccaattcatgcagtggtcaaggggtattctctttgattgcaacatgtttagaatgttttaaggttattatttttctgaatgccttcaaatgtgacaagtatgctctactgatccccattgtgtcagacccagcctgatctaaaatttatattaccagcctggccccagtcaaaggagctggagttttcagattctggtgctaacctgaattctacctaccacttctttacaaagaggcctctgccgtgtttgtaccagcggcaggatgacttgaagctctccatggacatgcggtgggggtggaggtgttgatggatattgtcttggcttttgccttatgtgggatttttaagaaatgtgcaggaaaaaaaaaacaggaaagtgtattaggagaaggcaggatagaagttttcctcacgtggagagagcaggagaatggaggaagtgactgctggaagcaaaactctaagaaaaaaccaattttacttggagcttaaaaaagattttgctgtgtaatgtgcattgtaactcttctcccatctccccaaggcatctttggtaaagatgtcattgttgggctttttgttttccatggcacaatgcactgaaagggcctcaaggggaaagcaagtcatctctggaaagcttagccagaatttgcaacagaaagagtgggaattttggaatcaggtcctaggcttgcaaaagagctctttttcacagccttagcttcctcctttgtaaaatggaaaaaaaaatagtttcttttttgcaaagttgttgtgagaattaaataacactcatgaggggcattgtatggagcttggcacattctaggccctctttttatattgaactaatatgatcttctctgtaattcccatgaattaattccagttctattttgcaaaacattgattctttaacctttttcatgtaatggtgctccagtttgtctagatccttcaagaagagaaaatgcatatcaacatctttgtatctagttgctctcaagcttaaaatgatgtcatttttcaattattgcttttattatacagtaaaaacatatttagaagagactcaagataaatattaaaagttaagctagttactgaacaaatttcttaaatatttacgaaaaataagatcaacacacatttgaccatggcagcttttctaaaggcaaaggatctaatttggtgattaactaaccatattgagcactcattaggtgtcagggatgtaccagttcttctactgtatttgggtgtttttaattatgaataaccaaatacaaaaatcaaagtagtttaaacaatgaggagcatttattatcactcttaaaaataaattcccaaggtgggcaattgcacggatggctcaatggctttacaatgtgaaagatccagccacttgctatcaattcttttctctacattgccttggttctttgcaagataaccttgaaattccaggctcacatatagaaataacaacatatggctgaggaaggcattttctctcctgtgattcttcttattagggaagaaaacctctctaccccctcaagacttctcaatttcctttatccagaattgggctacctcactatgtccccaggcagtgcttctcaattttttcacaccatgacacaaatacaaagataacgtttttgtgacacagaggggtacctgggtaatgttgcttgtggccagtcataccatcccagggcttcagcagctcagcctcacttgaatgtcccaagggcttaagggatccataccttatcacatctatgacccatctgagacataccagggtatgctggcacatagattggtatgctctgctctaagctacaagggagggtgagagagcatgcatccatatacatgctctagtgagagaaggatctgccaacgaggaggctctgccaagtagtaggaagtggtggggcaaccaaccgcatcagtcatcttttcaagggtgccttcatctattctaattttcacaacacattttaggaggaagtattctgtggaggataaaaccaaggcttataatttaaatgacttgcctgaggtcacagaaccagtgagtggttcaattgacacagcagatgcagatccaggtgtgtgctgggaaatgtttaacaaccacctttccaaatgtagttccaacatggctattggttaatattttcatttaagataaaaataaaacaacaaaaatgtatgttagagcttattagtcaatgatgtgacttcattgctaaattgaatgtttttatgctattcaccatgtaacagttatagacacgacatgtcttttacatttaatctgcataaaacattttctctgtcacttaagcctagaccaagcttgtccaaccctgggcctgtgggccgcatacagcccaggatggctttgaatgcagcccaacacaaattcgtaaactttcttaaaatgtgagattttgtgtgtgtgtgtgattttgtttcgttttgttttgtattagctcatcagctatcattagtgttagcgtattttatgtgtggcccaagactatttttcttctgccaatgtggccgagggaagcaaaagattggacaaccctggtctagcccacaaccagcaaagcaataagtgaagccctcatctgtggtgtccgctgatcaagctaccaaagaaaactcactaaatgtggtattgggaagagatgtacaattacatatagggaatttccaccatgcagacacaatgcatgtaaattgcctaaagaacaaagacaatattaaaatgtattaacataatttggaagtgatgtttttatcacatactacctttgtttaaaatttatttcattggaagtttatctaacttaatttttatttctatttttatatttatttattgattgatttttgagatggagtctcaccttgtcacccaggctggagtgcaatggcgcaatctcagctcactgcaacctctgcctcctgggttcaagcaattctcctgcctcagcctcccaagtagctaggattacaggctcccgacaccacacctggctaatttttgtatttttagtagagacggggtttcaccatgttggccaggctgatctcaaactcctgatctcaggtgatccacccacctcagcctcccaaagtgctgggaatataggcatgagacactgcacccagcctatatcatttaatttttaataatgagtatttaacaaacagcaggcaaaatttctgaaaatttaataatctgctgtcatgagccagtataggccagctctccacaccacggactggaactaagttcagcactctttccactcctgctgcctttactaccagcatgtaaaagcaatgatgctcagtatcgtacgggggacaaacctgggtacccgtcattaatttctgtgaccctgggtagttactaccagatgcttagttttctcttctataaaggaggagattaagagtccttgccctgtctacctgcaagggtttttgagaggattaaactggttagtctgtatgatagtgctttgtaaactgcagagtcaggttcagataaaaggctttatgatgatgacaatttcattactgttttcaaccaggccaccattgttaaggatgcagtgtgtcgctgctttcaaaagtatggtttagtttgagatcttctgtaatgcccaggatagacagtaaacacccagaagaattgttctgaagaagcccactcaaatctgtgctagtctttacttagcacaaataggtacctatattgggatgaaaactatttatttgaagcttataattcactcttttctagctgctgctggattgtctgacgggtctttcctggagttatggaatacttctcaatttcaatagttgaataaaggtgtttttttttctgtcatgcaggctagggtgcaggggcatgatctcggcccactgcaacctccacctcctgagttccagtgattctcctgcctgcgattctcctgcctcagcttcccaagtagctgggattacaggcgtgtgccaccaggtgtggctaattttgtattttcagtagcgacggggtttccccatgttggccaggctggtcttgaactcctggcctcaagtgatccactcgctttggccttccaaagtgctgggattacaggtgtgagccactgcacccagactatttttaatttcaatttttaaaaaagttgctttgctttttgcaccagaccaactcaccaagttattttctatggattatacccgtgcacataatgtagtttcctgattataaattaaatatccctaatgtccacgttgaaacactctcgaaacttaaatgaccataaactatttgccttgagtttgctgaacttgtctttgggctgtaagaaactcttttctgccaagctcttttccacatcaggccctttgcccatgctgacccctctacctggaaagttctcccctgattatgaagctgactccttctcatcctttagatcaaatgctgccttcttagagaggtctgcactgaacacctgtttcaagtcgtctcccggatctgtttccttatttattttcttcacagcatggataacagtatgcaatttcctttctatctgctgacttatttgtctatgcctcttattattatgttggctctttgtgggcagggcttgcccattgatgtcattatctacctccagtgtcccacacagtgcttggtgcacaatagctatctcatgaacagatgaacttatctgacaagatccactctagtattgtaaggctgtggccatatatggctatcttgaggtgaaagcctaccctaaagactgtccaggacttggcctctggtgctcacagttgcccaggtttctctcaggtcgcaggatgagccacagtggtagcataagactgctggctgctcccctctgcccctccctaatggggctgcccagtgatgtcacacaggacaggattctctaatccttttgattctgtaacagtcctctaagcagctaagtttctcataatgtattatgatgtaggggagggaggaaggagggccagggtaggcggcacaccctctccctgaatgaaattcatttaggggcactgtctgctcgcatgttctgttctgggagaaaatgggtagcagaagctacaatttgtactaagctaatgaaaagagagaaaagaagaatggggaagagaagggcaaagaaggcaaaaagagaagagaagaaaaagggaggagagagaaggagaaatgagaaaagaggaaaccaaatgaagaggatgtgtgagagaaaaaaatatgaaacaggtagtgagggaggaaggaattgttgaacctatgttctggttggctttctaactcttgagtagtgactggcttcagtggaaaaggatggtgaggggtattctcaaatactagcctcctgagggggtcatttacattactgcatatattttgagaggcccaggcaagtctgcctcaagggtgactctcctggagagtaatttgggagcaggaatgtaaacctttttttaagtcacaattgtggtggaaagggaaagagagtattgctgatcagattaagctttagactccacactacagcccctgtcctcaccccaagcctcccaattactaggctatcaacacacactaaattcaggactttaaagccaatcttgtagataatctttttctttgttaattgaaatataaacagatttccaaagcagagcaggatagttttataatatacctataaaaattactaaaatgtcatcatcatggcaatatattcccactaaaatcttactgtgaacatcccaaatatgtgtagaggcccggcaaagtcttacagttcagaagagaactttcaatcctcttttttcaatgttattttccccttctatctgtccccccttcttagcataaggtttaataaaaggggatatgatgatattaaacatatttaatcagacaatattgatatctttttaaaatattaatcttataacccatgagtttcctagttcataccaaaatgtccctgcaagctgtattcagaaataaatagtaggaaggtgctgctttatcggcagtctgtacaatgcgtagactccttaaaaatttctttctgttcatattttctatttctctccctcttcttctacaattgacccagattctccaagtgcagaacagagagaagaaaggtgtggaagcctaaaggaaggaagcagaaagataggcaggcatttcaagttttctatggtccactaccgtcactagtgacccagcttctgcttataaataagaaaatttgtcttttaagagcactctaaatggttgccatatgagcttttgtagttcagaatgttaatgagtccaccagcatgctactcatgctgttacttgcctggagtattaaggattccaagaaggtagcgtttcaaagatctctgatctaatttctttttttggggggtcggggagatatgtggagaattaggaaatgtatcctcagatgatactgagaccaaatgcatagtgaattttatttttattttgtatatgtggaaatgatccacgatcatcttctaaggaattctggccgggaacagtggctcacgactgtaatcccagcactttgggaggccgaggagggtggatcacgaggtcaggaaaccgagaccatcctggccaacacggtgaaaccctgtctgaactaaaaatacaaaaaaattagccaggcgtggtggcaggcgcctgtagtcccagctactcgggaggctgaggcaggagaatggcatgaacccgggaggcggagcttgcagtgagccgagattgtgccactgtactagcctggatgaaagagcgagactctgtctcaaaaaaaaaaaaaaaaaaaaaaaaaaaagtgaaggaaacagaaccttccccaaagtcatgttgagaaaattagagatggctttttacaactttaaaagcagcagctaaatatttgctgaatgccagaaagaataaataggttgcttttgatctaagagttggggcaacaaaatggtttaggagatagaaagtagtagggtgcaaattgctatagtgagctcctcaagtaaaatagagaggccttcaacataaatttaccttttttactggccagaactcaatttggccagtaaaagaacctgccttctacaatgaagtctttggtttgtgtgtgcatcagaacatcttttaaaaatacggacttttcttctaacttcttttcctgcgaatgtggtgtaggtcaaattcgtgaactggttaagccgctgacaagagagggaagggcaccccagccaatgggaacccgtgctggtgatgtactgctcctaggctgcgattcattggctgcctagggtttgtcattctatccccggcgtctgcaagcagcgtgggtcgggttttccagctagctaaactggattttggccgctggcacgtgcagtttctattaactttagctcatctctacctcttaatagaagcagctgttatgtttctgattattctcctgattttgaaaaatcctgttcccttaacctacctcattggaggtcgttggaggtcccctgggacagaaccacgtgattatctaacatgtgcaaataaatacaatgtggaatcccctgaactatagagggaaaacctgccagaaactcagagcatgtgccccgtgcgtgaatcagttgcactcgcacattggtgggcggtggtagcgtgcttgtgtctctgccctttgggtcgcgaggtgtgtggccgtggcacctgcttgggcttcctggggtcactgggagaggaaggctctggaggagtgggactctggggtaggggggtctggcagctgcctgggacccaccatgggttcgaagggcagcggccagaccgcgacggcgcccaagaagggtggacagcttcgggtctgtgctcggggctgcgtgtacaccatcttcgcagggagtggggtttgtatctgcaggcaggtagaagagccagggctccgggcgcggacgccgtaggggtagcttccgagtccctacttggccaagggccggcacggaggggctgtcgatctactgggcacctaatagccgcacattctgtccagtccctggcgccggaacgtgaaggcccgggtcctggctgctatccgggatccggacgctcccttcggcttcggcctggtgctccaggccgtaaggcaaaggcggcggcagcagcagcggcagagaaagaagctgggtaaggcagtgacgtcatctgtggcggcccctcccccgcccgccagccctcaccgcagttcctgcccaacgacatccgggtctctgtagctgcgcgccgcgccgcagctgtagcggcggcggagccagcggggcggggcgagcggaggggtgggggaggggcgacgcggtcgtgagcgcgcctgcgcggggccgcgctagaggcggcggcggcggcggtggcggcgctagggacgggagcgcgcgcgggagctagagagcagtggtctcggcgctcgtccggcccgcagcttcgggtcctcaggcggctgttgctccggaacgggtggttggggaggggggggtggggggactctagacagctgaggcgcgaaagcgatgagtcctcggctcttcctcctccttctccgggacccgctctctgcctccctctccaacgcccggatgatctgagccgcgagggcgccgacagccgggggcccggacgcagcccggctcctcccctcctccgccccttccccagcctgacctggcccgccgctgcagcggtgacccctcccccggctgccgccgtcgccgccgcggtgaccccctccccggctgccgccgccgccgcctcggccgaccagggacctgcccgcctgcggctgctccgggtaagtgcggcgctcgggccgacggcgggctggcgggcggtgcgggcctgcgcggcggcggcggcgggcaggcctggggcctgtaaacaagccgggcgtctgcccgggcgctcccgggaggagacgcgacaactccaccccctggccggcctcctcccccgagccgggcggcggacggcgaggggttaacgctcggcgagggcggtggcggggaggcgggggcggggtgttagttgcggtggcgcggggagggggcgcgaccctctggccgtccgcggccgagatgggtgtttgtggcggcgaagcaggcgacggccgcaggccggcctggccggagagcggcctgcagaacttttcccgagcggggagggggcgtccccgcgcccccacccgctcgggcgcgccgccccggctgtcctgggcttcagcccctgggagggaggcggggagacttcctttgaaccgggcttagcctcgaaaaacctaattctgtagaaattgcttaaggttttacagggggcagggctgagagactccttcagaactcaagtcagtgagtgatgcctctagttcattcattattaaggcatcgaacaaatccattgaagtaaattccgatttcttatccttttaactacgtaaatcgggtaaaacttcttgatgttagagcttggttgaggtatggttctgttctgcttgtagattttaaataaacttggagccttttcttgaaagacagctggctgtggagagccttctaccaactgcagttttagatacgttttgaaaatttcatcacctgaggtatttttcttctctcctgaaacaccacatggtacaaatccacaaaagtcatgcttcagttgtccaagccatgggatctgtgtgctagccccacctccccgcaagtttcctgctcattggaataatgagctgaatgtgttttaagaagtggttggaagagtatgagagataggtatcattttctcaaaggaaatgattttgacattattgagagaaattagacattttaacaattgttttgtaaaacagtcttttcaaacttgcacgttggggttttaaacacaaccactttacatgtgttgcgctccgaaaagtggagggatttgttgaaacactactctgctgagacttagggttccagagcacttgggaatttagcatagcttggtccccaactctctttgaaacactttacttttatacttttatcttgctacatattgggccttttccaaagattgtatttctgtaactccttattttacaaatgagaaaattgaaaataaggagattctctattcttagatgctgcttttactgacttaatgctttctttaccaataaataatttgaagcacaaagtaacatttcctagtgttatagttttgttcttgttatgtgtaacttatatgtatctgattaaactttcagtcatgtaaggatgattacttttaacctggaagtttacagcagtaccacattattgaaactataatgaacttcctgcacatggcagttgcctaagacattttaatttgatatcataaaacatttttagatcggtgaagtaattatattatgggaaaggtgtattaagactgataatgtttgaagttaactacctcaattatatttgagaaataatagtcatcaaattgctttttatttggcttgtatctttttatgtattttgtgtacatattgtatctttttacatgaggggctgaggtatatgacctgttgaagggaacagtgcagtaggagacaaggattgtttagtcatggctgtgctccaaaatatctgtgtccatggacaagtcctttaaccttttgagtttcagcttccaaatcagtaaagccagttgggcagattatattatcacatgtactgtccagttactacatttaaaaatttttttttatcaatattgtgtgtctagtcaacataccgttgccaaataaatgcctgttatgtgtcaggcacttagatgtttcagtgttctaaggctggatttctttctcggttctgttttatttaacaaattctaagttggtgatggttctttagaaaagctgttcttgtgttcttgtaagctattgatttttcttttgggattgggatgtgtagggaaactcttgagaggaaggaggatggagatttcatgggagacaaagggtggttgagactacaggtttgaacaagcacaggacccttggtagtctgatgtgaaggacattataaaaacacattatgaaggttttttctgtcacttcaagctgggtcttgttaaacctttgaaaattctctaatacctcatttgtttttgaaagaaatctatagcaacatcattttgtcatgtggtaaatattgctgagcagtcactaaatacctatagtcttttagtttgttcagattacatctaggccatttgtttactctaatagctaatagaatgtacagctgattttggtttaactgtgcgtgcatatttgtaatttttaaccaagaagtggcatatgtccacaaggaacttgttatctctgaaatactcacccatgagagctggattaattttttaagatgtaaatctatgctcatgtagaaataatataacaaggtgatattttgatgatcctctcaaatgattatctaactcttgcctgggcacctgactctgagtcagtatactcttgaatactttccatccttaatcaaatcaggagaaagagatggccatgtaagaaaattggccacggcagggttttataagagttaagcaagaagataaaacaacacatggccctgtgaaatatataaaccttggagaagaggagaaggtatagtgaggcaactgggtaaaagttgtgtcttcctctaagtaattttatgtcacaatatgtcctgtcttccatctcaaataacaaattttaaaattaagttgtgtttgttattttgctattagccaagatatataaattaactgacctgggattattagccatttgtatatgaaataaacttgggttaacctatatcaaaatcaaaagattgattatattctttacccttcactctttcaaatgtcttatgttctccatattacgtaacaattttatacttcattctgagtctccagaatatattctttgatgattttgacctttgaatgtcctggctatccatgtactacctagataatctcgttaccaggcttttcttttgctgaggcaggtcagagctagagaaagtaagcaattgagagaggcaagtttctgtatacctgtatctaaaatgtaatagactttataatttttgtaaggaactgaggaaaggtacaggcttttaatgtgtatcagtaaactagactcttatacagtttttataatattagagatgttttaagcttccttgagtaaatatgtgataaaggggggatcttgagtttttataattcttaatatgtttatttggaatccattgaccaagtgtatgtagtatccatatttaagatctggattaaaagcgattagtttctgtggctgatacgatttagaattaagatcttttgagactaaactacttctagatacagaagaacgtcatgaaagccgtactttcttggccatttatttgtgttaggctttaattttttgccataaccctctaaaatatgtgatgttatcttcattttataaataaggaaatacagggtcagagaacctaaataacgtgccaggatcagatctgggtagatataaaagtatttttcaagatattactgagtggatttttcccaattagatgaacctccttattaccaggaaccaaaatttcaaaagctaaacattaacacttacgattcatagattcctagagttaagcaagtccatgttagtttatgtaaagtcttccaatgcaagactaatgttttcttctaaaacattcagaaaagatttaagaaattaagttcattttctcattcccaaagtttcagaagttaacaaagctaaacattttatgtcttcaagtaccattgtttaggttaaggaatggaatccatgttaattctcaagtggttgatatccttaatgaaggatctagggaaatgtttctgaacagatgtaatcagtagagccacattgaagggccccgtggtggacatggtgataaaactaacctttgaaagaaaggacagtttgagtccctgttctcctatttcgtagccaggtgttcctgggtaagctacttgatttcttaaacctgtttttttttatgtcaagtggaaatacttttgtcgtaaggttatcttgaagatttaatgaaataattatataaagcatttgagatcttttctaccatgaagaaagtgccaaataaatggtagctgttattattgagtatatgaaatcttgagatacttaggggtatagagacttgcttagtatgagagggttgtctttcagtatagcttttgcagtgtgcctggaagccaaactagagattgagtagagaatttagaagacattgtaaactctgtgagtttagagagcttgcatttgaatagactaaaagttaagacgtaatagaagaaagagaaagttgagtatgagtagctttatttggctctgcaaagctggcaagatgtcaagggtttggagttaatgattaggtgggagtagatggttaaattgcggataaagagtaacagtaataaagcaaaggtgaatgttcaggctagaatgatcagtcagtaaggaaggacaagggttggtattttgaagaggagttacagtttatggttagaaatgagcaggaagatatcattgctacaggaaaggatgcaaaagagtaaggaaactaaatcattctgattaactcagttattaccattttttaaaaatggagtctttataaaaggcgttaaggctttatatgtgagttctaggttaagtctgaaaaattgtcttggaatagtgtgggtcttactactgcagacccaaaccaagatattagcattccaactggtctctttcctgctagcatcttgtactgcatctcctccctgattctataaaccatcaaaattctttctaaactatggtttttcattatatcatttctctcagtatacttcagtgactcccatttacctctggaataaagttcagaattcttggtttggcttttgacactttccatgattggacctcaagacattagtctgttataaccaaactagtacacttgctatctctggaacacgctcttttctctccatggatctttgctcatgctagtgtgcagtctggaatttgtgtctttccttctccagctttggttttctcttttagcaaagctcatttctaatatttcttcttccacaaagtcatctctgacccccagagtgtttaatctctcctttctctgtacttaaagcaatgtctgtgtattatttctatcatatgttttttttttttttgttttgttttgtttttgagacagagtctcgctctgtcgcccaggctggagtgcagtggcgcgatctcggctcactgcaagctccgcctcccgggttcacgccattctcctgcctcagcctcccgagtagctgggactacaggcgcccgctaccacgcccggctaattttttgtatttttagtagagacggggtttcaccgtgttagccaggatggtctcgatctcctgacctcgtgatccgcccgcctcggcctcccaaagtgctgggattacaggcgtgagccaccgcgcccggcctatcatatgttttacctttagatatttgtgtctaaattataattgcattcagttaattctaaagggaaaaataaatttttactttacacaaaggctagcggctagcacagtgctttatggatagtagacattcagatatttggtaagtattaagcaaaatctacctggagtgaaagtgattgttgtaggaggaggtagtagaagtagttacaagctttatcgtagcagacgtttctgactctcttcctgaatgttattttttctgaacctggatatttaagtgtgaagattatacaaatctgaagtgtggcagtgttcttatattgatgtagaagactaggttgactgatcctggacctacaagcttcattttaacttcctacattttggctttgagggttaacaggacatttataatcacatatctcttttcagagtattttacatttgcaaatattatcatgaactttgtgtccttttaaccagagaggaattgtggaatcacaggaattagatgatgtgttaaagaagagagataactatcagctgatttaatttgaacccaacaagtatctaataatatgcatactctgtgttcaaataaacctctaagctagactttcaagcttatcaaaatgctagactattttcagtgtttagaaaataccagccaggtgtggtggcttatgcctgtaatcccagcactttgggaggctgaggcaggtgaatcacaaggtcaggagatggagaccatcctggccaacatggtgaaactttgtctctactaaaatacaaaaaattagccaggcgtggtggcacgggcatggtggccacccgcctgtagtcccagctacccaggaggctgagcaggggaattgcttgaacccgggaggcacaggttgcagtgagccaagattgcatcactgcattctagcctggcaacagagcaagacatcgtctaaaaaaaaagaagaagaaaaaagaaaatacatagtaaaatttattggctttttaaatggataatttcatatagtcagtcagtgccggcttagatccatttgttagagaacaatgctaacgagacctcttgatactttgtgttcctcttatgttttcctagccttgacgttagcaactaacaatgataactaacattattgagctcttatgtgccagggactattacaatagattttcaattattatctcattaaatcttcatagcagccctatgagctagatactgttactacctatatcttaacagatgaggaaatttgaaacagagcagttatttgccaagagtttcagagctattaacagaagcctaatacatgttcttggactttgcagaaataatttgttgatccatgcggtttcattgctactgcggaaagtaagtctcttggccattgtgatgggtcaaaatctttgtacatgaagggtatgactgttgttccattgtatccagagagtgaatcttgtgattgagttgggatttgaggtggcagtgtatactaagtttgaaaagtatattatcatatgttagctccctttagaaattttccccaagaagagctattacattttttaatattaaaaaagcataagatatggccataatacaattagttccacaagccatacacacttttttcttatggcttaaaattttattcatgtttactactttgcaacccactgatataaattatttcacagatcctttattcaaatgaaattctcagtgagtctgagaagatagtcttaaacacaagctagctgagtttacaatagagattatactataaatggtaacttcaatgtttattgaaaataaattccttaaaaacaggtcttgtttcattcatttaaagagattatcaatatatgactgttaaatttttatagtctccctgttcattttctgatgaacacatgacagaaaattgaatgtgagctggaaatacagcagactatgagaaagcatgggtcatgtataatcactttaaatttaggctggtgttttgtattcatctataatatgaccacctcagggagggatgtaagtaaacattctttttttagttatactttaggtggcttaattattttaaagaatatgttattcaagaattgtctattgtactgttttaaagaataagaatataattcattaccaactttgaatgtcttggattcttagtactacctttttctttatcatgactagtaggatcacatcataatttggtactgtgtgtataaagatgaagtgtgcttacctttattaccaaaattcagaaatgaaaatgtgaatgataaaagataagggatggctatatatttttttgtttttgtttttccaaacagaatctcataacttaccaggctttagaaaaacatctttgcagtatgccatcatacctcagaatgttaagtagataggaaataaaattttcactttttgtaaagcagtagggtattatcctttctgacagcctgtaagactgttttggttgccaaggggccaatcttagaagtggcagtttttgttttgtgaccaacccacagcttaccctttgttagtccatatctgtcatcttcattttctctttctgcgtaaatgcttcttgatacagtaagcaggtgtttcaactagtcagccatctagtgtgatcttttctggtttgctacagtcagtaaaataagtagctctataagtgtaaatagtattacttgttttatgtagtaaaactccaagattaagttagagatatttttggctagactacattgaatgcattgacaatggatttcccagctcccagaaattcgtttgtgtctgaattactttatacttggcttcttgtgtagagaaaactttagaaaaagttcatccatccatgaatgttgaatgaatgagcagattaataaataaatagctcagggaaagaaaatgtgtgggcttttagtcataactatgttttttctcttttgttcccttccttatgtgccatttttcaataatgggagtgtgtatctaatgatgttgataaactgtttaaagtcattgatgaacagtaatctgaaaatcaagttttgattaagccgtagatttcttttagggtccaatattttctttttagaaatccactatgatatttttgtagggataaaagacaaccatgtattctatagatggaaaatggtaggatacagtttgttggccggccaacttctctgaaaatactttttcctgcatagaagataatcagtgttgacaagggagaagccaaggtataatggctgttattcatctgtctcatgtattcgtcaagtgtcatgtgttaaatatgaacaaaaaagacataatctctttcctcctggatcttaaaatctaaagtgagagataattcaccagataaatgctgcgataagggaaatagaggattctatgagcttatgactaaggatagatctgtttcctcagatgtggaactaagaagtggcagtagttgagaagttcattttgggccatgcgatttgaggtgtggctattcaagtataggaggtaggtggttacacattttttaagctattaaatagaactttcacttgaaaaggtttttttctctctttcctcagcatctatctccctacatacacaaaaaaattgcatgtcacaattcatgaactcagtgagtgactctattttgaaaaatgttagattatatcaactgaagtctgttagaggcaaatgcttttggtcatttttttcagcagggacatttcatatgtgtaaaatatttagaatccccatgtatttatatataaatgaatcttttaccatcttaaatgtttaataagttatatttttcctttctttcaacttaagtatacaaggttatcagcaaacatttgtagatgctctatgtgaggtgttttgtttattagttttaaggaagagaaaaaaggatggattggatcaggaagtcagttattgttttctgggttagtttgagtccaaatcctcaaatatgcggcgatttataagtagcaaactaggaatttaatccacttcagttttggataacttggataagacactttctgtctatagatctgtctatagataacttggataagacaagttatccaaaactgataaatctgaattagttaacagatgaggcaaattgagattgtaaatgctaaaagattattagaaaactttataaactaaatagttctatgccatgtctttttagtattttgcttgtactataattgtagtgaaaataggtcagtatctaatttttatagtcactagagctctccaactaaatttagcttagatgtttttctagcaattatatacttacaaagtttacttttaaaaattgtgtaatacatgcctttatagaaatttaagaaaacgacttatggattatgtacttcagatcacagcacaactagaagatgttgatacattacataaaaaatcaggaaacctatgaagaacatcaaaagtggcaaggtgtgttcacttgcactttgtgagattgaaactgctgccattatctgtgcaaactatggtttgagtacttttaatttagcaaagactaattattttttaaaaattttggggtaaaaaaaatggtctttagcgtagaagagctttacccgacttactttagttggttcaattggttgattttggtttgctttttgaaactttgtattgtcttaatttggggcacattgaactcaataacagttcagttgcattataattcatttgggtaaagtttattgttggaggagggtaagtaaatatttaactgaaaaagtgaagtaaatatttatttaaggctataagttgaaatatttgtcagctgagaaattttcaggtaacttttttaacctttgaaaaaaatttactatagcatgagtattttttatactgctatgtataatccatagtcacgttttttaacctttttatataaaatactgatacagaaaaccatacaatcatagtaatcttttaaaattgctttataattcacatagcgtaacattcacccatttaaagtttacagttcagtagtctttagtatattcagacttatgcaacgattaacacaatttaattttagaacattttcatcacctccaaaagataccctgtactcattagcagtcactccccattcaccagtctcccagcccttatcaaccattaatccattttctgtctatagatttgtctagtttaggtattttatataaatggaatacaggtaactttttattagtgatttttcacttacatgtgtcttgcatgtctcatgagatagctatgaataagttagccttcttttacaacttaaataacaattcttgtctgaccgggaaaaagtattaagttattgagagactgcatcccaatttaaaccaagaaccagactccttactagtattataactcaaaagaatgtgtaccattagcccttacctctggtggtgcttttcactgtgaattgttcagcagcctctcaacttcccgaaaataccacttaagtcttaaactcagacttgcatgagtttactgagatatgtttacctttgcagctggcttgcctagagtctaccttcttactaccctactaagtccagaatgaggaagaattaaaagcaagaaaggagatacagaagaagagattgctcaggctgaggaggggcaaagtgataagagcaggattagaaagagacattaaaaattcaaggatactgagtttgttggcatcagaataaatcttggaggctgttttaagagagaataaaacctagagggaaggaataaaaggcaaagatgttataaaacataggtaaaatatttaaaatattttgtcctgaattttgaattttaggcatatgtcagtgaagcacaaaggatagcccccttttttgatgagctttagtatccttaagatattttctttctagaaccttgtgtaggaattttacagctgaccataatcatgtgttctctttggtttgttccaacatctttggattggaaccagtacagagtaggaaacccatatcaccttgggattatttttcagataaatcttccagaggattaaatggcaccatccccgtcaggtccaagtaggaggggaagaatcctattttgggtgctgtcagattcagtgggctgtttagttcactttttatccagaaaatggagctaaatgagaaattgcagcttccaaagaaaatcataccttgattttatagatcaaagcctttctgattagatcagaattgttcctgagattttaggggcattcagttaaagtgccccaagaagagtgataaatcacatataggtgtaaagtcaataaagtcctatagtaagcagactggaatttagggggaggggaatacacactgttagactgttggtacctatatttgactactaggatgattatatattttaaattctgtattcagtttcttatcagaaatactgcctacaatatcttatacttaattttttaaggaacaggtgataaagataggttatattttcttcagaataattgatattcattatttaatagataaaatgtgttatctgaatgtttatagtagtagaaaccaagtttacaaaatgtctatatataatttgtttttaataaccaaggattctttctttacaaaagatttcctctatataaatcttcctgttttatagatgatctgtattataggagaaatgagtatttgttgatttaactggctaatctacaggactgagcattattagaggagtatttaaacatagaagtctgtgaaaatatttttagtgctgagggaaattggagggactttctagaaccgcaaactaatagaaaaccaggcatagtggctcaagcctgtaatcccagcattttgggaagccgaggcgggaggattgctgaagccctggagtttgagaccagccagggcaacacagtgataccttgtctctacaaaaaaatttttaaaattagctggacgtggtggcacatctatactcccagctacttgggaggctgagacgagaggatcacctgagcccaggagctccacgctatagtttgagttgtgatcgtgccattgcactatagcctgggtgacagagcaacaccctacctcaaacaaacaaacaacaaaaaaacccttctacctctgaacatgtggggatttaaagattgctatgatttaaatataaatcatgaatatagaaaatatgagaacagaagagtatttgttaaacaagactaagctgtgctgcataaagtaaggcactatcattgtgctggtattttctgattctcttaatgcaataaatgttaaactttactactaccttagccatgttgcagggaattgacatgaatagttcctgggttttggctgggtgcggtggctcacgcctgtaatcctagcactttgggaggcttaggtgggcagatcaggagttcaagaccagcccggccaacatggcgaaaccctatctctaataaaaaacttaaaaattagccgaacgtggtggtgcacgcctgtagtcccatctactcaggaggccgaggcaggagaattgcttgaacctgggaggtggaggttgcagtaagccaagatggcaccactgctcctagcctgggtgacagagggagactccgtctcaaaaaaaaaagttcctgggcttcaagggcactctaatgtgcacatcttaaattcttagagcctacttctatggacgatttatgttactgttgatggagaatttgattttcttttttatcttcccctttcccttggcctttgtaggttttttgaagtgaacatacttttatgtatttacttatttattgagcagttcccaaatggcaactttattattttatttcttcaactcagttgtctagtttacttcatttgtatctaatctatttaactcatcctttgagtttttaatatcaacattttaaattttatttttttagcttcaaaggtgtgcatatgcttgttacatggatatagcatgtataatggtggaggttgggcttctagtgtacccatcacccaaatactgaaggttggacccaataggtagtttttcaaccctcaccctctcccacccaattgtttttatttctgaaagtaatatttctttcttggtctgcctgataatttttttatagtttcttatttttcgttagttttcaaaaaataccttgttgggcattttgtccatagatgtactatcttatgtttgctaattccaatatcggaagtccttaggaagttgtacttaaggtagtttgtttctttctgtatttggtgattttttttatgagctaatatttgattaaaccgaatatttctccatcctctgtatagttgcctacaatgtaatttctacttttttttttttagcataaaagagtttcattttcctttttatactcaataacttgtttaattagccagtatttttaccagtttctttacttattgttccttgcatcttctctgagtccacttttcttcttgctgaagtacatcctttagtaatccttttagtaagaggctggcttgtaaatgtccttagtttttgtgtgaaagtatattttatgcattactttgtttttcagctagatagggaattcttggttgataggtttcctcccatcagcaacctcagtatattatttcattgtcttgtgaaacttggcaaacttggatctctgagaagttcgatctctgcctaattgttatgcttctgtatataattttttttttctggtagttttttaaaagatttcttttctttattctgtcaccactacttactgtgtgaccttgggcaagttcaaaatggatataaaattgtatctgtgtcatagggttgtaatgaggattaagttttaaagcacttagaacagagccttgcatattataactgtgacatgttaatatttgttttattttgccatacttgatattctaaacacatttctatgatatgcttaagtatgttgttttatccatagctcctctttgaaatacattgttgatgggaagattcatatctttctttgtttctagaaaattccttagccttcatatctttgaatattcattttccaatattccttcttagtctctgtattatgttctaggtggttcctcagtatcattttctaatttactaattcacactttgactttgtccagctagagtttatgtggcctcagttccagtgaattttttttaaatattcaggctgtctctctaatagccacctattctggtttgatttctgcctatttttaatttttcttcctttaatgactattgtggcttccttttaacatttgaaattattttcagattgtcattttttcttctagaatgaattacagttgttgattttattggctgtccatcttagtttagttttctttgtgtgttttgagtttgcttttgcagtctcctattgactggaagtttttgttgtgttttctttttcactcttcttatccagtgtttttacatgcacctacatctctgtctaaaaccacatctttatattggaggcttgattcccttgattcttggtaacatcaggatcaggcttctctttccaagaataagacacaaactaagatctatatttcttctcactggacacataatttcatctaaaccgtagccccatgcaatggttagtagtagctttttctggctcctttcattggttggaagagcctctccaccctaggtattggtttcaagcagtgagcctgagttctatcccagccatgcatgggtacctttttagtccctgttactatccctacaggatgtggacttttggccatctctgttacttgagcccagaaggctcacagttttagcttcaaaaactgctttgtatttaaagagttcagtggcttggtcttttttaatattttgtttgtatagttaataaatatttaacatacattaaaatgtttggaacagatacatttcaaaagtgaatatacaaatccatttggttggaagttagtccattttgtgttgctatcacagaatatcacagactgggtaatttattaataatagaagtttatatagctcttggttctgagggtggtaagtctaagattgaggggctgcgtctggtgagggccttcttgccagatggaaggcaggaatgcaagagagcacaagtgcaaacaagggcaagacggggccagactcgattttaccaggaactcactcctaagataagggcattactcaattcatgagggcagagccttcatcacccagttactttttatggactcattggttattactgtcacaatgacaattcaatttcaacatgagttttggaggtgacattcaaatcatagcagaagtcaatgtttaaaatcaatgtatatcctacatacccttcagaaagatactagttgactctcctacttatgagaggtatatttttttattcctttgccaatattgggtgtaataattttttaatctttgagaaggtaatgtataaaaaacaaatttgtgtttaatagctagcaggattggtcattgctccatatatttattacccatttatattcttttatttatttaattgcctgttcacattcattgcccatttcttttcctttaaggtgttcatttttattgtcttttaaaatagctgtttgtatattgtagtaatgttaacttttgtgtatatattgcagatgcttaaaagacgtttgcttttcaggttaatgagctttattttatagtgtaggagtttcttttctctggagtcactttttcttattcctttggaatcagtcttttcttgtcatccttagaaagtcctttcctaccataagattacagaaatatttgcatacatctactggtattgttttattattaatacttcagacttcaatctttaatctcttggtatttattttaaggtgtgatgttgaagggattcagctacccaccactggagggcaggagtggaaaagatcagctttcaggcacccattattgaatctctctgttcccagagagctctttctggattctcagttctattccactgataaatttattcctgcattagtattgcctcttaaatactataatttggaatcaagtttaaatatcaggtattgcagattctcatgattttaagaatgttttggctattcacatttattcatatatattttgaaatgatttaatcaaggtctgggaacaaaaaggtccagttgtgattatattgaatttatagattaaataaagggaggataaccatcttcacaattttgaatcttcctatccaagaaaaagaagtgtgtgttattctgaagccctcttcttaaaaaggttctatttcttgttatttatttagatatacttttatttctgttttaactttctaagtgattactgttaatcattttcatatatggttttctatagtcaaataatcttattgagtatttttttccctatcatttcaggttttgagtttgccatcatgtcattaactgcaaatagttgatctccttataattttatgcctctttttgttagccttggcttatctcaataaccattatttctacacattgctgagttacagggataagagttggtgtccttgttcttttttctttcctgggaattgttctagtactgagatttcctctttggcttgaagtaagtattatattaaggaataaattttatcaaatccctttcagaatatgatgagatgatcatatggattgtttttaacttttaaaaagatgacttacattagtcagctgcctaatgttggctcattgttacgttcctaaaatgatccctatttggtgatttgtaatatatattttactgactttttggcatctgtattaataagtatgtttggactatagttttatttttttagtgctgtctttgtcaaattttatagaaggattatgataggtttgtaaaaagaattggaaatttttttcctgtaatctatagataacttaggtaatttgagagttacatgtttccttagggcttgaaggatcttgttttgaaatagtcttgcctgatgcacttttatttttaatagcttattttgagaacaatccaaatttaaaatttgcaaaaataatacagtgaacttccatatttatttaaatggccaattgttaacatttttccacattagttttacagacttttttccctgtgtatgtgcatatatgtattcatattctcttggcatgcacacacacattttgttattttttagttttgctgaaccatttaagactcagtatggacatcatgaacctttactcttaaatatttaaatgtgtgtcccctaagaacaaggactatcactttctcttacataaccatagttcaattatcaaatttaggaaatttaacattcatacaatactattatctaatatacaatccatagtcagattttatcagttgtcccagtaatgtcctttataacaatcttcccctccccattccttcaccctttgccttcatccaagccagtccataatcacatattacagtttgttgtgacctccttggtctcctttaacctggagtggttctttagtctttttgcattttgtttttcatgagctctgaagttttttgagggatagttctttaataactttctcatattgttccaggtttctggtcttcactctagcactaattgaaaaaaaaaaaatttgttttccgagaactgttactttcctccatattttcaaatttattaacagagaattgtacagagtgatttattttacaacaataaaattctatttgtgaggtgagtatagcctgtttggcttctaattttaaataatttttttagttagactatttagtggcttacctattttatttttttcacatataacatgtactataattttacgtaatatattccttcagcttttattttattttgtatgtgtgtgtggttcatttttctttttaggttgaatatttagtatactgattttctttagtatactggtttttttaactaagtgtgaatttttttttttctattttcaacacactattgctggcttaaaggtgaggtttcttaataaggtttggtcacatctcagaatttgataggagatttttctcattattgtttctaaatattctataattgtagaaatatgtaaactcaatgcaaaaaactggtgtaggagcttactttttaagcaatttccacgtttgaggttttcttctttctttacacattatcaatatctactattaatgtataattcagatgtgtcatttcattatttcattttcttttttttttttttggtctgtggggtaggatgggggagtgtgttagaaatctataagcttttctttccaacatataatccaataattatttgatttttcaattaatgttttaagtgtgtttgaacagaatatatagtcttgaaattttggaccacatcttttaccaatttaaaacatggctcttattctgtttattgctttattccttgtgatttactttgtctgaaattgaaattgcaattcttggtatcttttttgcctagtgtatttcgaccacaacaaagtacttttatactgacatctttatttttgagtttcttggttttgattagtctcttgattgcatgaatctatctttaaatagtttattttttcagaaatgaaacatggataacactactttagtgctggcatatttgatcatgtcttcttcatgtcttcttattgcgtttacatataaatgacaaccttgctggtcgtagtattcttggaataaaacctctttatcctcaacgtttataggcattacttcgttgcctatcatctgatgttgcaaagaagtctgggaccagcctgatttcttttttctttttcttttttggcatgtttattttattttttttatttgagacagtcttgctctgtcacccaggctggagtgcaatggtgcgatctaggctcactgcagcctccgcctcctgggttcaagtgattctcctacctcaacctcccgagtagctgggattacaggcgtgcgttattatgcccggctaatttttatatttttagtagagatggggttttgtcatgttggccaggctgatctcaaactcctgacctcaggtgatcctcctgccttggcctcccaaagtgctgggattataggcgtgagccatcgtgcccagccgatggcatgtttattttgtctgaattgtattcttaaaatttgtaatcttcaaattatgcttcggtattggtcagtttctactaaatgtatctagtacttgataaacgccattcaatcaccaagttcagtctttagtttatgatttatttcttctgcctttgaaatttaatttttcttccattatttggttttcttatttacaatgtgctaattgagctgttggatctgcattgtttgtatcttttctcaagtctacttgtttttgtttctttatgcttacttgcatactggatgatttttgtcctgttcgtttttaccccttgcagattgtttgctgtagtgtcttcattcctcattattgcttttcatgacatttaaaatattgcaatgatattttttctctgaaatatctttttttaaaagctctgttgatactttttatattctggtttcttttcatccctgtttcacaaattaggttttttaaaattttcttatatgtaagttgtcacctagttttctaaggtaaatcttttagactgtgacatcatgttcttgagtacttttttagttacttttttatttcagaatttttgtatgggttctataaatttttttctgcttttttacttaaagggtggcagttttctctgttgtttgcccaaaaataactagctactccttgcctgttctgtcattatactaggataccattacctctttcccccttggaatttaacaggctgaattatattaaattattttagttatcatatttcattatttttgagagaaatgatagggattttgtcctattaacctgttacaggtaagaaactttgtctttcttgatttttctcttgatgcttgttgaaattactgattattttagttatcatatttcattatttttgagagaaatgatagggattttgtcctattaacctgttacaggtaagaaactttgtctttcttgatttgtctcttgatgcttgttgaaattactgcacattttcatctttacaagtttggcagattttctttcccaacagaagaacttgactattgggcattctgctaatttccatggctgctataacaaattatcacgaacttggtggcttaaaacaatacagatttattctcacagttctggaggccacaagttcaatatcattttcacggggacaaaatcacggtgtcaccaagaatgtgctcactcccgaggctttaaggaggaatctgtttcttgctttttttcaccttccagtggctgtcagcctcatcacttgcctggtagccacatcactccaatctttaagaccagcgtcttcaaatctgtgtctgctctgtcttcacatcaccttctctgtgtgtgtcagatcttcccctgactctctattctaaggacatgtgggttcacttagaggtctctggataatccaggatcctctctccatctcaagattcttaatcacatctgcaaagacctttttttccaaataaggtaacatttataggattaggactggtatctttgggagtcattattcagcctactaggtatcattttgttttgctactttagagtgaggcagacatattagtcaaaaattggattagagtaaagcctcatagattgtgctgtttgttagaatcacagatactgtcctctttaccgaatgatgcaaactctgatgccatggtggaaaagtatatgaattgaattggatgtggtcaataaggattgctagggactcgagaatgcatgttgttctagggagaggaaatacgtgaaggtcaaattcaggttatcaggttatcagtttgtaacctagtttgtagctgcttttttcttttcatttcttacaagctggtcttgctgtagtaaaataattttgtgtgtctcttataatcttgatattgagaataagaggttttttttttaatgggaattccatccacatgattttaaagtattactttactaatgatatttacctaggtattcctagaactttagtcttctcatgtaacattttatacatttctcagaacaaggtaattgacaaataatcaaggttgcttatttattgatgaggaaagttagacattaagccaaaggacttgtccagtatcgcatattggatagacctataatttttaactttaatcttgtggtgacaggtatttccatttttttttttttttgatgtttcatatgtgctttgatgttgatgtgtcatgtgacatgaagtgtctccctattgttggataattgggcaagtctaagttctttttactttatattcctgattttgtttttctagatgtgttatttttacagattcaggttacttctttttttaaatcatgttattagagttaaactaatgaaaaatcatatagagatgaacttggttttgaaatataatgagtagatacttgcttggctggaattttttctcacaagttttttataaagatggtatgagtgtatactttgtatccaggaatgtgtgtacactagggggagtgttggggggatgagggtggaagacattttaagacacacaggaggctggtgtggtggctcatgcctgtaatttcagcactttgagaggccaaggcaggggaatcacttgaggtcaggagtttgagaccagcgtagccaacatgatgaatccccatctctactaaaaataacaaaaaattaactgggcgtggtggcacatgcctgtaatcccaggtacttgggaggctgaggcacagaatcacttgaagccgggagccaagatcatgccgccacatcccagcctgggcgacagagtgagactctgtctcaaaaaaaaaaaaaaaaaaaaaaaaagacacagaagaccctaagtgtacactcagatgctctttatatccatatccattatcagtttggtgatacgttattctagtttcatgaacctttactcttagaacttggtttattctctaatatcttttggattcagttttgcagttgagatggctaatatcaatttgatactctttccttttatgattgctcatgtttttgtctagaaccttgcattatagtatttttttttcttttccttgcatttctatagttgtgaacaactaggagtgggtttttagcaattaattcagtgagcttgttaattttgaaaaggcttcaactgaggaacactttcttctcatttctttgatgatagcttctctgtttctccttcagaaagtcttgttttttatatgcatatttactttttgggtgcactctccttgttaatgagttatttgcatctgattttgagtttattcagcaaatatttattaatgatttactgtatactctgtgcttggggagttgacctagggaactcaaaggaggctcctttgaagaattgatgcttgagctgagatctcaggaatgagtaggaattatctaagacatgagagaacagctgttaaggtagggaaagtagcatttgtttatatatttggaggaaggaagtatgatgagtactaggtactgtaagaaaacccttgtggttggagtagagaatgtaggagaagggacagtatgaagtgagatgcggctagagaaggtacgtaggggcttgacttcccagggccttcatgtgagccatattaagcagttatttatccacctcctacccccagcagtggaaagccattgagaaacttttagtacagaagtgatatggtgaaatttgtattttgaaagagttacttaggctgcagtttggagaatgaattagagggatgccaggatccacgtgaagagactaaagacgctagtattctgcagtgagaatgatggtaacttgagaccagggcattggtagaaaaaagtggacagatttgagaatgcttaggaagcatataacccatgggatttgatgatggactgatgggagatgaggtagagagaggtatcaaagatatccttagtttctgtttctttttctgagttggggtcttgctatattgcctaggctggtcttgaactcctggattcaagcaatcttaccgccccagcctccaagcagttgggactacaagtatgcaacaccgcacccagtgaatgttcttggtttgtattcaccttggtgggtgatggtgccattcactggtaaaagctgcagatatgtgagggtgctcagggaggcagcatagaatgggaaaagggcctacatgtaacccttgaggaatgccaatgtttaatggcttgggagatgaaaatgagcctgcagaggagacgacggaaaagcttaggggtaggaagaaagctgggagtgtgtgtgtagcatcttgaaaggccaatgggaagagtgtttctggagggagtgttatagttgaatgcttctgtgagcagtcaattagaggagggctaaaaatgtcccttagattaagtgacttggaggaacttgatttagtaaaatggccagacagccttttggagcatcaacattttttttaagaagtttaactgtaaagagaagagaggcacatgggtagctcgaggggaataagtcacatgaaaagttatttttaatgggtaacatgggtgacacttgtggctttaaaagtcacactccaactgagaaatgttgataaaaaggagaaaaaggaaaatagtgtaacattcctgaaaaaactgtcatttaagactcctttgaaacatgggcaccaaagctagtctagtagaggatttattatcagtgagaggacagagtcctattacagcagaaaagtaggaggagagggttatgaaagaattcattgaaatggttcactcatggccgggcgcggtggctcacgcttgtaatcccagcactttgggaggccgaggcgggcggatcacgaggtcaggagatcgagaccatctggctaacacggtgaaaccccgtctctactaaaaatacaaaaaaattagccgggcgtgatggcgggcgcctgtagtcccagctactcgggaggctgaggcaggagaatggcgtgaacccgggaggcggagcttgcagtgagccgagattgcgccactgcactccagcctgggccacagagcgagactccgtctcaaaaaaaaaaaaaaaaaaaggaaaaaaaggaaatggttcactcatttattgatcttttttttctgtagtatccaatctgccattcattgtctctattgcaattttcagttcagtaaattgcttctcatttccatgaaactattttcagagtacctcttttttaattgacagtctgcaattgttttattcattcaatgtcatttcatatcttggttagtttctaattttgagctaatgaatactgagtctccctctttttaacttctgaattaaaaaaaaagtcatcttatttttctctgttcatttttacactttatttagcctaagtatctgaaattggctttgctagaaattacaattagttcactgttgttttctttcagtcccagacaaaaaagaaaaattttagatttctttcttttctcttcttcctttttttttttttttaaggtcatttatctttggcagttttggagatttagaaaagaaaatatatagacttgtaggcagaagaagatatggcactgagggaagttttagttttgttctgtgacagtcttccttatcttgtatgttgtctttaaaaagcctacacatttagattttcattacctcatttgcaaggatacaggatagcacatgtaggagaattggagtgtaagtccagaaacctaagtcttattcttagccttactgatgaaccagctttgtaaccttgggcaagttattctgtttctctgcaccttctcatttgtaaaataggtttacacaaatcatttctgcattttggctctgattcattatgcaagttatcaaaatcaaatttgtaactataaatgagtaatattttattatttttatttttttagagacagagtcttactctattgcccaggctggagtgcagtggcaccattataggtcactgcagcttcaaattcgtgggcccaagcagtcctccttcctcagcctcctgagtagctaggactacaggcatgcaccactatgccccgctaatcatttttacagagtcacgctattttgcccaggctggtcttgaactgccctcaagtggtcctcccacctcagtctcccaaagcactgggattacaggcatgtgccaccatgtgtggctctaatcatttttaaagcaacaatcagtgggaaatttcagctccaaatgggagaaaaatttccaaagattagccttttttttttttttttttttacagatttgctacagttttgttaatgtgcttatttctcattaccatagataactttgagatggctgccttggattacaaactagaatttattactatttcacatagcttgggaaattaagtgtagtttgtgtagcctaaattatcctttatagagatgtagctgcaagggttagcatttcttctttgaaccccaggtatgcagtatattgcttaatactctattgttccataaatatgcattccagaagtcagctgaccatttgtccttatctttgaggacaaagcccatacatatgtaagcattagtgagcaatgtagaatataaagatttggtagcagtagagagtttacgctctacatcccactgcaagtaatttgaatattgccatattatccactgtgacctgtgctgtttgttaacgttccttttccccaccttccccgaggagcttgtagtctctcactatatatttttttctctttggatttcccttcagcctttagatttcttatctctaatgcaagtctactctagatttttctcccaaatgtttaaaaccaaacctattatctcagtggtcatcaaaggtcctctagttaccagtatccacccttcttggaatgcctgtttagcagtgttcttttgttatatgagtaagaataactctggtatttgctaagagaatataattttctccacattgtatgtatctatgtcctttgtttataaagcctggggggcgttccctattaggttaagtgtccctaggtaaatagaaaaatatgtagggttttattactcaactttttaaggtttctgctcaaattgtcagttgaataactcttgttactttggggctaacatgttgcatagggattttaacaataaaatatatagagcattttaaaaattattcactataattctgagtggattaaaccaaatgaccgggttcaagactctactatgagttcacctttgcttaataaaaggcaagactgaacattaattaatgacttcttggcccagccttagaatttttcagtttagggattagtttggtttttaaaaggtacaaaatgttcatgaaattttctgattatatcaaatattaattcagtcttgttttttgtcatagtactttgttttgaaaagttcagatcaactgataatactagtgctgtgatgagactcagcttgtactcaagaacagatttatgactaggtgagaactaaaatttctctcagaaactaactaaaaactttcatggacaaattgaatccccttgggatttactatttatggatatacgccaatttaattattggactaaataaaatactctttattagtccacttatggaagatgactgtgtaaacatagtatttgcaagtaagtactttttggtattatatttatataatcagctcttgtatccatgtagcttatagttggctgcttcaccaggactctacaaattgctcagaacccaaggaggtaagatttttatattgcctgttttcagtatgtaaaagtccagccacaaaactattacccttgactatatttttacagttgctgtggagctgaacctaaaattttgttagatggttacttggtttgttacatttttatatactaatttatatactataataatatactgtatatattttttaaagtctggggtttgtttttagaaagtatattctatcttcaaagaattatttggtagtttcatgtgtgtatctggaaaataactactgtacttctttataaaagtgagagtgaggtccctgctagttgaggctggaatctagacgtggctgtttatgtaggagttagtaattaaacagtgcctgtttgctgactgcctcatttttgccaggctctgtatgggtgccttgcaaggcattgcctcatttaaaccttgcagcagcattcagaggaaagtattaatatgcccactgtacagatgaggaagttgaggaatgctttattagtaggtgtgaagtgtcttaagcataatacctccctcctcagccttgctccctcatcctagttaagggaattgagacacagagataaggcaatttgctattgaccttcagcagatgacttaacctcaccgtggcttagtttcttcatgagtaaaacagggtacctatcttttaggattggtgtgaagattaaagaagttaatacatatacaaaactttagaacagtgcttggctagtagtaatctctccataaatgttagatgttattattaagcctgtgactacctgttatctcatgtagttgttcagagataaaaatgtaggctataggaaagaataaggaggaaagccaggctcctaatctgtctaagatagaagtgaatcttagttaagttttaagataatcctatgtgcttttaaaagatttcatggtttgcggtttgcttttctttggctcccagtttctttttttttttttttgacttcttagtacaggtaacttttgaaggaattcagcttaccttagatgaaccaaaggaaagctaaaagccgagataatttagaaaaactaaagcagagattatgttcctaaattccctctttctgcttcaaagtccaggaaacaccacctgcagatacagttgtatcccattgttagaccctttcctgaagccatcctcttttctttgtcttcccagagagaaactagtcattcgacaaagattgaacttcttctgtgtgttaggctgtgctccaagtgctgggaagacaccagtgaataaaacaaaaagtccctgctctcatggagtttacagccactattctaaagtttgtctgtattctgcctgtccttgtttttatacttttagcaaatatgtgtatagaattgttttgcagccttgttcagcatattgtcttcttttgttttttaggaatatctgtttatgtaattagatctgtttttgataaattgtattctgttatttatccttcctaccttctaatgagcagttaggttatttccaacattgactattatggttctccaaaaagatcattgaatatgtcaccttggatggatggatgggagagtttcttcaagacagcatgtttcagactttttgttgtgaccacagtaagaattatgtgcacctcagcttagtaaatacaaatatacacttgggacaaaaacttcaagaaacagtatttacttacttttatcacctgggatgcactctattttgttctgttttgttttcttgagacgttgtttcgctcttgctgcccgggctagagtgcaatggcatgatcttggctcactgcaacctccacctcccaggttcaaacaattctcctgcctcagcctcctgagtagttgggattacaggcgccagccaccacacccggctaattttttgtattaatagagacagggtttcaccatgttggccagtctggtctcgaactcctgacctcaattaatccacccacctcagcctcccaaagtgctgagattacaggcgtgagccactgcgctcggcctattttatctttttcaaatgcagtttacacacaacccagctgattgggttgtgtgtaacccatactgattaaactgatttatcacccgtgttcattatttttaaaacgttgttttgagatctataattagaagtggaattgctgagtagttgcttaagtgtatcttcaacttcttcaactagctgttgccagttgcaattcagagtggttgaaccaatttaaactcctatcggcactctaggggagttcctgtttctccacattctgaccaactcttgatattgccagatggatgagaaatggcatttgttttaaatgtgccttcccctatttactaatgaagtgtttaaagtgtcttttaaaatatatcacatagaagtttaatttaatggtaatcagagctggcggcaaggaggaaatattattgtgattgactgcctcctctggcagaaaaaatggtgtaaaaattatataataatatctatattatattgagtatttataatttgctagacactatactttgtgcactgtatacattattttatttaatcgtcataagaatcttgtaaggttagtgccttcttatatacttttttttttgagacggagtctcgctctgtcgcccaggctggagtgcagtgatgtgatctcagcttggctcagtgcaacctctgcctccaggttcaagccattcttctgcctcagcctcccaagtagccgggattacgggcatgcgccaccatgcctggctaatttttgtatttttagtagagacggggtttcaccatattggccaggctggtctagaactcctgacctcatgatccacccacctcggcctcctaaagtgctgggattacaggcgtgagccaccacacctggctgccttcttatatgcttatacaggaacagatggagaaagagattcggaaaggttcagtagtcacactattactaagtagtagagccagaatttaaacccacattggtctaatttcataacttattttctttagtacttcatgctattggtgaattcgtagaggaaggaagtttgtcattactattcttttctgttggtttgtctcttaaatgtgtttaattttttgagtttcactcacgtctctttttttctttccttttctcaaggtagtggagtctttcctctgtaaaacttcaccttgttgtttctagtctaggatagtggtcttgtaacctaggatagtggtcttggttactgcaattttggttgattatttcttgttggcccttaatgtgcccccatcttctgccttaggcattccatctaatcttttccagcagtttgcaaccttactgtgcctcagaatcacatatgaaaatttaaaaatcatagatacctaggttccaaccctaccctggaaattctgatttggaaatatttatttttcaaaaagtccacagataattctgttgcacagccatggtagagacccattttcttaggggttaatgatgctttagagtcacgcagacttgaatcagagccctgattcctttaaacttattagttgagtgatcttggccaagttctttaatcttggctaaggttcttcatctataaattggagataatattattatctaccttagagagttgttgaagagattaaatgaagtaatgcttgtaaaacacttaccagagggacttagaatacttcttaaacattgcctgctaataaggtgtcattattacgttatcctttatccaatcaaaatactcacctttgcagtgtgtatcaacttgatgtcagaaaaataatctgataaatatcaccataagggatggatgatagctagttttcattacttacctttcgttagttgaactgtactaggaggcagaggagtaggcagatggttttatcacgccaatcagccagtcttttctgcctatgtatcagtttggacctataaggaaaatgaaggggaaaacaaatgtttttctttccttcctaggaggattttcttcttgccctttttctcccagtttcctctctgagctgagtatcattagcatcatcaataccctagtttcagagctgcgtagtgatttacctagatacttttctccaccattattccctactacctaactcctcttcacctccattaaatctctgttcatcatgctatccttcttttggattgcctttagttcagttgtgacttacttgattacttgaacccaggtgtctacatttctaagctattgttcaagtaagggccaaggtaaattctaaccagctgtctctttgccttgtgtgggcccattctagaccagcgggtgttaacttttgagtattggaaaaggattagattagctgagccttcaggcttgtcagcagggctgtcactagaccctttgatcttctttatatacctaatggtcatagagtataataataatggtacatgttattactatatgattaatagattactagtagtaattttgttatatatgtatacagtacacttcgttatgtatatatataattgcttgcaacttgaaatttgaggctacaacatttacagtaatttaataacttaactgactttatcaaaaactgaaaaacctcatggaaaaggtagaatgtaaggtagacttaaaaggataggtatacttttttctataaataggatgaggcaagagtttccagttaaggaaactgacatgagcaaaggcttgaaggagcatgcaaatttggagcattgtgagtagattattttttagtttttcagagttcatgcagtgggaataaaactagggagtttggaatcaagcttgaaaattcctgaatgttcaaccaagatatatttgagttagtagattttttgggtatgtcatgaattcgtttggcttttcttaattgatatacatacaacttagtcctgagcttacacatgttcattgtatcattaaacatttagcctggttggtttaagttgatggccactgccaggtctcctttctgccttctcccctttatcccaatgctttagtttttttctgcctttttgtctgttgtgatctgtgcttcatcaggctttcccccagttcctccttgttaatctccagattccaagtcagcaacacaatgaatgtctgcttatcgcgagttgtgaattcccgcatatctctttcacttattaaaaagattgtttggtacatattttgtttataagacagttattgactttcctgtttctcttcctttgcagacctagaggatcaagacataatgggagcatttttagacaagccaaagatggaaaagcataatgcccaggggcagggtaatgggttgcgatatgggctaagcagcatgcaaggctggcgtgttgaaatggaggatgcacatacggctgtgatcggtttgccaagtggacttgaatcgtggtcattctttgctgtgtatgatgggcatgctggttctcaggttgccaaatactgctgtgagcatttgttagatcacatcaccaataaccaggattttaaagggtctgcaggagcaccttctgtggaaaatgtaaagaatggaatcagaacaggttttctggagattgatgaacacatgagagttatgtcagagaagaaacatggtgcagatagaagtgggtcaacagctgtaggtgtcttaatttctccccaacatacttatttcattaactgtggagactcaagaggtttactttgtaggaacaggaaagttcatttcttcacacaagatcacaaaccaagtaatccgctggagaaagaacgaattcagaatgcaggtggctctgtaatgattcagcgtgtgaatggctctctggctgtatcgagggcccttggggattttgattacaaatgtgtccatggaaaaggtcctactgagcagcttgtctcaccagagcctgaagtccatgatattgaaagatctgaagaagatgatcagttcattatccttgcatgtgatggtatctgggatgttatgggaaatgaagagctctgtgattttgtaagatccagacttgaagtcactgatgaccttgagaaagtttgcaatgaagtagtcgacacctgtttgtataaggtagctagactttttttaaaaacataaaatgattttatgccatattaatcactactctagtatttaatcatcttagaatctgtaattctgaaaccagtttttggcacaactgtaggatactgttcaccaattatgaaaatatatcataggaccactatgtagaaataaattacccaattaccatctctgcaagagttataagctgaatgtttagtcttactacttgagctttgtaataatgtggaagattatcaaaggtaaaaagattttatcagagtgcatgttttgaaagaaagagggtggggagggttaggcctcagtgtctataaatgaaaagcattttagagttttaatatttgaccatgtgatatctcagtacatttatgatatcctaatcctttgaaactaaggtttaatggtctgtagcacttgaaagaggaatgtagtgatcattagacgtgatgtaatagaaatagccttgtacatggagtcagaagaacttgctctgagactgtgtatggttttaggtaagctatttaaactctaatcagtttttttcatcataaaaaggataagacattattatcttgtctcatggcgttgtcaggaggatcaaatgggataatatacacaggtgagctagctcagcccctttattttacagatgaggaagctgaagccagagaaggttctacaaacttaagagtcagacagacctgagaccaaggcttacctctattagttttgtactctacattcctgaacgaattgttcaacctctctcagctttaaaatggagataatagtatcttataagactgttgccgggcgcggtggctcacgcctgtaatcccagcactttgggaggccgaggtgggcggatcacgaggtcaggagatcgagaccatcctggctaacacagtgaaaccccgtctctactaaaaaacacaaaaaattagccgggtgtggtggcgggcgcctgtagtcccagctacgcgggaggctgaggcaggagaatggcgtgaacccgggaggcggagcttgcagtgagccgagatcgcgccactgcactccagcctgggcgacagagcgagactccgtctcaaaaaaaaaaaaaaagactgttgaggaattaatgagcgtatgtatatatatatatatgtgtgtgtgtatatatatatatacatatatatatatataatgcctagtttagcatataatacatgctacaccctttcctacagatattataaatgacgtgtacagggttttatacattgctaacagcattaagactagaaaatcaaggcccttgacttgggttcagtgttctttctgccacactctgttctgttttgtcaataatgcttattaacttattctttgatttttttttaaacaaatgttgactttttaaaattcttctgagggtatatatttgatactcaaatatttaattatagcatttgaatacttagatgtctttaaaaatgaatgtagttcctaaaagttgtcagtttttaaaattaatacaagttaaaagctggtttataaaccttaggtagttttacctcttatttcatatttctacttatgaagcgaatgtattagccccacaatttataatttattttaaatgtaattttatcaggtacatataactacaggtcaaatcctattgtaaacaatgccactaaaattttctgtcatgttgtatggaaggagtgtgtgtacacatgtatatttgtattaggtatcacttcaaattaagtcaccagtaaatgtttagaaatagtattgttttatagaattataaaaaattattattacagtgagattaacctgtaatgtttctctcctgtcttttggagtattggttatactgtattctctctatactgttcgggggagggggagtcattgcacacacacacgcacgcatgcgtgcgtgcacatatgtatttttttctccctgaaagtaacattttcactagaacaagtataactgtaattggcacagctgtaaaggttctcaaggctttgaagagcaaaaagaaaactaaaatattctcaaatttttttcttcccagggaagtcgagacaacatgagtgtgattttgatctgttttccaaatgcacccaaagtatcgccagaagcagtgaagaaggaggcagagttggacaagtacctggaatgcagagtagaaggtggatcatttaacaaaaaataagtagctttattaaagaaaaatcttcaacacaatcaaactttaacattttagcttttagatttttatgtgtctttgacagctagtgtctagtgtatgaaagtggaaaaggacatttctgtagtagctgttaagatgtatgcagttgtcctatcacagttatattagaaataacaactagtgtggaaagtaacccacattctgttcaggatacttttgttttaaaaggctaaaatgtttgtgtgctttaaaattcttaatgaattcactggcatgagtaattttatgccgggaaaatctgatttgtggtctatttaattacaaagagattgtgatggtgataatttgaataccatctttctatgaaaagctgtgtatattaattttaatctctagggccttttttcaataacttgaaaatcacagcctcatcattagcaactttatatacacagctttaaaaaatttgctttaaactgtttcagagcttcttccctaagccataaactgtctcacctaaacaagatagacctcaataaaagacataatatttctccacctggcagaaaagtaactgccaagtaagattaagaaataagttgagcatttctggagtatatttctcataattctgcagagacttccagtttattgcatatatgcagtaaagtgtatatattatgcagtttctctaagtggaaaaacttgacatgactttaatagtgttaaaacatgaaaatgctggtgagctgaggtagaaaaaaaacaagaaaaaaattttaaaaatagcgttaaaatgcattttaggctcctaatgtcgttaatttgcacgttaaagacctctaatcgcatgcaagcattgacctaccacacctacatcccactgtgcctgcattattgaaattactactcactttaattttttttcccctttttactgtttgataccaatcataatcagtctgatactagaatcatgattggttttgttctttagtactgtctagagctactattttgtttttattgctgtccgccacttgatagtcatacatctagtatgtgtttgtactatttagtattgcattcattggacgtactattcaacgaatttgtctccttactgttaccaagggtcttggaatttttatattttaaattaatcattcaatataagttatttataggtatagtacaattttaaaatatttagaatgctacaatcattggttcaaactattgattcatgggaaaatttaaattcataagaataatatgtatagggataagttgatatttaatgtattggcactttaacttgggcagacatgttttcttattggtttaaagaagtaataagtattttaatatttttactatgaaatgggatccaattttagaaatgaattgctacttttctctttagtgtgtacactttaagttttagatggaattatgaaatattcactttacgttattttgttacaataataagttttatatttcttattatcaagcaagagttgccacctggacagagtttacattgatactcaatatttttgatatgttaaagtgttattatacttgtaccattcaattggagattgtcataaattaaatatggtattttttactcagatttgatgagactgcaactagagaataaatattacattaaaattgctgctattttaaaacatagaatgtaactgtttgtattgtaaaagttgtgtgtcctcagtgaaaaatactgccttcagcttccaaagcaggcacctgaatgcctttttcttttctctctctcttctttctttaaatacatgccttcactagattgctgtgacctactaaacctcattttatttgcttggaacatttttggcttctctgtccacaccatagaaaaggacaaaggccttccagctctccttttctcttatttgttcccttctaaatacttgactctctgggggtgtgaaaagattcagctcataatttatactactattaattttgtggtccttctaagccaatttaaaattatacttttgtgtatatattttcaaaatctttgctactgactaccttagctttaaagttgctaatttggagatgactgatagaatccctgaaacttggtggaggggagtggaaaggagcagaatgtgtttgtgtatatgtatgtgaaacatggatcttctatatataaatattctttagaaaaagcgttcagtctttttacaattctaagtaaaacgtataggtcaacagaaattaaaggaatatttcttaaaattcatttatttttcttttttgaaagcagacagaagcaaggctagtatagtatgaatggtcaggtagtttaaatgcgttgtcccacgtggaacaggagatattaactgtttttaaagctttacattatttttttacaagaatttgttttcctgtaattttcttcacagttaaaatatcctaatttatattttaacaaaagagatgtaagatacatcaaatatagatgattcaaggtaatgttttttagacctgaaactattgattcaatttatcatcagtgtttatttctattgtatctagttatctatccaaataattgtattggcttagcggagactgtatgttaagtgtattagttttagattgtgaaattgtgcagtttaggtaaacatcaaatccctttatttttgtacagcagatttccagcattagaaccatgtagaacaaatatactagatgttaaagattacacaataaaggaacttggcaaaccaaatctgagatccttgctttttgttcagatttaagactgtttttttttttaaggcaaaaaataatagatggtaaaaatttggcctttattctaaaaggacagtttgaaccatttaaagaaatattatgggtagccatgtctttaaaaattttgaggcctgatcaaaggacgaatctttatacacattgttattttcaaaggtatttacaaattgagaagcagaatgatgatttcttgccccactaatgacaaataaaataccatttcttaccataaacattgaaaaacaaactgaacaaaacttgaccatataacttacaaatacttttgacttgaatttgcatgtggagtatgtgtgctaaaactgcaagtgaagactttttatacttagaggaatagttgtagagttctttgtaaggttctttgttcataattttttatattttgtgatgtgaataatagtatgcatctgcatgacaacactgcagatcatattgctgtgcccttttaataactggatattttaaaattattttaaatgcagttgtatggtttatcaaatggttctctttttaaacattttataaggaaatttagaccttttctattcaaggctttgttgaagtaatcagtgaaggaaatggtattatatatctatacagtatattgtttaaaggtactttagagaagaattaaactgagacagtgatgttcaagtacataatctgtgcatgctatttaagtatcattttgcaaatataaatatatacataaaaataattgagttagtatataatctataaattcccctataattaagggttgttattttcaaatcttgaaattgtttattttttaaaattccacgcagtgtattatatagggcaaagttcaggaaacatgtttccagtctaaagagaggagtgatgtaagaagaaactagttgacatcttaagaaagggtattctcacttgtgcacacatatccttgattatataatatgctgatttaacatgaaatattttttcacattttaattttgatttgaagttaatcttatatgtcattttgtgcattttttgtcataaatcttcaaaggtcaacctgattttttttttttttaaatgataccagattagaaaaatctcagatgtggtaaatgccatctttaaaaagctaggttatctttgtttcggttttcttttcaattaaatttggataacacttacaaaaaaagtacttctgattcccagaaatcataaagaagcagggggaaggcgtccccgacttagtccatgtgatgcgcacattagcgagtgagaacatccccagcctcccaccagggggtgaattggcaagcaagtaagttacattctgtacactcttatgctttatgtcagtgtatgaaaatgttaggtattcattgataaaatgtttgtttgcctaatttctgaactgatgcagttatctgtgttttaacctgtgatttcaatttttttttagtattagaatatctagagtttgtttagacataggtatcagtatcattgtaactaattgcagtgagggttgtctttattggaagcttggttggcattgatttcctcatagagcataaacgagataatatactgaaagaactttttaaactaaattacatagcactacataaaaatttacaaaattctaagtgtcgttgttagtagtagtataatttgatttggtcaatccctgagtaacttaacaccctgaaaattccccttcctcatatggaccatgtttctatgcctgattttcccagtatttttggttgttgattgctggttagttggttttaggtgtcagggaagaagatagaatatatttcttgtcttttccctttccactttagttcatagaattggactactttgtgttaaatattaagcttacacctttacataataaagtggaaaattcaagcaattccaagggttaaaacatttttacctcaaatatccatataattgacttacaaacataaaacttgcaaatacctttagcttgaatttggatatagagtaaatgtgctaaaactacaagtgaagacttcttgtacttacagtgaagatatattattgactaattttctcgattctctactgtgttttgcaagtgtgaccatgttctttgtaatcactaaatagtgattgtaaaagctcctgtttgaagcttttattttttggaaactttttttttccatatgactttctatgaaacgatctataaaattgcttcaagtcaattttggaagtagggagactataacttataaatatactacagatttttaataaagtgttactcaaaactaattcctagacttgtcatggaaatgtcttatttgacatttcagttttaatagaacttttgaaaagggcattaagaaaagtagaagcttaaatataaagtataatctgagacttcaaaactacgatgcaactcaactagcttatgttagtattatatcttaagaatggcattgccattgatgactcataaccatttaaaccaattcaaatggaagtagactatatagactttttttttaatctgtaatttttagccttctattaactgggttggtagagtgttataacacattttagagtagactcacctctgctttaacataggagcccaaatatcttaaaagtgaggctcactattgacagcaagaaatagaactaaaataatatctgagtataagattatcttagaaattttaataaacacctggctatgagttactaagcaatgttttgctttctgaagaattaattttctgcatttttttacacttaggaggaatgttattgaagccgtttacaatagactgaatccttacaaaaatgacgacactgtaagtagcattttagctccctctgctttcccttcccctccactctaaatgcatatccttcctacctgtttttgcagagctgttcactgtacccattctcttacacacacccctgattgattgctctgaactctgcttgctctgatctctgcctgcaccacagttctagtgattgaggacataatcatggtgagtggccacctctctcaaaaaagaagaaagtccttttgaattattctagattttttaagtctttacaaacaatcaacttcagaaggtttgcctccactacatggttttttttttttttttttcccgaagttgggactatctctactcagaatattgtcttattctgagttttgtaagcagctgcagcagaacttcggaatgtctgtctcaactaaatagttcttatggttggaaatacctttgtcaggaatcctgaagtatatacttcacttaaatattagagaattgtttgcataaatagacattagaatgccatactctccagttaagtgttctgttgcaattctgttgtatgatgtttatagaaaagtgataacttaaagatcatgtgggcacagctctgaaatattttatgtattgcattatgaagcttcctcacatattgagttcttaatcttttctgatgcattaaaggtttataaaagtggtattctaaaactgtattggatttcattaaaaaattctttttagtagatttattgattgagtaatacatttggacagcctcatcataaaaccgcatttcaaatattttccaaaacaaaacaaaggattaacaattctttgaacagattaaacattgctatttcatatgtacacatatatacttatatactttaaaaaacatttatattctaaaagtcatctttacagaacattatctttctccattatccagaaagtatggtgtattttggcaccgctaaattttaacgttgttccttattttgcttccttttacaaaggactctacatcaacagatgatatgtggtaaaactgctcatctagccatggagtttaccttcacctccaaaggagagtacagctcaactttgttgaaacttttaacatccatcctcaactttaaggaaggggatatgacatgggtgagaatgattacatcagagaacttcagcagtacaacagctagcccagaactgatttttttttttttttttgtaaatttgagacttatgtaagcgtgatttcaaaccataattcgtgttgtaaatcagactccagcaatttttgttgtatgattttgtttttttgtaaagtgtaattgtccttgtacaaaatgctcatatttaattatgaactgctttaaatcactatcaaagttacaagaaatgtttggcttattgtgtgatgcaacagatatatagccctttcaagtcatgttgtgtttggacttggggttggaacagggagagcagcagccatgtcagctacacgctcaaatgtgcagatgattatggaaaataacctcaaaatcttacaaagctgaacatccaaggagttattgaaaactatcttaaatgttcttggtaggggagttggcattgttgataaagccagtcccttcatttaactgtctttcaggatgttccttcgttgtttccatgagtattgcaggtaataatacagtgtattcataagaatctcaatcttggggctaaatgccttgtttctttgcacctcttttcaagtccttacatttaattactaattgataagcagcagcttcctacatatagtaggaaactgccacatttttgctatcatgattggctgggcctgctgctgttcctagtaagatattctgaattccattttatcaataaagcttgatttaacaaacaagaaacttaatcatgtatgtgtaattcctcttttaccctggccttttaaaacactgtgccgttgtaatgagacgtttctcatagggaaagatgttagtctcttttaattggacaacactgtcactcaaggcatagatgaaactttccttccattagaaagactaaaagatttaattcttggttgtaccttaatctattttttaaataggtttctttcaggctgcttatttttcattaagatgtgtatcagcttggatttgcctactgtttaattaaaatatttattgtcaaagtttgacaatctaacactctatggtaggggtgtgtgtgtgtgtgtttgtgagtgtgtgtttgcctgtgatttttaattggcccatgtctttagaatccaagtggttaagatgtatttgtgatttgaaatatagcatgttgataatatttagctgttggcctttacaaataactttcaaagcttaaggaattgtagatataaaaataacctaatttaatttaggcttaaattcctctgattaagcatgtgaaagtaagttttaaaatctgtcgcattgaaaagattactgttccgtgcccttctgtatttttgtctctttaggttgaatattgtatttatcaccatgtaatcattcagtaggcagattcccactagaaaactgttgaaatgtaagactaaaatacaacattgaatacaaaatcaaaattttgtgtataaaaaccagtatagtccattttgttatatttgttttttccctaacttggaaatatacatatttgtatatatagccttaaaattaatgtaaagttaggggagtagtggggaaagtaatgtgaaatgtctcagatttaagtagttaaataccagcaaaatcttttcattatccctcttattttgtgaggtgattaaatgtaacttaattgtatttaatttatatcttattccagcatgaatgaggaaaaactgaagtactatttatatttagaaattcatatcagttgaaattacagaaccaattccatacttacaataaatacttaatgtctaaatctgtggtagagtgcgaagtatgataatgttctaagttatggctttgcaagcatctaaatgtgcatttaatgaataccagtgcttctagtatagactaattaccagacatactggtactgaaagctaaatccctattataacaaaccagttccttaatattttaagtagactgacaactttagttccagaaattgcaaaactttgaactggactgtgtaatcttttgagatgcaaaacttaagtcacaagtagagtatgtgatggaaagctgtatttcaaaccataacagcatatttagagccttttttttttgagtctttaaacaagagaaaattaaaatattcctgtcaaaattattagtattgaaattaggcttggacacgagagagaaccgtatttgagtgatgtgagaagactaaatcttttccacatgagtcagcactgccatactaataatttttttactataaaaatacaggaaggaagtatacattataacagcagactgtgtgtgttcctgattcctggaggtaatagtggggggaaaccaaccatactttttaaaggcacttttgcacctctattgtgcacttcattcttgtaccacttaaattcttcacccccatcccctttttttgtgctaattagcatctcagggcaatgcctcaaaaatgtttgatgtgttctgttctttggagggaaaaagttcttatgtgatgataatatagtactcaaaatatacttttatcatttaaatgtcttatttgctgctatgaataggaaataacattttgtatagcaggctctgttttaccctaacattaaaaaatttcactgatctttctttcattaacagggtagaatctcctaatttccactttcttgggaatatacttttatagacaatagaagcagttctcaatattagcatatactttaaaaaatcaaagtgataacttaattcagctttggaagtatctcaaacatatttttactttatagtgcattaacttgcttctagagtacttaatgcaactgctctagccacttaattttttatactaatctcaacattaagaaatttggattaagtaataaattagttatgtaattcaagtaatctgaattacagcagtacttttagtgatcattcataggactatatattaacccagctaataactcagtttttttacaaaatgtttcgagtattattggtaaaacactgttctaggctaagcacattgggactgtaaagaaatgagtagatccttggcttcaagtttacatctggacaatttataatctagtgtatgttagtattataactggatcactcatcaaaaaatatatatatatatctattgcccacctgctatctaccaggtacttagctgatcaaggcaggcccctgccctaaagaccttgtttatacttcctttactcacctgaaaactgttctccagtttattttcttctctctaaagttaaagagtaattcagaagaaaattttgcttagcataagaataaaattggactgaagaggcttaagcccattcagtatccttgattgcatttatccaacggcctttattcttcctgctgacagcagtaactcagaggaataggtagtagatttctgaaaattatccagccatggaaatgtaggtggggtttgagtttaaggcatttaaaaatgtaaatatctctagctaaatttatcttaagtagaactctgtgtttttgtaacacactgccagtgttaatatcaaattttagccaaattattactatgtgttttaatattttaaaataatttcactgcccatctttactggacaaactcatttggagttcaacttgtgatttctgaaagaactgatgaaattgggtactgctttttttctccatttttcgttttgttttaattttgaatttcatggtatatacttttagttcaaactcagctgtttgtacagtattgtattaggatttggtattagaaaagatgtgtaaatatcttagtatataattgtttctcatttgaggtttttcttctaagggaccttaaagagttttatatacttttgctcacagaaactgctggtgagattaccattttttgagtatctagtcttctagtttttcttttaggcattaggaagccttctttagagttcaaaattttagaagcctaatttgctcttacttccttcaattatgtgccatgtgttttggtttgtatatgttttaaattgtatatttccttggaatatgcttgaaatatttaagaatacattttcaaaatgtataatactgtattgttttgttgatcagaataataagtctcagttaaatgtttgttattactgatagtcaaaatgctcaatagaaatgatgagaggcattggttccaattcattgtcaaatgaacgttttctaattttgttcacagattctttccctttcgattgttctgtatgttaagatagtggcttctgctctcactgttttcctatttatattactagcaggtaggagtgctaattagaaaaacttagatggtattgaaattacagttgacaacttatatttttatgagatggagaaaaaagattaagttgatataacaacaaagtggactttttttcttccttatcctgcacgaaatattgcccttgtttcctctactttcctcttggtgttttctctttttttcaaacagaaacaggccaattccattttcttgagcaagaaagcttagtgtgttacttcatcaaggccagctaatactgtgttaaaccgggctgaaaatgagaaaacttgggagatggaggaatggggaaatggcagtgggataggtagggaaggattactcttaattgttttaaaagccataggaaagtcttccttgtacgtggctgtaaatttataagaactattgtgtcacataaaccaacaagaatgaacctttgctgcttcagataatttgatttttccagcaaggaaattaataagttactgattcttcagcatagaaacaactgagaagaattaatgcaatgtttcttcactagaaaacccaacccttcatttcttttcattgctccaaaacccagttttcaactaatggttttctcattaaactaaatgtttagaaaagttgtttagagtttttctttttcttttacatagtcctcctgatccagtataagactatttagtaacgtgcatttgtatggtactatctaaagtaagttagattgatgtaagagatcgggtagctgcggaacaaaattagttatatcctaattaggtacagtgaatgacacaaaatcattttagcaatgcttcttaaccttttggggtcacaggcgttttgagactgatgaatcctagggacttatttacccaggaaaatgcgtatataacatacatatctccctaaagtttacaatattgtagtggttcatgggccccctggttaagagcccattctaaagtacaatagggcatcatcccttttcctgcaaagcccaaaagtatatttctagggcatgaaaataacttgagtctattttaaggaattgtttcactctagaggtagataggggacctggctagaatctgacattaaaatatactttttaaaaaatattatatttggggtggggaaagtgattaaaaggtgaaaaaaaaacatagtattcagaagttttggaggttaatgtctttctctaagatttgccactttagaaattcaacagaaaagaggtaaaacagaaatggaatgtatctggaacatttttggcctccatagtgcagatatactatattaacaagtaatacatttatttacctgtcagatctccaggttttaagattttgagctttctagtattaggattcattaaatgttcaattcatttcatattctaaggaattaggttatttacttactaattcaggatgttaaaataacatccaagtcggacaaccaccaccaatgcacacagttaatgagatttctaaaatataataagtacaatgtaacaaacgtatagaattttgcatttgttgccaaaattagatgtttaatgacagcttatttaattcccatttgtgggacttctggaacatagaaaccattatcttacctggttatcccttgactaaatagcatatctgcaggaaaatatcttgtttgtagtgatatgccccaatagtgattgatttcactcttgaaatgagttatatcacttaatttgtataaatgttatgagtggagagacatgtacatgttaaaagcatgttgcattatatattcattttttaaactctataaatgttaagaataatataattgcagaaatatttttcttaaatacaatgtgtaacaaaattctccgtagcaactcacccactttgcagtttatgtgatccacacttttaaagaaattccataaatgtatattttgtattatgtattatttcctggtccaaagaaaatatgtgaattcagttctaactttaagaatgtactgtttgttttcaagttcattgaaaaattgcattcagcctgcgaatggttgcagattgtatgttagatgaaaagtagaaataatttctagtttggaaaactggtgccactaaataaacaggcaattacataatgtgtgtgtatttatgattgtttaatattgcaagcagcatttttattccaagaaacgtggagaatttgaaattagctgttggaagaccttaaaagaattgtttttttcagctgagaaataaatctgataggatttgaactagatttgttccttcctaattttaggaagtttactgaaagccaagaagtttgagttgatggttattgtcatgaaacattccagaaataaagaagccagagtagtttctctttggtaagaacattcccatttgtctgtcttctagtagatgattactcccttgaagagttgaaattgggaattgggagtggtctgggaaaggacttcctcacctggtatctgtggtatagtgcctgcttcaaaatggcacttaaatgtgtgtgtttctaggatgcagaaaggaggtgtttatttcctctgccaattctgatcattggctatattatatcctgtgttcattcatgtctgaaagtgacttaaacaggtttaattgattctagtcatggcttccataattagagaatttttagagttgaactgttaataaaagtgaaattctgtgagccgcaagagctcattttgtttattgtaaaatgtgtaataaaacagtaatgaagcttcataaccaaaggtaaaatatcttagaactgagtaaggtaaagtaaggcaaataaggttttattttatttatatgtaagtggaacctcttcactcatcaaattgtatcatgcagttttgttcatgggtttttttgggtttgggttccccctccaccccgctttggagcttttcttttgaatgttgaagctactttaagttgttttatttcttttttcttaatttattactgagaaacttacattggagtgcccttctctttttccttttttatcaattaatagttcaaattaaatttcccatcacttaatagctcagattaaacttctcatcaagtcaaattttattctagttgaaaagtgctatattttttgataaattaccctgggaaattggtttgcatgccctctatagaactttgcttacttgccacaaaaccaacaacttaccagatgttggtaaaagattttgctctgatggctgcctgttgtttacatgagcattatatgtatttcttctgatatgctatctaaggtgattcagagtgcctaaatagtgaattagctaaacattcaacatgtttctgtgatagtttagatacaggcttgtgtcttccagaccaaagcacttctctatagctgtacaaaagtttttctggaaatcaatttgaactagcaaaatttacaatatttagatttttgatctacaaaaatggcagttttatctagcttaatttgtttctgaaattagttgttattcttgaatgatcagattgcaagtcagtatttggtatttctctcattatttatattttaagtcttttaagaactggatgagaggtttaaagaaaagctatacatatttggacaaatttccaaatgtgaggctggataatatacaaatgtatacagatgctctagcattaggtcaacatcagtatgagaaatgttattccagcagtgactgggaaaggaaaggatgccgaatttaagtgttcagggaggaatataatagagactaaagatgggggaaatgattttaaggatttattttgaattacataattgaggtgagtagagagctcctttctaatattttattgggatgttgacgtggatccaatttagtctgtgacttagagacatcagtgagtaattctctgaaaacaattgttctttaaagtgcagtctttgttaaaggtggctgagggctctaactttgttctaggtgtcaactcaaactctgacttaggctacggccatgctgcaccttttctaaatatattttttgtattttattttactatttgtgtctgccttggtaacagctaaaaattacctagtattttaaaggcaaagcatttgctagaagagtgtaactgttctgggtcaacgggattagatgtgtaccttacattagcatactgaaaccattcagggattgttcttctaattctcagtgtgacagtcttgaatgtatatttgattctattaatatttaatgaaaatatttttgtgaagagccactgtatatcataagagcagagctattctcaattattttagccattgaacttttaactgcttactaacaatgctgaaagggttttttttaacttaaagtttccagaacagtcctaacaaaaaaattttctagtgattggatacagtggaggcatataagtgactttttaaacttattaggcatagcaaataagtctttatgtacttggtataaatttgacttttataactgttcacctttcctgatgtattttaacagacatatcctgttgcaatgatccttaataaaatgaaagagatcttagcatttggtaagaccaatgaaactgcttttgtgcccagatcacagaaaagaagctccctgggtatccttccttagaatttacttttatgtctgaaatcaggatgcttccttttttttgttgtcttctttgtttttgttttaaatgtgtaggtccccagaccacattctgttttagggcttctgtaaatactcttaggaaagtaagtcatgaaattctgcctcctcgaatttcataaaggatttgtttgccatgtgctctgtcctgatttttgcaacatatcaaataagccagactgttgaatgacaatctggttttaagtgtattacatacgcatgtataaatatccttgttcggggtcaactctacagtgactgtcagtagtgttattggttcaacttgaccttcagaggtttccctgcttcacgaccaaatggatttggcatctgacaggaccgcagtgtcagtaaaagcttcatcccaagaggagcagggttccaagaaggaaacttcctggagggcaaatctccataatttgagataaggaagaatacagtagcaatttttgaagatcatgtggtcagttctctgaatctcttggaactatctttgatattttagtttcttggactgaatgtcacttttgttcaaaaatcctttgggtataaaaatttggatatgtgaaaatgtactttttaatcttagaatgtgattttcttggacttaaagtcatttaatgaagttggcatttttctgtttggcaagggaggaagaggaaaagggaaggtggaagaggggaagaaaaggagataaatactaagggcaagaaaggagggttgtttaaagtgaaaaacaaggtgtgttttttaaaaggaaaatcatatttttatgaaattaggcaccttataaatcatccttatgttttatagcagtctctaatgcattactggttggaaaattagtcatgtctcttccccaccccccatccccccattatgtttttaactctcccttccagaggggtgagttagggggaggagggaataatgcagctttgattgtcacctgtcataggtttgattaggaaagcgattaaaacgaggtttaaaataaaggattgcagatttcccttctgttatcagttccctggcttctctgaagcagtggttttcaacctgccagcaaggtagagtgacctgggaagctttaaaaatcctttagcagtgaaggttaagttggaaggttcaactgaaagttacccctcccctcatcctcagtgaatccctgcatcctccctgtccctgctcagatcattgtcattcctctcttcaaatccctgccactcagagaaagccagtgtccttatagtggcctgcaaagccccgtatcttatgtggtccttgtgacctcttgaactcaccttcttcagtctgctttagatgttctggtcttatagctgacctcagaacatgcctgtcccactcaagccctagggtcttacaggcacttgctctagctgttccccctacctgaattatttcactggccaaagcaagtcacattgccagttcaggagggcctgaaagaacaaatcagaatatttgtgaacaagcctagtctctactgtggtgtctaatgtgtatttgatgactgaagaagattgtgcatctgtgtgcatctgtagaagatgagataggcattctgtttttgccaggagacatagtcttatttgaactggactatttgagataagtgctggtggtagagagg

SEQ ID NO: 335 - DNA, 2186 bp, Homo sapiens
tctgagccgcgagggcgccgacagccgggggcccggacgcagcccggctcctcccctcctccgccccttccccagcctgacctggcccgccgctgcagcggtgacccctcccccggctgccgccgctgccgccgccgccgcctcggccgaccagggacctgcccgcctgcggctgctccggacctagaggatcaagacataatgggagcatttttagacaagccaaagatggaaaagcataatgcccaggggcagggtaatgggttgcgatatgggctaagcagcatgcaaggctggcgtgttgaaatggaggatgcacatacggctgtgatcggtttgccaagtggacttgaatcgtggtcattctttgctgtgtatgatgggcatgctggttctcaggttgccaaatactgctgtgagcatttgttagatcacatcaccaataaccaggattttaaagggtctgcaggagcaccttctgtggaaaatgtaaagaatggaatcagaacaggttttctggagattgatgaacacatgagagttatgtcagagaagaaacatggtgcagatagaagtgggtcaacagctgtaggtgtcttaatttctccccaacatacttatttcattaactgtggagactcaagaggtttactttgtaggaacaggaaagttcatttcttcacacaagatcacaaaccaagtaatccgctggagaaagaacgaattcagaatgcaggtggctctgtaatgattcagcgtgtgaatggctctctggctgtatcgagggcccttggggattttgattacaaatgtgtccatggaaaaggtcctactgagcagcttgtctcaccagagcctgaagtccatgatattgaaagatctgaagaagatgatcagttcattatccttgcatgtgatggtatctgggatgttatgggaaatgaagagctctgtgattttgtaagatccagacttgaagtcactgatgaccttgagaaagtttgcaatgaagtagtcgacacctgtttgtataagggaagtcgagacaacatgagtgtgattttgatctgttttccaaatgcacccaaagtatcgccagaagcagtgaagaaggaggcagagttggacaagtacctggaatgcagagtagaagaaatcataaagaagcagggggaaggcgtccccgacttagtccatgtgatgcgcacattagcgagtgagaacatccccagcctcccaccagggggtgaattggcaagcaagaggaatgttattgaagccgtttacaatagactgaatccttacaaaaatgacgacactgactctacatcaacagatgatatgtggtaaaactgctcatctagccatggagtttaccttcacctccaaaggagagtacagctcaactttgttgaaacttttaacatccatcctcaactttaaggaaggggatatgacatgggtgagaatgattacatcagagaacttcagcagtacaacagctagcccagaactgatttttttttttttttttgtaaatttgagacttatgtaagcgtgatttcaaaccataattcgtgttgtaaatcagactccagcaatttttgttgtatgattttgtttttttgtaaagtgtaattgtccttgtacaaaatgctcatatttaattatgaactgctttaaatcactatcaaagttacaagaaatgtttggcttattgtgtgatgcaacagatatatagccctttcaagtcatgttgtgtttggacttggggttggaacagggagagcagcagccatgtcagctacacgctcaaatgtgcagatgattatggaaaataacctcaaaatcttacaaagctgaacatccaaggagttattgaaaactatcttaaatgttcttggtaggggagttggcattgttgataaagccagtcccttcatttaactgtctttcaggatgttccttcgttgtttccatgagtattgcaggtaataatacagtgtattcataagaatctcaatcttggggctaaatgccttgtttctttgcacctcttttcaagtccttacatttaattactaattgataagcagcagcttcctacatatagtaggaaactgccacatttttgctatcatgattggctgggcctgctgctgttcctagtaagatattctgaattc

SEQ ID NO: 336 - protein, 382 aa, Homo sapiens
MGAFLDKPKMEKHNAQGQGNGLRYGLSSMQGWRVEMEDAHTAVIGLPSGLESWSFFAVYDGHAGSQVAKYCCEHLLDHITNNQDFKGSAGAPSVENVKNGIRTGFLEIDEHMRVMSEKKHGADRSGSTAVGVLISPQHTYFINCGDSRGLLCRNRKVHFFTQDHKPSNPLEKERIQNAGGSVMIQRVNGSLAVSRALGDFDYKCVHGKGPTEQLVSPEPEVHDIERSEEDDQFIILACDGIWDVMGNEELCDFVRSRLEVTDDLEKVCNEVVDTCLYKGSRDNMSVILICFPNAPKVSPEAVKKEAELDKYLECRVEEIIKKQGEGVPDLVHVMRTLASENIPSLPPGGELASKRNVIEAVYNRLNPYKNDDTDSTSTDDMW

SEQ ID NO: 337 - DNA, 2344 bp, Homo sapiens
cggaacgggtggttggggaggggggggtggggggactctagacagctgaggcgcgaaagcgatgagtcctcggctcttcctcctccttctccgggacccgctctctgcctccctctccaacgcccggatgatctgagccgcgagggcgccgacagccgggggcccggacgcagcccggctcctcccctcctccgccccttccccagcctgacctggcccgccgctgcagcggtgacccctcccccggctgccgccgtcgccgccgcggtgaccccctccccggctgccgccgccgccgcctcggccgaccagggacctgcccgcctgcggctgctccggacctagaggatcaagacataatgggagcatttttagacaagccaaagatggaaaagcataatgcccaggggcagggtaatgggttgcgatatgggctaagcagcatgcaaggctggcgtgttgaaatggaggatgcacatacggctgtgatcggtttgccaagtggacttgaatcgtggtcattctttgctgtgtatgatgggcatgctggttctcaggttgccaaatactgctgtgagcatttgttagatcacatcaccaataaccaggattttaaagggtctgcaggagcaccttctgtggaaaatgtaaagaatggaatcagaacaggttttctggagattgatgaacacatgagagttatgtcagagaagaaacatggtgcagatagaagtgggtcaacagctgtaggtgtcttaatttctccccaacatacttatttcattaactgtggagactcaagaggtttactttgtaggaacaggaaagttcatttcttcacacaagatcacaaaccaagtaatccgctggagaaagaacgaattcagaatgcaggtggctctgtaatgattcagcgtgtgaatggctctctggctgtatcgagggcccttggggattttgattacaaatgtgtccatggaaaaggtcctactgagcagcttgtctcaccagagcctgaagtccatgatattgaaagatctgaagaagatgatcagttcattatccttgcatgtgatggtatctgggatgttatgggaaatgaagagctctgtgattttgtaagatccagacttgaagtcactgatgaccttgagaaagtttgcaatgaagtagtcgacacctgtttgtataagggaagtcgagacaacatgagtgtgattttgatctgttttccaaatgcacccaaagtatcgccagaagcagtgaagaaggaggcagagttggacaagtacctggaatgcagagtagaagaaatcataaagaagcagggggaaggcgtccccgacttagtccatgtgatgcgcacattagcgagtgagaacatccccagcctcccaccagggggtgaattggcaagcaagaggaatgttattgaagccgtttacaatagactgaatccttacaaaaatgacgacactgactctacatcaacagatgatatgtggtaaaactgctcatctagccatggagtttaccttcacctccaaaggagagtacagctcaactttgttgaaacttttaacatccatcctcaactttaaggaaggggatatgacatgggtgagaatgattacatcagagaacttcagcagtacaacagctagcccagaactgatttttttttttttttttgtaaatttgagacttatgtaagcgtgatttcaaaccataattcgtgttgtaaatcagactccagcaatttttgttgtatgattttgtttttttgtaaagtgtaattgtccttgtacaaaatgctcatatttaattatgaactgctttaaatcactatcaaagttacaagaaatgtttggcttattgtgtgatgcaacagatatatagccctttcaagtcatgttgtgtttggacttggggttggaacagggagagcagcagccatgtcagctacacgctcaaatgtgcagatgattatggaaaataacctcaaaatcttacaaagctgaacatccaaggagttattgaaaactatcttaaatgttcttggtaggggagttggcattgttgataaagccagtcccttcatttaactgtctttcaggatgttccttcgttgtttccatgagtattgcaggtaataatacagtgtattcataagaatctcaatcttggggctaaatgccttgtttctttgcacctcttttcaagtccttacatttaattactaattgataagcagcagcttcctacatatagtaggaaactgccacatttttgctatcatgattggctgggcctgctgctgttcctagtaagatattctgaattc

SEQ ID NO: 338 - protein, 382 aa, Homo sapiens; identical to SEQ ID NO: 336

SEQ ID NO: 339 - DNA, 215126 bp, Mus musculus
  misc_feature (1)...(215126): n = A,T,C or G
aaggaccatgttggcttcttaaacactgtctgagactccagttactgggtcatctaactcccccccccccccccaactctgaaagtgttgtcagaaatgcnnnnnnnnnnnnnnnnnnnnnnnnnnnnnnnnnnnnnnnnnnnnnnnnnnnnnnnnnnnnnnnnnnnnnnnnnnnnnnnnnnnnnnnnnnnnnnnnnnnnnnnnnnnnnnnnnnnnnnnnnnnnnnnnnnnnnnnnnnnnnntctgaaagtgttgtcagaaatgccctcggagcactctttaagacagcttcccatgttgtagtgaacccaattataaaattatgtcatttataattcgtaactataattttgctgctgttataaattgtaatgtaaatatctgatatgcagagtgtctgatatgtgacccctaagggagtcactacccacaaaaccctaaaggacaaaggcctctattctgaattttatctatttatttatgtttgttcagggttctttggttggtttttgtttgcttattttgtttttgtttttgttttttttttttagacaacatttcactacttagaccaggctagtcaggaactcctagagatccaactgcctctgcttcctgagtgctgggattaaaagcctgtgtcactatggccggctttgattattttagtgtgtgtgtgtgtgtgtgtgattctctggaggtgaagccattcagtgtggtactggaagcatgtggtcctctggaagtaggtacacttctctctggcaggtgttcttaactactgagccatccttcagctacccaagagagagttctaagggaggagactggagaagcagggatttggaagatttcaatgtagaagtatgtcttggccacttatatagactgttgttgctgttgttgttgctgctgctgctgctgttgttctcctcctcctcctcttcctcttgttcttcttcctcctcttccttctcctccttccatgacaaagatgattggggtctcaggcagggtttcaaggacaggagtccgttacaaattcttacaaactacaagctctgggaacagggatcagctgggttttcaaccaccaaacaaacaaacaaacaaacagtccatgtttcaccagagagaacacaggaaatgattaacatttaaaatgatcaaagctggtttgtgtgattttttttgttttgttttgttttgttttgttttttttttttttgtttttcaagacagggtttctctgtatagccctggctgtcctggaactcattttgtagaccaggctgacctcgaactcagaaatcctcctgcctcgaactcagaaatcctcctgcctctgcctcctgagtgctgggattaaaggcgtgcgccaccatgtccagccaattttagaaatttttatatgacctcaaaccctttattatactggtaaagttttcactatggaaaaaaatacaaaatagagataagaagagcccacagcaacagcaacactttataagttgctttctgcgtatcaggcactactccgagtgggcttcataacctctagagtggagaaggagcatgcagggcagtgagggttggtagggcatcaactcctgccgctaggatgggctgccttctgaatccactcatgacctgtgacaaccgctgttcacattcagggatacacccttccaaatttacagcaatccagcacttatacaagtcttctgccaaccaggattctggtcaactgaaccatttgttctgctgttttgttcactctgtatcaccaaagaagtaagatgttcagtatcgtaagcaaacaggtgcggctttatccaagagatgctctccccattcacactcaggtgactttgatggcgcaatcatctgaattgatgaaaagcattttgtgtattaaattttaccactataaatggtttaatcaaaggcgctctctctctctctctctctctctctctctctctctctctctctgtgttgtatctctgtgtgaagtttcttttaaatgacctaaaggtaattgtggaagaccttaataatccaagtatgatagcattatccagaatggaatgagtgaatatatggacagttacttaatggaccagagaaaaacccctgaagggtgagggtcccaggctggcattttcctttcccaagtttctcacataagtgacaccagctaataacttggttgatacttgtagttaataaccacttgacttgctaatggatcagaaccaaaccagacaaatgaatgggagaagctgaccatgggcagtattaataataggtttagagaaaaatgattactcttctaagctgtgctcccttgcttcttccttgaatgccttttttatgtgccaagaaaaaagtgctaaaagtgaagtcgtagagtaagttttaaattttaatccgaaataaggttcttgcctcacgtgacctggtttaatttccagttgttattattacacgtgaaggcaagaagtttggggtgactccatgcaattagtttcgactcccataaacagtttatctttttattgtatatgaaatgtgttttcttaattgacgaagctataatcaggcctttacgagtctgtttgttaacagactgtggtggtttgctaggagtgacacccaacctcggaggcaggcgatcctgactgtgacactctgatccgggcagattcagctgggtgagttannnnnnnnnnnnnnnnnnnnnnnnnnnnnnnnnnnnnnnnnnnnnnnnnnnnnnnnnnnnnnnnnnnnnnnnnnnnnnnnnnnnnnnnnnnnnnnnnnnnnnnnnnnnnnnnnnnnnnnnnnnnnnnnnnnnnnnnnnnnnnnnnnnnnnnnnnnnnnnnnnnnnnnnnnnnnnnnnnnnnnttctgtcctccgtctggggaacctgtcttacttgggttttaaggctcctcttcctgtgtcttcagaggacacatggccagtcgggcttttcctttatacaccctttccttctttcctctttcctcaggggctgtttgtcctaacagataccctagctggttgttgtgtcgggatcctgagctgacaaacctctctgatcttattgttctccccagtctctgttttgcctcagttcttcctctgaagaggttgaagcacttcctgtattctctgttcccttcagaggctttacagtgacactgtgggtctttctactcagtccctgtaatatgtgtatcacttttccatatgagacgggtgtcattcttctattctgagaaatcttagtttctgtgaagtatcgagcattctctgttcttttcggaacactcggaagtaggacatggcggcccctcctatttagatgttcctctgcatgcttagagatggagacggaacagaaccgcgttgacccctccctgcacgccactgtgtcctcctttgccttctactcagaaccagcagtactttcctaacatactaaggactggaatccctccagcatgggcttaggtatgcgtgctttaaaaaaagaaatgagccaaacccagcttaactgtgtattaactatgatcaaattcgtacaaatcttttgaccctggattcccttatttgtaaagcactgagtctaataaaacttgtactgttgtcatggggatcaaacaaacaaagtttatcaagcgtctcgttacaatggtggatgctcaatatattataatatggcagtcaatatcatggccaaagtgcaccctccatccagcaatggatcacgtggtttttgtgacttgtctatctccacaaccttttgagataagtaagtctattatttatttctaagcacagcaatctaacacccgtttttatttattttgcaatataacattttattatatgaatcttgtgtactttataacatatttaaatttaatagtctagttttaaatgttatttactctgttttttttgttgttaatgatatgtacttttaataactgcatagtagtcccttgagatgttactctaggatttacttacacatccacgtgttactagatgtttccagtgtaaggaccagctctgagtcctttgatgttcactgtcagattgctccccaaaggctgtgtgagacatagtaacaagaagtaagttttgacctggctgggacatttgctacatcctccaattctattttaaaagtggaatgaacattgcatgacatggtccttaagaaatcagaaaattggcagtgattcagtcaacccagtgcgctgatgatgatggtgatgatgatgatggtgatgatggtgatgatggagataatgatgtcccaaaaaatgtgctaggaatcacatacagagaagctcagttagtgtgtggctaagaggcactaggaaaaggtacttgtttacaaagtatcagtagcacagatttcaaagtgatggcacagatctgcccctatcattggttgctttattgcataacatacgtgtagtgagctgggaaggatgcagagacataaaggacttcttggtcatctgcctttcttctacaacaggcccagatctggataaaagctattcacaggtgaggcttgggctaacagatagccctcccccatggagaccttgggcctgtctaatgtctcctggaagtcactcatcttcctggattttggcttgaagatgctggtaaggaaatctttgctctgccagggctgctaagctgggaatctggagctgccagtggctttcttctctggttgtccagaaggagacagctcctggaggagaaaaccaggaaaacaatgagagaagaaaaaacctgccaagtggctcatgcctttaatctcagcactcaggaggcagaggcaagtggatcctgtgagtctgaggccagcctggtctacgtagagtccccggatagccatgtctacacagatccaccagaccttgccacacgagtgctgggattacagatctgtaccttcggctcccggtttctcctttttttcatcatcatttctttgttttgagacagccctggatgtctgaaagtttgagaccagcatggcgacattccaagctacacagagagaccctgtctaaaaatgtgggcaagagatgaagaaaaggggccgcatgtgacaaaaggggcagagagggtaagagagcatgtgagtgccctaggaaatagtttgactgatatcagaggtgacctggactttgcctgtggcatttttggggaatctaactatctcactgtcatgtgtgactttaatcagacagctttagcaagcagactaaaacacaaacatagatatttctctcaccctggagctggtgtctggctgtgttgctcaggctgaacttgaatttgggtttaggtcatccttttacctcagacttcccaggagctgggtctagaggcacagatgaccacatgagctcagctagatacttcttttaaagcagggcccatccctttattgctccagcattttcagggctgggtgccgcctctcctgtcttgccttgctacccactctctgagagcctctcccagtgttgcctccttttcttcagtgcacattctcctcgttctgaccaaaccttgtgtttttatgttacactctttacttcttcatttttcagctcaactcactctggatggtcacctactgccccaaagccttgtccactgctgaaaccacagggcgccttcgctctgtgcttatgtaacctcagcatcatctgacctagctgaacactcctcctgcctgaactctttatcctttggctgccacaatacctgtgcgcggcgccttcttggcctttctcttcctttcatgcttgcttctaggcatcactgcctccctctccacccacaaatgctagggtttctgagtagctctgtctttgttctttttatctcatgctgcaccgtctttgtctgtctgtcttccttccttccttccttccttccttccttccttcctttctttctttctttctttctttctttctttctttctttctttctttctttcttcctctcccacagcagagcttcgcccactattctggcttccattactatctgtataccttggctcctaaatttatgtctttagtccagactgtcccttggactgtcacaatcacctagccaattgccggatttcagatttccacttaaatgcatcaagcatccatcaaacccgacaggtttcaaatcgaactcttcgtctcctcccacaaatcttttctccagcgccgtctcggaactccttaacagctccccaatggacccagctgcttgagctgtattctgcaagtcatgctccatctttgccttcctcattccctcccttccatccagcctccaaacctgccagttttacctccttaacggttctcaaatcaacctatttctcttcatctctattaaccgcccggaaaatcccagttaacagcaaccttctcacaggaccctctccacccaggcgtcttcttttcaatagactggccacatggcccaagaaatatttttaaatccataaatctcaccctgccttggctctgcttaacagcttcctgggctgctgagattgctcataggaaatgtccatagcctttctcttgagtctcctccccagcctcagtctggcagtgtggctacctatgcagcattctcttacccacttgactttcatctttcctgtctccagctacccagtcttttctccagacaggtcaaactgtgctgcttcttcgagagtctgacccatccctgctgcctacctcttcagaggacatcatctatccacagggattacacgtgtcaggacccctggccctttcttttccaacacttgccacatgtgatgtttctgctggttgtttctaggtcctacaggagtatcagacacttggctgtcctgccgctgcccaccccagtgcctggtagggtgaatgtgaaatgtctggtgttccttcaaccccaaccccaggtcagctgtgtagctcctcttcatttggagatagtcttcttagagtgcagaagatgaacagcagccctcatggttcttttttttttccacatatttattttatgttatttttttagatattttctttatttacatttcaaatgctatcctgaaagttccctataccctgcccccgccctgctcccctacccacccactcccacttcttggccctggcattcccctgtactggggcatataaagtttgctagaccaaggggcctctcttcccaatgatggttgagtaggccatcttctgctacatatgcagctagagacatgagctctggggtactgattagttcatattgttgttccacctatagggttgcaaaccccttcagctcttgggtactttctctaactcctacattgggggccttgtgttccatcctatagatgactgtgagtatccacttctgtattttccaggcactggcaaagcctcacaggagacagccatatcagggtcctttcagcaaaatcttgctggtgtatagaatagtgtctgcgtttggtggctgattatgggatggacccctgggtggggcagtctctggatggtccattcttttgtctcagcaatacctctcctgggcatatacccagaagatgctccaacatgttaaggacacattctctactatgttcttagcagccttatttataatagccagaatctggaaagaacccagatgtccctcaacagaggaatggatacagaaaatgtggtacatttacacaatggagtactactcagctattaaaaacaatgaatttatgaaattcttgggcaaatggatgtatctggaggatatcatcctgagtgaggtaacccaatcacaaaagaagtcacttgatatgcactcactgataagtggatattagctcagaaacctagaatacccaagatacaacttccaaaacacaagaaaatcaagaaggaagaccaacgcgtggatacttcattcctccctagaatagggaataaaatatccacggaaggagttgcagagacaaagtttggagccctcgtggttcttaaggcgaaccggcagctctctggaggagccaggtccagctctttagggaagaagtcagagttgctttcacccagccgactctacctctacaaacgggttgctagcacactttggagagctctgcctgaactgaagtgaccctctacttccttgccccactctttcaggaagccttggtatttccaagagaggcccatccggccagcccattgttctccatctcatcctatagtgtgaagctgttactggtgaggtctcaactccctaatgagaaactgcccagaaccttctcagcaagccaaaccatgtgctagaaaggggacagacgaccaaccagcctgttcagtaagaacgagtatggtgagcgtccttaagcgtcttaagaatggcctggactttataggagacatattggttgcggctggccctcagggagcaagctttatggtagaatggattagaccaaaaggtgttcctaggagacaaaacctgtagaagtcacgagatgggtaaacttagggtctgcccactctgacaataacaacctagagtgtttgttcctagaagaggcagctgaaagccactgtgtgtcagggtggcgcatgtgaacactttgctgcccttataatgcaggactaggtggaccagcaaaccgcctcttgcggaggaagggacttattacatcttggccttgtcagtctccagcagaaccaatctttcctgctctttgtgcagtgacacacctctcccaggaaggagtacaggatttccatcattaccattgccctattaaaaaaatacgcaaacaaaacaactaattactctctgccgaaaaggcacataaacaggatgagtctaagctgaacctgggatgacccattccggtaaagattaggaaagggacctccccttccccacagaacacccgcctctggctagggctctgtcaccctccggcagggtctccaggccactacttagggtgggaggtaggaactccctgctgctgattttccgcatccacccgtcctgccaattctctccccggctgtctcccacgcctcaggtgtttgctggcggtgggcctggaatcctttctttttgtccagccccttagggcagcctccagcccgaaacgcaccgccaacccggccaccgggagcagggatccgcgagcactcagggcgggaaccgcccctggggtgagtggggagtgcgggcccccttcaccgcgtaaccccggcacccacccctcaaggcggtgctgcccgcggtgcgccacgcccccggggtccggaaggcgtggcagcccgcaccgggcttctgagaacttggagcccggcggcgcgcggctctggccgggatgcggctgcggttgctgctgctgctgctgcttcctggttctcagctcaccgagtgggggagagcgtgagcccgcggaggcgggggcaggaggaacgggcggaggcgggggcagagacgccaaagctggagctagccggacgggtcgctcctgctctccggggagactatctggccggccccggagaaggggcgagccccgcgcgctccagaaggacgatcgggagcccagcagcccgccgagggctcggagcccggctcccctcctttccacctcaggagaaagggcgggagggaaggaggggaggggnnnnnnnnnnnnnnnnnnnnnnnnnnnnnnnnnnnnnnnnnnnnnnnnnnnnnnnnnnnnnnnnnnnnnnnnnnnnnnnnnnnnnnnnnnnnnnnnggcgggagggaaggaggggaggggaagatccctccgaggaggcggaatggccggtcgcagggggctcgggcgctgcttcttcccagagctgcctccacgcccgtggcagcggagaggactgccctgagcccgggctccgggttccccagtgccagccagcgcggccccctcggggctccggcagcagcgccggcatgtcgtccggcacgatgaagttcaatggctatctgagggtccgcatcggagaggctgtagggctgcagcccacccgctggtccctgcggcactcgctcttcaaaaagggccaccagctgctggacccctacctgacggtgagcgtagaccaggtacgcgtgggccagaccagcacaaagcagaagaccaacaaacccacctacaacgaggagttctgcgccaatgtcaccgacggcggccacctggagctagccgtcttccacgagacgcccctgggttatgaccactttgtggccaactgcacgctgcagttccaggagctgttgcgcacggctggtacctcggacaccttcgagggctgggtaagtagcgatcgcctcactcctccatgtctgctggaccttccctccttttaattttcgaaactcgtcagagtcccgctccctcatcgccctgcaggggaaggaattccctctagacttcggtcctttcccaggtggcctgcactgttgacgcgacagccgtgggtgtatgcgggcgcaggtgggactctgggaatccgtcctctttgtggacctggactttgcacttaggggaagcccaatagtgatacagagttccatccccctcctcccggggtagggggtttgggaatcacaactctcatataaagaaaagcagagaaagggcgatatgaaagggatatggtttgaatcaagtgcttcaaacacttcttaggagaaagccatacattctcgcgagtattattcatagtgtttatggatgcatgttggttcagccacacagacgtgcacacgtgtttcagcatgcacatccattacatcccagaggtacaaaagctacactggcagggatcagagtgagtgcatggctttgcaccctggcagagttttgtttagcttttcccttggggattgggggcgagggtggaggcgggagtggtggggtgagaggtttaaaacttctctgtttgctcttaagttcagtcagcctgggtgtatgggtgcttccaaactattcctctgagaagaggtggccaagacaccttaggtttgggtctcctccctctgcgttgacctttagctgcccgcaacttcttatatgctgctgccattcccatagttccctggagatagaatttttactgtaaatttctcgagtgcctcacacagcgccagaacgcccatatgtcttaatcctcacgctgtctttgtgatgccggggttattgtgctcactctgagacactgaaatgataattacaacgaagtggtctggcaaagtgtagtgtgtggtaaagactctagagtttaataatggtctcagttctggcaggagtgggcttggaacccgaggtgaatcgctattcagaatctgtttgaaattcacaagtggcagaaccagatggacagtgacaaagattcatggatatatgtattttatactttgaagtgttgttaatttcaccatatattctgaaatagtacagaaggcttgtaaaaattcaccttttaaatagaaattaaaaaaaaaaaaccaaacccatgactcaaattatggggttaatttcaccttggcctttcttcttcttcttcttcttcttcttcttcttcttcttcttcttcttcttcttcttcttcttcttcttcttcttcttctccttctttggaatttagtaatgggctagatggaaactgattaaataaagttaaaagttaactttgttgttggtttgagacagagtctcacacagtagcccaggctgacttgatcttgggacaaaccttttacctcagtttccctgaataagtttacatgtctgtctgtgaatttccagacatggaattgaactgagcaagtgaattctgagttagtgtttggttaggagttaggctgggcaaatctctagaggaattaggtactggagtgtggtggtacaggatggtcatcagccatgataaacatgtcctgctggagacagtctagattagcttgaagatttgaattccgtgggagcttttaaacacctctacttttaaataaactagagaggagcctctgggcgtgggcctccagcatcagtacttagagacttcctagctgacagaaaaaagttaggtttgagaacatgagcataaaggaagacctagacgtgaggctatgataaaagagagctatgagtagggttagctaggcagggcatggagctgtttattgttgcaggagatgaatgaagatttaaatgggaactaaagttcaaagatctatattgcttaacattctgcctagatgttaatggggcccactaggggcattttgggaaatttaatggtagaataggaccagcatttaaatgatgccggtgattcctcatgaatttgtatattcatttagatggtatgtatgtctgtcagtgtgtgtgtgtgtgtgtgtgtgtgtgtgtgtggctgtgttttgaaaccgaggatagtatgactagaatgttttcttgttaagaatactcttcaaaattatcttttacagactgtagaaatgcatttgtgtatcaaattcaaatgcataatttgttcacagttcaagtggaagagtaaagattattctggttgtagtggaactacaaattgctgacctaaaaaaaaaaaaaaatccagcaactgctggagcctaagaaagggatgtaaccatgagttcattataaagcagcctttttattctcattagaatagactctgaacctctctatgcttcattgccccagatactttccaagtatgaagatggtaaccagttattctggatttaatatgagtttgttggtgttctgtggtgggagaaaggcaaagagctattttagcaaaatgtatatctggtgccaaatccagcatcttacatttttattaattgtacacccactttattcagtatatacaagataaatgaatgggatgcaggtaaattttttttctttaatggaaacggatcataccagacaccgaaattggtaagacctcaagttgaagatttgtgttttcaccttgaacctgaagagcaaatggagccaagaataaggacgtttgtaaagataccagaacttggccaagtagacaacaggaactccacacaaacgaaaagccaagtctttccatttttcaattgataagcctcaaaacttgaatgccggtcataagagggaactcgatgcaggttacctacgcttgtaataagagcgagaatagggctgtaaagcctacctacagtacaaaggggatgcgggtgtgttacaaacgatgttatgccagtgagctctgtgtctcagacaaaatgcacacatagctcgaaaagacagaagctgcccaattctcctcaagtaacttaagtagttttatgatcgttaaactaattgagtttatagttagaagtcttcaccaatacaactcactgtcccagatggctttagtgatgacttatatacttaaaagatgagttattacttgctttgcacagattctttcagaaaatagaaggcaacgaaacagattacttcattatttaaaataataccaaaacacaacaaagatattacaaagcatgacaaaaatacctgtaggcaggtatcatccttcatgatgtaaaaagctttgaattttagtcagttaaatacaacaccctagcaagtggagagtatcccataaccaagtgagggctgtatccgggactctaaggcagatttaatgtttgtagagctgctagcgcacacttcttgtggatagggtcaaaataaaggcttctatgaccacctcaatagataaatcaaaagcatttgagaaaatgaacaatccacccaggataaagtttctgagcaagctggaaacagagagaatcttcttagcgtagaggccgtctatgctaatctgcaggaacatcttggtgacagagtgagtgatactctgctgtgatcaggcacaaggcaaacgtgctgctccctctacttccacactgtccaagagtgcaataaggaagtttcaggaaacaaaatgctcgtagaccatagaagaagaagaagtaaaaccatctttacagaaaaaaaaggaagaccaacaatcaagtttagctggtttgcaggatccaaactaatatctagtgtacaaaaatcaactgcgtttctaaatcattagcagtgaactattgaaaacggaaattatttttaatatatcacttgtaagaaaattgaagatgaaattggatgaattagacaaaatagatgtgagacttttccagtggaagtgataaaaacattgctgaaatacagagccaaggaaatggagactatgatgtattcatggctggaaggattttgaattattaagaaccctgctcttccaaaatattcagtagatttagcaccgtctcagccaggatttcaggaaggttcagaagtcatagaaactgacagacagatactaattatatagagatagagacaaaggacctatattggtctgagaattagttttaaaaagagcacatagaaggatgcgcactatctgattttagaggttattgtagtgttactgtaggccagtggaacagaagaatccagaaacggatctgcacatgaaccatcagttagattttaacgaaagagcccagaagttagttcggtgggggaacatgtccgtcttctcaacaagtggccgggctgtgtagccctgtggagaagcggaggctttggcttctacgccacaccatgcacaaagttaattcgaaatgcaagaagaaactgtaagatttctgtaagaaattatagcagaaaatcgtaataattttgagctcggccaataaataaataaataataaaggaaaaaaacagctatcccaaagcccatattattaggattgagctttttcagatttaaaaattacttgttttttttaaaaaagatttatttattactatatgtaagtacattgtagctgttgattacagatggttgtgagccaccatgtggttgctgggatttgaactcaggaccttcggaggagcagtcagtgttcttaactgctgagccatctcactagccttaaaaattacttcttaaaagatgtccagcattatgaaaacacaagccaatgtctaagagcagataactgcataatgtaaattaggcagagtgctggcaacacaaataaataaaataactctaaaatcgcaacagtaatgagaaaacaccctatttgtgcaatttaaaagctggtcatagcatttgaataaaatccctttatggtaaatagcatattatggtaaataccataatcctaatcactaaggaaatacagattaaaaacaaaatcactgtattccccttggaaaggccagagtcagtgccctgcccgtcccaagtgcaggataggaagggtgcagctgtagctgtcccacacagccgttaggaaagccaagtgctgcagtccgcttggaaaacggaacatgtgcttattgtatgatttatctacccgtgtgtttaccaagagagatcgaaccattcacaatgcgacctgcgcaagagcatccacagtggtttcatctgtgacagcttccaatccggaaactcgtgtgcaacaaacaggaatatgtaaataaatggagttgtagccataccagtcagaacacgtgaattagtgatgcatgcagcaatgtgggtaaatctcaagggaaatctgccctgtgcgttggccacagctatgtggccctacccccaaagggcattattgtaggattcaatttatgcaaagttctggaaaatgaaattaagccttggtgacaagaagcacatttgtgggtgtctgggagtgagggatagatagaacgtaatggaggctcaggggcattctggggacaggtgaattatttattatttttacagcgatgatgggctcacagtgacacgccaagggctcaccaaggccttcactttatagacgtgcctcacgttacatttcagtcatgcttcaagaagactgtagaaaaacagtcaaggtttatcatctttattttgctgaaagtgtaaaatgagtgctaacgatgacagatttgagctggcaccctctctgggaagcagcattgctccctcagagcaggatcctagaaaaccaaaaccccataaagaagtgtattaagttaatttttggacactttcattgtccagattatcattcttttttctgcttcttctggagcttgtttgttttgtataatttcttggactccagaatattcagagttcgctgaaggcactgttttccacccccgccccacgcatgtctcccagatcaacccagccaatcagtgagttccagcctcagtgagagactatctgagnnnnnnnnnnnnnnnnnnnnccccccgccccctgttccccccaccccccgtggtatttgcccttgttttctgactcctctggtgtctaaaacttgaggctgggtgtagaggacatgaaggaggcaagaggagcggggaggctgcgtcatggaaagaccttggcgcccctcaggaaggaaggacctgcttggcgggatcccaggctcttttcctgttcaacctcccgaagacattccgttctgtgtggccctgcagagcagctctctcagtttctcttctgagatacccctttgatagtcctgtcaggtggagctgcctggtgccctgtgggcagccagtgactgtctcttgacctgattgctggacacaagggcatgagattttttttttacaccaaatttcttctgtattttctatcacttggcttctttcttctcttttgtactttgtaatggttattaattctcatgattggtttttgttccccctgagggaacaaaggagcgtctagcattgactagcttgcagtgttttacgggaatatgatttagactctctagggaggtctggtccgacgtctgaatgagctctctagtccttccgtttcattgggagatggcttttgctctgggagggctggttgctttgtcatgtaggttatggctgggatggatagctgcctccacagatgcatccttcccacctctgctcttatcactctctgcgatcactttgctaatcaacttctttattatacctctcctatgttttcagtgttggcgattgaacccagggccttcacccatgctagccagtctctcccgtcactgggctacactgctagccctcacatctcccttctgtagtgtgtaaggtcttggggaacagggtactcttctgaccccagcactgtgaacagtctgtggtatgtgacaccagatgtctgttaaaacaaacaaacaaacaaacaaccccaacaaataaataagagaaagaagttttatgtgatgttggggcaaataaagtgtatgtatttggagaatatctttttctttaaacctttcattcatcttctaagccagtcagtgttgcatctgttgatcagtggcatacccacgtgaccttgaaagattggcttggatgtttatgtccattaaatatattagtagatggaaaatgctctgtgtggtgggcttgttggttttctggggcaggaggtcccaaccacccctgggcaggtgcttgtgggttgtataaaacatagataggccaacagagttcctccatggcctctgcctcagttcctgcctccagattcctgccttgagttttcctcaataaaggactgtgacctgccagacgaaatgaatcctttgttcctcaggttgcttttagtcatggtctttatcacagcaatagcaagcaaactaacatagatgcaacatccctggctttatccattctaaaagtctatgggttttgtattggtagtatctggtaattcccttcagttgaaatttttgagccctgggttatgtctggaggcataagcaagagctgcatgggaggagtctgaatcatctcgccttgtgcagtgtggttatctgagagcatctgaaaaggtaccttgtggaggcagaagtggacgaatttttaggaggtgagtagcaagcagttagggagggaagtccctgaagtctttcttctacagttttttttttctattttatgcaacagctggctatcgcatatctcattgtgtatcgatggctaagttctcttttattaggatgtaataaaagatcgagcctgcgtagtgactgctttctactcttactgctgtaacacccagagtggcctttctcagttgccacccagaaaccacaagctcctcctcggtttctcgggcctgatcagagaaacccacaatttctagttcagttcggggtgttctcctttgttttgctgctggtttcctcttgagacatctgtctccccgcactctagcccacacgctgcagagtgagaaccttccagttcccccacagacccaagcatagtgctcattcctacctacaggcttcctgacagacgatagccagccaagagaaccttctctgacctgtccagttctgctttgctgctccttccatccctcttggccacaacgtctctaacctgaaggaatggagtgtgaatggcttgtctctcacagacatctgggaaactggtctgtggcagttcagagtatacggcagccaagtgactaagcctcttctttttcggtctagaggtagctggtgtaatagacacatctctatctgaaatgcccagctaagcatgcccaccgtggaagagtgagctatggaccaggcttgatgttgtgtacccttgagagtccgtgggtgaaacagacgcagcctgttcctttgtaggtctcatagttccagtgaggagataaattggggatggaaaacccataaacaacactagccaggaaattacagcatggaggccggtcgtcaggtattggtaagcaactggtttgggggaaatacagacattttcctggagagaagaggagctgatttataatgctcttgcatagataaccgtgggtgacctgctttgcttaaatgacggaaagatccctcctcaagaggaacaggaacttctgacctgatgatgctctccaggagacatcacaggtgaaaggccttcctgcgtctctgagctccctgcccccagacgctttggaaactatggcaaggaattatgttttgatatctgtaaatagcctgcgaatatttgtgacttccacgggcagaaagcagttaactctgtgtttgactcacacagcacctcaagttctgtatcttcttgaaccaggagccagttagtgttgtgacactccagtttgccacggtctccaccgctccctgttacacaagcagaccctttgactcagggccttctcaaccctgggaggagggtcggagctggtgacaccatagcctataccttcattttcaggatgtgggaactaaaattccagcccaagcagtattgtcactgtgctcacaggaagtgtcacacacacacacacacacacacacacacacacacacacgagcacatttaaggtctgtatactgagcctttaatcctagcactcgggaggcagaggcagaggcaggcagatttctgagtttgaggccagtctgatctacaaagtgagttccaggacagttagggctacatagagaaaccctgtctcgaaaaaccaaaactaaaaaaaaaaaatctgtacactgtgtatacatataagatatccattaatttataaatatactaatcgatctttgtctggattccagattagatctgtagtgtcctacgcagagaagcagatgtctcagtaattatgttggggacttaacttttactggaaattagtattgtatgacctattagtattgtatgacctatcccattagaagaagaccctttagatcttcttttattatagtgttgaggtttggacccagcacttgcatatattaggtaagccccgctttgctttgtagatcacagcttacatcgtatgtgaggactgtgttgtcaggagaacgggtgactttgtcccctatcagctgggatctcaggcaaatctccacttatcagagtttcagctttctggcctttatcccggaagtattgcagcaggatatccctaaggacccttccatctatctgtatagcctctgcctccatcctgtaggcgactctatatgtcatttcctgctttaggcgaccgtcatttcctccctttgggagtagctgggttggtaaagcagtcagtgtgagttatgtctcattagagttagtgactcctacgaattgaattggccccaaatctaaattgctcaggctaggagaggattgagcctgtgtccaaatgacttgtccggcatcaacaggaatgttggcgttatttccttggcttaaaaaatcaaatcagactgaagtaattatgatgaagcctcatttcaagccaggtggttgtagttcttaatttacactaatgcacttctcatcctattgggcagttctaagttatgcccctcttacctcatgccagagagagagagagagagagagaaagagagagagagagagagagagagagagagagagagagagagagagagagagagagagagtagcccactgtttaagcttttgatagattctcattagcagggtaattaaagctttgtagtcttgaagtgtctgtagccaccagtttatatctccaccctaggtggtgacaacacagtaaatcacttgcaggacagatgttttaattagatggaggagggagcccaagggtactggccatcatagccctgaaaggctgtgctggagaatcttgtaaagcaggaggttttgctgagtaccatccaaaaggttccggcacagttaggatgccagtctgctcctgtaggacccagtgaatcagagccctgaccatcaaggcaccagggtagagtgtggtagaaagacccccacaggccactcatcagaggcacgtttactgtttgctgccttcttggaaaggtcctttggttttccattttacccatgtacacattcgacctcacaggtagaggaatacttaatgagttagcagtggtgtttggtttgttcttgaagaaatttgccagagcacagagccacagtcaacacgagcccctcataattgcattaataagccaaggccagtgtgagccaaggccagtgtgagcatgttctatctggccctgtgaacctgatttcagacctaggcttcattctctgcacaagctaaaaccacaggctgcattttcattttttttttaaagtcatatttacccagtgtgcaggcacagcaccacttctgcgtgtctgcagcacttacctgtggtatgatgtggcctctgattccaagtcatgtatgtgttagcattctaaatggagatgcattcatttattcatcagctatgagtctcctggacctgttgacatgattgtctgtgtttcatggtggctggaattgttgagagcaggcttcaggtgaagcagacggctcagaaaccatttcagtgtaccgactggtaagaactatggacctgtttctagaaaaatatgcatgtggtttttttttttctgaccatattctgggattagtggtcccctgactcctgactttggataatacagagtgtcaggtaaaaaagccaacttgaaacatactgaagctcaggcttttgttaatcctaacaactcacacagcaatggttttagtctttgtcccttgtgttggaagacacctttcctcccgttaatcttaggagacacttggccagttacaaacagagagaagctatgcattttaagatggtgttttaaaagctctgtttttttgtttttgtttttttcttagttctggctcctggtggaatatagtagatcctggcttgctttaggaccatttggtcatgttatttaggtatgttcaaaagcctctgtatttgaatgggagctttgaggtttgcagcagacaaaaagaaagaaaaaaacaaaactaggccccattgagtgaccttggtttggtatcttctgaagatctaaactttcccctgtgagatggaatagggtttgtctgttcccctagctagtaggggataacatgagaatctggccatctgcactttaggccaacatttttcccctattgcaccccgatctggggtagtgtaaatgcccagtcactcacaggtatttgtccggcactactgtgtgcccaggtgtgttctagaggagcccatgtagtagcatctatataacctagaactgcaacctcacagagctctcgccttcacagagagatcaataaaagaaagaatgaggaagggaactcagttggcagaagcttatctagcaagcaagtagccccagattggatgccaaacacaggtataaactgggtatggtggtgcatgcctgtgatgccagtccttaggaagtagaggcggaggggctgggaattcaaagtcatcttcagctgtatagcaaatacaaggccagtctgggctacaggagacggtgtgtccaaaaacaaacaaacaaacaaacaaacaaacaaacaaaacaaagcaataaactcaaaccttaaaaggcaagaaagcaagtgacgaagagaatataacaaactgtacagagatttgtaatgagattaaaacaggatggtattaagcaagcgagtcaaagctgctttgtccagaattgcagaggagtgtacagagaaggtggcatctcagtcaagtgataagaaacacacagctgcgtgaaggttgcagcaaggtgctcaggcagagacagagcagcctggtgtgtgggacccaggtcaggatggtgggaagagaggggaatgggagccagccagctcagggctaccatctcaacactggcaagtaacaagtcccttccatctctgggggaccaatcaggctcagatgtcacgtcataccttaaacctggccagcacacagtaggccctcaagaaagaataactgcggatgctttgttgacagtgacattcagagaagaatcacactggccaacaaaagtcactcagaagattgggtttagggcaccagtgcttcaaggtggccatgggaaagtttctcagggcgggggaggggcagccttgtggttgctcctcagatgacatcagagaaacttctgcttatcacacccgaggatctgcttttgtctgccagcttcaggcccatgattgctggctgaaggcctagagcggtggcggtggcagagcgagaaaccagagtctgaactgtgttttagctttcacagttcctcacttgtttctgtaaactcatgagtattaagggaaggctttaataatttaaagggatggggcacttgtattgcagtggcgctgttggtagggtgctcaggtggttgttttaaatcaaaatataaacttataggtgaaaatgaaccaactgacataaataagattcttagtaagaaaactatatacagtttatttttgcttactttgggaaattcacttacttggttggttatagttttatgagttagttcttgacaattttaaatagtttcagataaggctgattttgcaataattttccctttatgtttctgacaccctccccacccccgaacattcctttagcctgtgccgagtataaaaaggcacctgagcacttgcctaagtctcacaatttggcgtgcagagtgtgcagttgtggactaataacacacatgcagcttcaaggggtcaatcagagagctgccttccgtaccatgttcattatagtgtgacggttggatttcagcaagatgctaggtccactcttagttctgcctcctgttagcagagctgcctaactcctgcaagttagtctgcctgtctgtccatctgtctgcccatttgttcatcattcttcctttctttttcttgatgtgtttttttttttttgtctctatgtttgtatgtggtgtatgtgtgtgtgtttttgtatatatctgtatatatgtggtgtttgtatgtatatgtgtgtatgtggtgtgtatgtatgtgtgtgtgtgtgtgcatgcatgtgtgggcctttctgtagagaagaggccaaaatttaatatctctctctctctctctctctctctctctctcttctcagatagtctctcactgaggctggaactcactgattggctgggttgatctgggagatatggagccttcaatttctggcccccagcccttgaattatatgtgcactgccacaccccagccttttttttacctgtgtgctggatccacactcagcccctcatgtttgcatctatggccggaaccttcccactgagccctctccccagcccccaacctcagctttctatccctatcagtacctacttcacagggtcgtggagcattcaggatggacttatgtaaaccattgttgcagttatagacaccaacatagaaaacaaagcttattgttaaagccacagccatggctaccccagcatcctcagtgcttgcatataaagctaagggcgaggtcctttccccaaggtgatgctagggcattatttacacaaaattttagagttagaaggaaagtttgagtgcagcgcttttcttttgcttagctacttgtagctgcccctagctagaaagctgagttcctagggatttggtgtaaattctgcacaactgtccacttagagatctttcaaggaagatcggaaaacaaagtttccatggtatacatagctacaaagctggccaaagtgagttgatggaaagttgtcagcaggatcttttggtttaattatttggtagtggactttcgaaggctcagagttagcgcaaaatcaacaaaccaggaagaaataaaattacaatgtttcgctgaagactgaaggggtcctttgaaaagctgacctgaacattttattgttgcaactaaggggtaaacagcccctcccaattgacaataaaagatgtttctgttgattcaggcctgaagtctaattaatatttattgagttgcattgttcagccacgctttcaaggagggaaactccaatttaaaaaatggaccatttgcatgtgggtttatggatgaaatcaagggcgccaagagttctgattgggttctcagaaaacttgaaatgcttttagccctcattccgaataggattatctgtacttttgtctgctgtctggacacttgttttggttcttccgggcttcagttggctttacattagcattttctgagctgtcttcctttaaaatttcagaacaaaagtccatttgctccccagtcctgcacagtaaggtttgcactgggttggagttgctcagaagtctccaccagtggagcttgtgttgtttgagttcctgctgggcctcttctctttgtcatgcaggccctgtacctggatggtggatatattgatttgctgtggcgctgctggggcagatgtctgcagtgaatgagaatgtgtgtatggctctttgccctggctttgatgatgaccttgctattttcagccccaagccgtgttctctgtgccaatgctgggaccctcaggctcatctccgcatctggtgaagtgcctgcccttatgtggtaaggtttttgcagagagttgtagagggaagaaattcttcacggctctcagttcttgagtcagaatggggacttaagcaccattgatttgaccctgagagctgaaaggtttcctttagagatgtatctttctgatggagatagcagtacatttgggggtgggtgggacatgtgtgaggtcccagaggaatagttcatggagaatgattccgggatggattttgttcccttggctgtgtaaataagtgcaaggaatcacttgccaaactcctggtcctccaataaaaacttaataacttagtttgggtgataggctgtagatttcaaatgaggacaagttgagaggctaagccgtgtccactgcatcagatgtccagaatgttctaagaggcctcgtgagaacaggcacctgtgagaggaacagagtccacagaggtacagctgtgaagggatggctgccatttaactcattgtccccgagctacccctttctcaggagatagcctgatgttgctgcctcggtcctctggtttgcagttcccttcagatctgaggttttcaggggtcacttttgaatccatttgttataatttggctctgtaggacttatgcctataacattttgacttttattaatttttcatagtcttcttttaggcagagtcctgctctatagcactggctgtcccagtactgattatgtgacttccagacttgcctcacatttacagccagtgccctgtcttagcctcccgtgtgctgggagcacagccgtacctcactccttgtggctcacaattttgttttaaattagaaaagaataatgatcctggaaagtcatttctgtaaagatatcacacggcccttttcatcagtattctttctgttgtcactgtttaaaattttttaaaacttacagtcatgtatttattttctatgtgtgtgttggtcacatgtagagccctgtgtgtcactgcagatgacagctcgtgggaatccattctctccttccatcctatgggtctcaggtattgaatccaggttgttaggcctggtggcaggtgtccttacccactgagaattgtaaccagtagccctccgacatagttttgaagagctctatgtcagtggagatcatgttgaaaggaagaaaccatcccagggaactgataatcacttcagtcttccccaatttcaagctccttgcctaccagtgagctctcctcaggcttaggcaggacttttcacgtcctgacctttctcttgcctaggcaggccgccgttcaggaaggtcctaggttacagctagagtcaacatagggggaaatgtgttagttccctagctctcaaatacattctccagtgttctgagaagtctggtgtccgcagagtgagcaccttcacagacctgcagactgtcctctgctgtggccctgatttcagatgctgccagtcctggggtgggccaccttcctccatgctgctttgtgagatctctcctctttctggactgagccttccctcttccgtcatctgaaacatccccaggcctcccaagtagcctccctggctttagctgaccaggcgacccagccctgtctagacctggcttgttgtctttctgatgtaggcaacggtgtctctccacctttttcccaaagagaaactacttttaaggagccttctctccagtccattcccacaggactcagccttcctgaagccgaggcacaaggtcttggctccagctgaacccaggggcacccatggtgtcccataggttgcttgttactgatctgggtggctacttctttctcttttgggctctttgggttctgtgtttcttcagtgcttactgagggatgtttttctctttatttcttttgtacctcttccaccatgcatcagacatcacactccagatggcgttaccttcttgtatactcttcactgtattgttcttgtgccaggggctcaaaagccccacgtcccatctttcctgctgactgtgacctctgcttcaagcaataggcagattcaaagagggcaaagggctttctactctgtctcctttggccttccccctcccacagcaggattaggaagaggggaaaactatggcacacaccttttccacctgaggcacgtgcaagagcggaccacttgagggtctaatgtgcttctgcacacgaccacttgggcatcctctacacatctccaagccaacaagttcacaattaaacactcacttacatctcatgatcaccctgctcctctgcccatttcctgtcagagctcaccatcattccggtcagccgggtaccattgtgtctgtttccttccgtctgcccccaagttcatttattgtcggattctgatgaattggattgcaaatggtttgctgtgtgatttttcccctttccatcagcatcatcccttttggtattcttatcacctgtatggattattgagatagctgtagagctttcttcacaaaatagacttattgtctcagatgaatcctcagggccgccccaaggagcttcctaagactcaacactaacagcttttctgctggagggcttctaaatgaatcctgttcccttcctcaggctgctggggaagatcctcacaggctggctccgaccatgtctcttcctcctcgtgcttgcctggcttccaagttcatacatggatgagcttttcctgttcctccttctgctcatgtttcagttgcttcgtcattagtaactgttggaggaggagggagaggacttgggtaataatgtctgatggagtgaaggagggtctgtagaagaaatgtccctgtctgtgtaacacccacaaacaggcctgagcacacacatctcaacacgtgctttaggctttcctatgacaggagaacagatcaggtgctctttggaggttgttgtcctgtggttggagggcagaaccactcatgatgtcatcagagatgactgagttcaggatagaagtgtcagtagggaactagagagttgtacctctgagtatgcagcgggcacgtcttgtaggaagtgggtcccggagtcagtctccagggtaggtcggtgttaaccatgctgaaggtgatgtgcacgccttctctcctcttcatcttgaggatctaaatttgtcacctggagtttcccctgttcctgtctttcttttcaccaggcagatactagctgagtgctttcagcaagtaaatgtgcctaggtcagactgttggtggaaactggcttcctgatgaaggcagatgtttaagcccctgacaccgctgccccacagactgtgctgaaggaatgtcagttggattggacaccttgaagggagccatgagaaagggttcttttccttccctggagttggcagaagtctctgtgatagttgggagacatgtgggtacccttgtgggaatatccttgtaaaaaccctgatacctatctctgtggtccagctctggtactttatgggatgggcagagagagttctaggtatccatttgttgtgaactgcactgccaaactgatttgcaagagaaggccctgcttacaataagctactaattcagtgcacagagaaagatggtggatcacattttaagaatcatatggtactctccttattcataaggatgttgatggttgtggtttgtcattttctagcgttagatacggctgggagaggtacccttgatgatgagttgatcagtaagcaccgctctagaggtctgaagatgccagaatgtgtcccacctatcttcgggctttatctctcagttaatgagagattttctttttatctctgcctaagggcagtcaatgtttgacttagttggaatccgacttactggctccagacccgtctttccactgggcttcattaccccctactgttggggcgaactagcctttgtgttttttttttcaaagacccgacttgatcagaagcatcgcactgtaagtgtttccacaggaactctgccctttgtctgtgtcactgtggtggctgtgcacagaacccacagggcggaggtgtcaccatccccgttgaaaatgcaacagttctttccatccctcggtgtgaattttccagtggcttctgggaccactgtggtgtcttgaaccccagggtttacacgagaactgataacgagcaatccttactggttcgttgaaagttggcatctggaaagatggcttcatgtttcccgctcagtgaatataaacggcacataaggcactgaagcctgtggtatcatcttcaacccagccagggatcgttagctatggagaaggtgattttttgtccctgtttctttggggatcagacattgttctcagtgagttttttatttccctcttatcctctttatatacacttgctgccttcacgaggtggcctggattctagtcaaccctttgttgtggtggtggtggttgttattttctggtaggttctctcatgtgcagactggcctacaacttgttatcatcctgtctcagcctcccagctgatggcactgcaggccggaggctctgtgcctggatttcctatttatcaataactgaggtgaagcacttgccacgaggacctggtttgggggttgattaatcaaaggtctggcttggagcctagagtaactgccaagagaaggtgcttaatgcaacttcaattaagaaatgaacgagtctcaaacaaatgtaacccaagcaagagagcaggtctttctatggctaagtttgtggggtaatggagcctgtgttggtctggtaaacttgacacgggtacatctagaaaggaggagacctcagtttagaaaatgcctctatcagattgtctgtggacaagtctgtggggacattttcttgattaatgattggtgtgggagggcccaggcttctggagagcagacctgttcctttcaggccacaaagcctgctgtgggaccatctgattagctgtagatacatctgggacagctggcaggtctgtttagtataggtttgtttgtgaatgaaatggataggtggtcctgggttgaataaaaaacaagttgaacaagcagggaagcaagccagtgaagtgttcctccagttctgcctctaggctcctgccttagttcctgcactgacttccctcagtgaccgactgacagggaagcatcagatgggacacaccggtccctccctcagttgtttttgtcagggggtttaccacagcaggaagaaccaaacgaggacaatgaccaacaaatatgacattggacaggacagaggagacttaccagttgatcctctcaaacaatgaagggattaaactgttaggaaaagagtttcatttgttcttgggctaagctaacaggcggagtagagactgcagggtggataacaggtttcttcctacccttgccttacgtcaaacttaatgcgagaagtaaaaatctcgcttttggtcactaggcaatattttgagtaatgttttgttatagaacatcccatgacacactgcaaaaatgtaaaaaaatttgtgtggaagcataaatatgtgtacagagaagagttttgtctataacttgatcaagctggaatgggtagaattgtctttaacaccaagaaactcatctgggatattcagaacaaatgctttctaggtgtgagtcttgtgtaagaaagtgtagttggggcggttggcttttctgaggtccagaaccttgatgggcagttgttaagtgtgcgtgtgccctgtgctcccagaacctggatattataccaaacaggttttgcatgctgtagtgcatgctctgttggatgttgatttctagtggtgttttctagcaagctccacccctatcctgaaatggtgaacatgccactccaataccgtggaacctgtaattgaagggtggtgacttgggtgctcaagatagaagggcaacagcttgatctcacacgggcagtgagctggctgatcctaagttctcttggtgctaagagatctaatgacatccacagccactgccacagttactgtgtgtgaggctggatatgtagcaagatacagaaataaatgtcacctagtgtgaccaagcccattggaagcaggatgagatttaagctagatgatacctggtacttttttcagccatgttggtacagaaggcaggcttgaggttcactgtgcggcatgtgttcccatgaaaggaccctgaccactggcgtgacatactgaaaacagattttagcgacaaatttaatctcccctgactattccatccccactctctcccccttcatttgttcaagtacttaatgattgtgataatttaagagacaaaaagcaaatgagtgtcatggagtgtgtgcttggtggctgtctgtgagcagatctgttcctttcaggccaccgagtctgctgtgggaccatcccatagctgtaggtacagctggggcagctggtgggtctgcatagcatgggcttgtgaatgagatggctaggatggtcacaggctacaacccctgacctgatttgctggcctttgctgggttgagtcttctttctcccaaggcctgcttgcgtggccgtctgcttttcctaggcccagatcgctagctgtacaaactgaaggaaccttggtggtcgtgcaggactaagttgttttaaatataggatagctctgagctcacggcggggggagtggctgaggctagactcccgtgtgtccagccccacaggctggtttctcagtttccgacttcaggggccttatgaagagggcttctttctatttctgtcaccagagaagctcctttgctcatgtgccctcagttcccgtttctattctgtttcctaactaatcatttccctctgtccactatttctagggtagcatgtgctgcattattcacacagaaatggcctcccttcaaacatccgtccaggagtcttgttcagtgacagtcccctgggggggaggggggctgtctgtgacttttcctaagtcgcttataggcatctccacagccatgttgtacttggtttgtctgggctgtgtacgcttagactgagatgagaaagaagtgcatcattgtagcctttctcggtgcagaaagcacacctttcagtacttgggtaaggacaagccacagattaatggaccagggtggagagatcactgcaaactgtgcatattgaagagcagcagcacctgggagtgtggctgcctctgccttggaggcctgcggtgtcaggagggaggagggacgagatgaatggagggggagggttgggaggccactgtggtagcttcttggggaagattaattaggtgtcaggctaagtgcttcacatgcgtgaactcagctggtcctcatggttccttggagacctatagatcatattataacccccctcttcacagggtagctgaggcccagggagggcaggattcttgccccatggagagatggctcggtggataaaatgcctgctgagagcatgaggattcaagttttgagtccccagtcctctcctaagagccaagtgtgctgctgtctgtaatcctgagttggagacagggacgagtagattgcgaaggctcactagctaactcgtctagcagaaccagtggactccaggttatagtgcatgtcagctttccacccttctctctcaatccctctccacacaaacaaaaggaaagattcctgctccaggacagagctggctctacctgccccaggtgtggctccaaggcaggatgaataactttgagacggggatgcctgaatatttgccttttaaggttacaccccagggttagtttgtaggatggctccctggataggaaggataccatatatgctccgtatatgctctgtatatgttctgtatatgcctctacaaggatgataggtgctgggattgatgtgcctgctttgttcaagaaaagcttggcatagtggcacccaggatttcttaacatttcaaaacagtaattgaagggataacgcaaattaaattgacttgagatttacctcctaccactgtgccacagcacattggacctacttgccctttttttctgttctttttttattttctcttaccttttctgttttctttttttttccattttgagacagagtctcattatatagccttgaatggcctagaatgacatatatagatcaggctggccttgaactcatagccatctgcttgcttctgcctcctcagtgctgggattaaagatatgcacatccactctgagcaatatttctatttttaatttatggagactttttttgagacaaagtatcactgtgtaannnnnnnnnnnnnnnnnnnncagagctggctctacctgcccccaggtgtggctccaaggcaggatgaataactttgagacggggatgcctgaatatttgccttttaaggttacacccccagggttagtttgtaggatggctgccctggataggaaggataccatatatgctccgtatatgctctgtatatgttctgtatatgcctctacaaggatgataggtgctgggattgatgtgcctgctttgttcaagaaaagcttggcatagtggcacccaggatttcttaacatttcaaaacagtaattgaagggataacgcaaattaaattgacttgagatttacctcctaccactgtgccacagcacattggacctacttgccctttttttctgttctttttttattttctcttaccttttctgttttctttttttttccattttgagacagagtctcattatatagccttgaatggcctagaatgacatatatagatcaggctggccttgaactcatagccatctgcttgcttctgcctcctcagtgctgggattaaagatatgcacatccactctgagcaatatttctatttttaatttatggagacttttttttgagacaaagtatcactgtgtaatgtaggctggccttgagctcactggtagccctgagtcgtttcaaactactctgtctacgctgaacacgtgcgggaggagggctttctcaacaacagtggcgagaagcagacactctacatctgtctgtctgtctgtagctcatgaacctgttctgttaacatgggcttgattcaagccttcccacagccccggatgtcacctgatcagccgccatgaaggtgcatgtttaagtgactttttttgcattggtcaccttcccttccgaagcttagctggaggtgtagatgctgtgtgtccacaaatcatcttcagcattgtctgggagtggcttgggaatttagctgcctcttttctgtggctgctcctttctttgaaatctgttcacagatgattggttgtgtctttgtgaggatggcggacgatgaggacctgaggaccaggggcggatgggaagaggaactgaaggtggacaccccgaacatgggggagggattttggtttggcagtgtggatggaaatgtcatctcgttgcctttgtgccaggctgaaaggggaaataaatcctggggtgacaacaaaaatgtgggtttattttttatttcattgctttccttgggggcgggcggggggatgnnnnnnnnnnnnnnnnnnnncccaggatttcttaacatttcaaaacagtaattgaagggataacgcaaattaaattgacttgagatttacctcctaccactgtgccacagcacattggacctacttgccctttttttctgttctttttttattttctcttaccttttctgttttctttttttttccattttgagacagagtctcattatatagccttgaatggcctagaatgacatatatagatcaggctggccttgaactcatagccatctgcctgcttctgcctcctcagtgctgggattaaagatatgcacatccactctgagcaatatttctatttttaatttatggagacttttttttgagacaaagtatcactgtgtaatgtaggctggccttgagctcactggtagccctgagtcgtttcaaactactctgtcttagttcatcctcaggtcttagcttctcaagtgtgggattacaggtatgcattaccacttctggcttgattttattcttttcaatcaaacagtgaagaagtaggcgtgattgactattggcactggccattgtatggagcgtgaaggaagcaccacaaacagttgatgtggtgtggaatttccccacctgcagtcctgagatgttttattctctttggaagtatttcaaaatgaactgttactttgccaagaggctcatcacttctgctgttgtttggtgctaaagaccaaaactagggttttgcacatgctaaacccacaccccagctctgccttactatatatagcctggactaggttcagcacttggctggagcaggtatatatctggtgttaagctagccaggacatgaagaagttcaagggagcttgtcttatagcagaagcagatgcatgcccattttggtggtccagagatttacatctgtgtgtattcgagagctccacgctgaacacgtgcgggaggagggctttctcaacaacagtggtgagaagcagacactctacatctgtctgtctgtagctcatgaacctgttctgttaacatgggcttgattcaagccttcccacagccccggatgtcacctgatcagccgccatgaaggtgcatgtttaagtgacttttttttgcattggtcaccttcccttccgaagcttagctggaggtgtagatgctgtgtgtccacaaatcatcttcagcattgtctgggagtggcttgggaatttagctgcctcttttctgtggctgctcctttctttgaaatctgttcacagatgattggttgtgtctttgtgaggatggcggacgatgaggacctgaggaccaggggcggatgggaagaggaactgaaggtggacaccccgannnnnnnnnnnnnnnnnnnngcgggaggagggctttctcaacaacagtggtgagaagcagacactctacatctgtctgtctgtagctcatgaacctgttctgttaacatgggcttgattcaagccttcccacagccccggatgtcacctgatcagccgccatgaaggtgcatgtttaagtgacttttttttgcattggtcaccttcccttccgaagcttagctggaggtgtagatgctgtgtgtccacaaatcatcttcagcattgtctgggagtggcttgggaatttagctgcctcttttctgtggctgctcctttctttgaaatctgttcacagatgattggttgtgtctttgtgaggatggcggacgatgaggacctgaggaccaggggcggatgggaagaggaactgaaggtggacaccccgaacatgggggagggattttggtttggcagtgtggatggaaatgtcatctcgttgcctttgtgccaggctgaaaggggaaataaatcctggggtgacaacaaaatgtggtttatttttatttcattgctttccttgggggtgggcgggggatggggctgctgtggttctcaacagtcagtgtgtggtgatgcttttatgattctcttcagggctctggaggatgccacggccagtgcatgcttctgtggctcctttggttgtcctggaaccccccggtggccctcacggcagcttcctctgctatttctggggccgatgcagtcagagcatgtatagtttatccccaaacccgcatttatgtggagctctgtactctggcttaggctcaatgacctggaagtaatggttagtgccaagcacagatgagagagaagatacctgacatgggtccctgtcattatagccaggcctccttgctactttcttgatttatataccagaagcttaacaatactactaatgacctctccagcagcagcacagactggcacatctgaggtgtcggacatgacaagtgctttgtgcctctagtgttgctcattcagtcagcaagggaggagccaggtacttttgctgggatggaaaggaagagaggacccaggtttccagggaacaggtgaatgacctctttaatgagcgtggctgaggcagtgggccgaggggaggaagttagtgtgcccttggaggagggtgttccacttgtttctcaagctgattcatctaaggccaagagagctaaggagcccgcaggggaatgcccaggtccttcctgttcctccctcagagaaggtccccactgcagttcattcgatgggcagccctctggttctgtcagcaccatcccttcttagagcctcctacaaggctgtgtcctcaggggagggcatagctcccacgtgtcacagtcaggaagaggcaaggcacctggctgcctgttggggtctgttgcgggaaggacattctgaatgtccagaaacattgggttgcatgggtgagaaacagggcatctcaaccccatgcagagtctggaaagagaggtggcctgataacatccggtcaggaggggacagcaacagtgcctctgtctcggatgctcaggcgtggatgcagaagactgggttaagatggggggaagcttcttcagttctttatggaccccgtaaaaagggcagaagttttattggcagctttttaattgtagttggccaatgaggtgatgggctgggcaccagctctggtatgcaacttttgacctttccatcttcttgctcaccgtcctccagctcagttaggaccagcccctctgcttcctccatctgagtatggttctccagcaagttgatcgttggccgctttgcagtatttgggtgagatatcttacaaccagttactcatcccatcctgtgactggcagctttgttaggacgcagtccctcagtagcctctgcctctgggtttccagcacacgtattggcccacagcagatactaagtatttcttgtatctgttaccctctgttgctgactgacagtgtttccttctgaagctgggacccagtttaaatgcagtcttcctgagaggtgtcagatcagtttgtgctctttaaaaagtgtatacttcagctccctaagaaaccgtttgtttgctcagccttttatagagttcgaatgtttattccatttcctgtgtgttttctgctgtgagccctctagtgtttctctaagttcgtcactaactgtgcttggagatgcatgatcttgtgaaggtaactggtaatgtaagaacatagctgggggctggagagatggctcagtggttaagagcatctactgctctttggaaggttctgagttcaaatcccagcaaccatatggttgatcacaaccatatgtaatgagatctgatgccctcttctagagtgtctgaagacagctacagtgaacttacatatttttttttattttttaatatatatataataaaagtacatagctgggacctttccaccgtcttatgttacttgctgtactcattgtgcacctactatgtgcccatctttaacatttgttatctttatcacccactaatcctattacagtagatactgttatctctgttttacaaacgaggatgtgtggagcttttgtagggtacacaatattgcgactgacatgtgccccaaatgcttgtgtcaggcactgcggaggcataggccgagcagtaggcagcgcttgtgccatgcttatgcatgctggcttgttactttcagatccactccatctatggtgtcctttcccattctcacattcttcctctccttccttcttcttcagcctctccagggctcagggtgagatgctaacctgtccgaaggccaccagcccgctgccactcatccggaagaacaccagcatatgtgtctgcctgtctcgcctctctgtctttctgtacacacaaaactgcagaggcaggaactgacaggtccttaggtgtgcaggcgtttgtccagatgagccccgattgcctcgtagaggtcggctggtgtacctgaatccatgctgctcaagaaacccagagcatctcattccctggaagaagcgtttctgcaactggattccactccccttgctggctcaccggcacccccctaaatgcaccatcttttgtgcctacagatacagtaggtgatgccactgtatctgtctacacctgtgagctcagggtgcttggctatgttggggtgagcctcagaaagtgataagaaggaggttttccatttcttgctcatgggacaagatagggacatatggacatcagaagggttgttgtaaccctttaaaatgccttctcttgtttcagtgctcagctaccccagagacatgttagtaacctctaataatggcgtggttttgaatcacatagtgtctggaatctgtcctttgggatctgagcctggcaagagtttctgtgagggctataggttatttttggccttccttgtgccagcctctctcacgtggcatgagatgaggaaatgaaccacttcttcctcctcctgctgcttgctgcagcaccactttgcttggcgtggtagggtctactccttcggccagtttgcacacattacatcatgcttgtttaggaaggggcagagctgtcaggaaatgattcttgactaaatgatgatgtccccacccaccccataactaacctagttacatggaaacagaggcgcgtcactctgattgccccctctctcttggagaggggacgagaaaggctggatcctggtggaccgtgtttataaatctttcttttgctggatggcagtttgggccaaggtcttgtagagttgccttgcttgcatctcttttctgagtgtgcaagctttggggaggagagcacagccctgggcaggacagcggcaggcacagagactctcatcactgagtcccctttgactttccatgttctgaatgtacatgggacttagtgtacatgaatgaaaacacattggctcacgggagggacatactagggtgaatttactgggcgtggaggtagtgaggggtagggagacgctggggggcactcttctggaattgattgtttgccaggtggcagaataatgaatattggaagtgttcactcctgtaagggtagctctcaggtatcctaaacacaagtcgagatgattggtgatgatgatgagatgatggcctctccttctactttcagtttagctgtggaagtctgggagaccgttggtctgtaagacatggctgcctcacagagaaagctgttgtggcatctttcacagtcaccctcggtagcccttgctgtcagaccacagtgtccgagagcatcggcagaatggaggcaggagttgggagatggggctcctgcagtcttaggtcagctgccaagaggttctgggatctctgggagtcacggtatctgtcgccaacaagatgaagcagaccatcatctaaggttctcctacctctgaggtctgcggtatctgttccttcttaatcattacagtgagtctaatcttttatttaaattatgttctcatctccatcttaaggtcaggcttcttattcttctggttttgttttgtttttgttcccttaaacccatgtggctgtgaagatagtgaattgatgtggaaagatgcccttgatacattaataaatgatatacttgaagagaagtaagcaagctttgacccacttctaaagtaaaaatgaaaataagagaaacattagtacaaatccaagttgttggtttttttttttttttttaattatttgaaactgttggggtcagccctgtgtctgagcgctagagctgccttaggttcgcatctggccgggtattaattacactgactgttaataacagcatctctggtggagagtggggtggcacctgtaattgaaaacattaacatctctgcagtgacagatgaatgtcacttttcaatggcatgaagaaaggttatgagttgtcactttgggggcacattttgaccagtactttaaattctgttttggctttagaacggattgaatctcaccactgtggataagagagtgtggccctatgcagcctggaaagatgggaagatgggtccccttaaccactggggccagctgtacaagtggaatgggattatggagacattaatgtttttcaagctacatattttttttccaatgagaatctgcaatttcataataacaaaaaaatggttaacgtggacatataagaggtattggagggatgagacacagctcagctggttacctacctggcgtctggcccgggtaacagcttcactctccagtatgacacagacagactaaataaacagagaccttttaaaacaggtgaggtggaacctgttgttatcctagcacccaggaagcaaaagcaggagtatcgttacaaattcaaggccaggctgctctacatagagagttccagacccaccagggccacagagtaagacactgcccaaaacaaacaaaacaaccaaaaaaaccaacaacaaacaaaacaaaaacaaaaaaagactatgcagaattatatttaccaaatctgtagtagtgtttattttagaatatcaagaccatttcctcaacttttagaattttgtaatgcaattatattttattggattttatttttcttgattgtattaagagaaaaggtctgacagtaaactagaatggctgaaaagcctctctctgatgtatgtgctacttccctcttgacgctctttgctgactgttagccgagcctgtcacatttgggattcctgctgttagaaacctctctgtgcttgttcttaggataacctggtccattcagggtcgcctgcaagaagcttgcaactgctgtcagattagtaactgttggaataaggttgcacttatttttagaaatgattttaaagattatttatttatttcatgtgtatgcatgtttgcctgcttgtatgtatctgtactgtgtgtgtgtgtgtgtgtgtgcctgatgcctctggagggcagaaggcatcagatcctctgggactagagttaaaggtggttgtaagtgggggaaccaacctcaggttttctgtaagggcaacaagggctcttagctgttgaaccatctctccagccccggtgctctacttctaaaggggtctgcagtgtgtgaaggtgggctggatgggctttctgtgaaattgaatggtttattattttaagacgggaggctctgaacacattatgtctgtaatataaatgagctggctggttgtgtaattttataagtcggtacttagggatatgaagcatacctgcttttacactttcccatacttctcatagaagccacctgtttccttagctatgttactaatgtcaccgttttgcacggtggctgtacatatttcacacagcgttttttttttttttttttttaatgtaacttgctgtgttttccgctgctgcttctaattctttctctgtgttgcaaataacacctcgccgaacctgtaattctcccttttctgttctctttggtttttgcagttggggtggttttcttaagaaagatggactgactccgctaagcacttctacacctcttccacgagcacctattgagcatttgccttgtgctgagttctggagatacagggatggactttaggacccagatgcacaagctgtctgtgtgtcctggtaccccctcctttcccctccagtcacctgattcccccctaacttctactttaccagtggagccaccatgaccttcagagcagtacagtattttcttcacatgttctgggatcccttgtcctagctctgccttcctcatcagactctcaaggctgagaggaggcatgtgtctgacttgtccctgcagtgcccagcatgtcatgcatagcatacagtaggccatgaattacataaacaagcatttgaatgtgattcctggtttgagaagctgagaaggttagaggcaaacagtggcctggatctggatcgacgatatcaattttgcatatgtgatttatagtaagcagaaaagaaaacttttctttctagctatcccatttcctgctttacagtgaggtccctagaaaactccactccaacctgccgtgagatgccttgtgaccagacaggaagaacggctcacctgaagctaattcttttcgtgccgtagatgtggcatttctgtgtaaatccatcatctatgagtcactccaagtggccagctcacaccacgtgccgtgaacacccaccgctgttgccttttgatatctggggttgttgttttttcttttactagacaaatccatttcttctatgtccttgctagacctattccggtcttcatgaccctttaaaaatcttaactcagaagaaaagattaatgtcctgatgtcctgtagtgtgtctacgaccgactcctaaggaagagggatgctcagacctagggaggatacgtggaagatccattttcttatatatgatgtactgagtttcttaagtcaaatggagaactttcccttttaaaaggtgatcatcaattaggtgtttaaacaatttgacgcaaactggtccttttattttttaacactgtcagggaagatttttgtggacttaaaattaaggctgaaaacctctgacttacgaactgtttcttgagtggcttcaacatacacttcttgccaccagctggttcaggatcaacatgactataatgtattgctacatcataattttaatttttgtttgccttcgtgtttttttgctaactggaaatctaggtaagcatcatcaaaaacacttgcctgactcagtctgagtttagaagggccgcttgtgagagaggctgtctacagccatagtgcttagatgaagtctcctgaaatcacagatcttgttccataggatagaaactggcaggtgactcacaaggggcggacacctggagctaagcccgcggggagggcggtctttcctgtagcgcattgctagccacccttttgaagcatgcagagaacctgaagagcaggaagtgccagtcccagggcctgagcgcttggcattccttcatggaaagatgacagctcataccgggtgaaagaggaagcgggagggcagctgaggggcatggaacaggagtgtgacctgacatttccattgttgtgtgggccgcagtcttgtgaggtgggttgttaggggggctgggagaaaccggcgtctgcagtcaagcatttccacgttagctggtctccacgtggatgtcccgttgaccttccaaggaggagggactggtacccattttatccttgtgtcgattcatgttccagatcgcttgtgattatagccatttccctcacacttagcgctggactcacttttgggaaccaggattcttctaagatgaatttctgtacagtatgaaaggctttcacaggccatttgtcggtttatcctgacatatttcatgctctctgtctttgtctctgactgtctgtctgtctctgtctgtctgtctgtctatctctttctctctcacatttatttatttatttatttatttatttatttatttatttatatttgtgtatttattgtgtacctgtggagatcagaggacaactgacaggagttgctgtcacctgcagtataggtttgagcttagactgtcccactcacgggcacgtgccttcgctctctgaaccttcgtaccagcccaccactgacttgttttgagggtcagtttttttttgttgttgttttgttttttttttgtttttttttgtttttttttgtttttttttgttttttgtctcagaggctcccatagcaaacgtcagagtattgccgggctagcccttgttagggccgtctaggaagatctccagtggagaagggtgttaccttcctggattctttgtttctatggctggagccttctccgaggagaggagagtggaggtattggtgggcagccagcagtgagcagtctgtaaaatggagaatccttgaccatggtcagtacctgagtcactgtgacacaccagcgcacccgccatccttgagcagcatgccgaagtcaagactgctccctccttacctggttatcaggctgcactgctgctctctgctcctctttgttcttcatttggccactgttctccctcagtgactcttcacagatgactttgtatccaactttattaagaaacttaagaatggttgcgtggaatggccacccatgcccgtttggtgcctataacctaagtacaatcccagtcaccggctgcttgctttgccaggcctatcccgtctgctctgctttctcctagatcacgctctattagtcagagtgtcttcttctgccgtggcctgtgtttgccatgtctgcatttctcaggcccagcactgatgcctaactaacccagtggatgtgatcggctgctgtggtagcattcagcactggctgcctcccgctggcttttaaagaggctttggctcactctgtggttttcttctttttggttgcttctccgccttacattgccttagcgggcttttcattctttgctcatccatcctttttattttaagtgtttagttcagggagagttgcttttctcctcctccctacatgtgctcccttggtcttcgttgccatgcccaggctgatgtgtcccgtgcctcggcactgctggttaccatgtatatatctgaaaaggtttctgatgctctccaggtctggatgtaccaccgttcctcccagccctgccttgtctgctgtgtttagacagcattggaatcagaaaagggtctgaattgtgcttctccctcttattggatgttttgatcttgagcaagtcattcactttccaagcttcagtgtcttacataaaaaaaaattaaattattattagtgtcttatgtgtgatatttgtgtaggagggcatgtgcctgtggggttgtatgtgtgtcgtgtgtgacatgcgtgtaggtcaggggacaaatctgtggagaacattctctccttccactttgatgtgagttcaggaatcaaactctcaggtcagcgggcagcagccttgacccattgttctgccctcagcttctttttgagtttgaggtaacaatgtctacctcacaagagccttctgggggtagccataaagtattcgcacagggcagagtcagaagagtgtgatgttcctgagtggcttctggctgtgtccagtcccagttagctccattcatggactcatcaaaactaataatctgggagtcctcccgaatacttgttttctttagctcccacatccatccggtctcctgggctagcagattctaatgactgtttatctcctagatctggaaatttctgaggtctcccttcagacgccaaagaccaagttccttgaggtggtgccatctgagcctctcttcttaccactccctgactccagatttgtacttgagcaacacttcctgtgtttcccatttcccaccaggctctcctgcctgcttcccaccttcctgagcctcagggcttggaatgccccttcctgctttcgccatacgaattcctcattctgagctctcagtccagatgctacctccttcctctctgacccctccaggagaggtcagatcacctcccgaggagatctgttgccctctgggatcagcttaaacttaccacgttgtatcataatgtgtttaaatgtctttaccccccaaattcagtcaaaaaaaaaaaaaaaacaaaaaacaaaaaacaaaacaccagtaagtgagttccttaacttggtatgtccagcttcgtgattgacatgaagcaggcaccaatgaaatgtttagtaagtggattactgagttcagtgatggacaaacctctcggtgacattggtttctgaggcagggctgggtctgaggagttttgagctgtgctcagggcatccataactgaagttgtcactctaatattcctcttattgcctcttcacttctaaggcctgacactgaagttgtcaattcagtgatgtcagtgtgaccctgagagttattcataagcaaaataaaatatttaatattgtaagcctacttttagcattttttttctttagcattttagaacttctaatgtcagcgtgttctatttgtataaggacttccatgataggtcccataggtagattttttttctaactggtgttaaactgtggaggaaccgctttcccagaacttacgtgagatgtgaagtagactggcttctgtgaaaggctacccaagccctaactttgtatttttaaaaggtaaacaatgaactcccccaagtgcagtgaacattttagacccacattgctcagtcctgtgaccacatgaagccatttcagtttgaatgggattaaaatgaaacaagatggaagctcagtccctccgaatgggcagccctaccgaaagtcctcaacggctcccgggtagcgagagcccagctggatgtcacggaggtaaaactttccttcagtgcagagtgttcagttagcagcagcttaggatgtgagaatcctgatggataattctgcaaccaccgtaccacagagggagtcatggtataagaattcttcctgggaacaccacacagttactaaatcattgtatatagagcatagcattgtatcactatgtcttgtgaacgtctttgtaatgttcagagagtaatgaacatggcgttcatcgtgtagcattttctgcctggaatccactttcttatacagcttggaggggaaagagagggacacaagtctagccaatagaattgtttttctctgttttacattgtcataaaaaacctagaggctaacgtgatgcctggaagtaaacatttacgtttcttttgaaaaaatccatgtgtgttttctttggatgaaatgattttgtattgttgaaacatttatttacaaattaacaccaaaagaaaggcaaaatcttcaacttcctttcctgcccagttgccttaggtggcttccagggcctgaggatcaggaagccagcaaaggcttattgcaactggaaccaggaagttcttgctgtagcaattgaacagcgtcatggacacaccataatctttcattggtaggcagccatttttcccccactccaagtatcatggacacaccataatctttcattggtaggcagccatttttcccccactccaagtatcttgggtcccagggcctgagagggacaggacggattggaacattcaacataagaatggaagacctacccatccatcccatcacacacacacacgcacacccacatgcatacctatattgccactcatgggaagcgtgggtgtgattccgggatcaccatccctgggagaccacagtgatccccacccagatggcttctccagctcatttcagactataaagcctgtagtctcttctttagattatagagagctatttcgtctccagttggtgggcccattacccagactactcagagcatcgcctgggcgcgtccctagctttatcctgtttgtgtccttggaagggaaggggcagagcttgcaggtggcaggtgtagaattcccacttgttacctttctgtaagaagttctgttgttgggttccccttattgaggaacagagtaggtagatgacctgcttataaatgagtgaaaaaggtatttatcccagataatattcataataggcaaagaggaatactgaccaccattaaatgtttagtttatcaaaaaactgcagagtttcagacggttattggtggagttttctgtaggatatgtctaaaacttccaacatcgttcttaggctcagtttataacccatgtgccctttgagaagaagcaggctagccggggattgtgcagttagggtttggacaaaaactcaaagcaggttcactcatttccataaagagctttaaaaatgaacagacttatcaagttcattgatcacgttgatgtgtatatttggttatatatttgagtttcactgtgtgtagtttcccagtgttagaaaaatacaaggaaacaggtgagatagtctcagaagtggtattcttagggaattaattagaaaaaagtggaatgtgctcaaaaggctctgctgtagtaccaaaacctttttggaaacaaattgttgaattaggaaaaaataaagaggccaaggttaatggggaaactagggtattaagaggattaacttaaagatttatgtgtgtatgtgtgtgcatgtgtgtttgttttgtgcacgcacactcatgcacactgacttgcttgctgtgtgttcctgatacaggcagatctatggaggtcagaggtcaactttcaggagttgcttcccaccttgcacagggttaaggctgggtcttgcttgttgcttttactgaatactccaggctggctgcatgtccctgtctctgccttctgttttgcatgggtgctaggattatagatgccactgccacgtccagctttgtccttgtgctcctgggattaatctcagtgtctggcttgtggcagtaatgctctcacctgtgaagccatctctcctgtccctcggaggattgctcacaagacaacgagacctttgattgcttgattgcttttactgttctggtaacgtcagccactgaattcatccatgcctgtgagaaatcacagattcattttcgtttgtctgcttggttttcgttgctcatgcatattattacatatttgtgcacctcatgtttggagtggccctgccacagaggaggtgggatagtcaagcattcctctctagatcactttgcaaccaccctaacaagaaaaagggaggttctcttctcttaaatgcctatgccgcttgggccggtgtcacggaacacaagttttgtcggagctccacaatccactgatagccgtctttcatctgatactaggctaatccctgagcgagggcatgagtgaggagtagtgtcagtttcagggaagcaggtcacctagagtgaaaacctctgcacaggtgatgccagtgtcaccttagtgtgagagtgtccttaagggacattgccaagacagagcccttgtcccttgtgaaaagaagagcatcagaacaaagctgccctctgaatagtccttactcagcttgctggagtgttggataatgaggatggctggtcctgatgaggagaagaagagagccactcgtaccccgccatttccctctctagtgcaaaccacgtccccttccagcaatggtcccattttgctttcttgatttctgtggtttctccaggatatatgctcccgtctataggagcctccacaagaaagaacaggagacccttgtcttccagagtctgggttacctcacttaacatgatctttcctagttccatccatttacctgcagagttcatggcttcatttaacaactgaatagtactctgcagtggataggttagtggataggcttttcactatccagtcatcattgggagggcatttcgttagtttgttcccgttttctagctcttgagaggagagcaacactgagcaagcatctgtggaccgggaccacctccttggggtgtaggtcaagctgggttgtctggtggatttgtttttagctttttgagaattccccacagtgatttccatagtggctgcaccagttttggatccctttgacagcaaatgagagtgccccacccctacccttatcccccagcatttgatggtggttgttctgttgatctttatcattttgaccgagttaagatgaaatatcaaagttcttttgatttgcatttctctaaatgctagggatggtgatttttttgttgattattttgtaaccatttttgtttcttcttttgagaactctctgtatggatcacaggcccattatgggaaaatgggggaagggagctctaattggtgggaacagagggagataaatacagaataagaagaaatgagggttaaacagtgatagggtatctaaaaacccacaaggaagcatactgttaaccacctaaaaatatctatagcacatagaagttgatatatacatttacatagtttaagtgaaaatttcccatctgggctaacaatgctgcctcaaaagcaggaggcatggaaacctgccacccccccccctttttttccttttaatttaaaacatggtctcacttcctggccttgtctagcctggcgcttctgatgtaaaacaggctggcctcaaacacacagagatccatctgccactgcctctgaactactaggattaaaggcatgtgccaccatgaggagccctcctttgtgttgttgttagggttgtccaagagtctttcaaaacataagttattgctattgcccttgttgtcccccctagaagtggacagtaagtcccttttgctcaagacactatgcatttcagacacagggtccagaggacctgaactggatctgacctgaaagcctccttcctgaggactggctttcgtggtgccagaaggtgccgtgtagccttccaaaggatggaagcagccagtgctcagctgtggtgtcaccacaacaatgacctgcatggcatgataaccttaagatggtgcaggaggtaaccaacagctatctagtcaaatgtaaggcacacccaacaagaaggaaatcatgcctggtacggataacgtagccaagcatcctatgagggctagtgaagtcatggatcttggaggagaacctacagctgtccctttactcgccagcacaatttctaacaacattctaaatacttacccttatgccccagagaagtgtagtccccacccacatcaaggatgcttacctcagtaataaagaccattacaggaaatgacagcccacaaaaatgcagagttgtggagtcaaatcccacctgacaacacaactcttgcacctaaggctcagggatcattgcagacaaggaggcaggaagactgtaggggagccagaggaacaggaagttgttggtgagattgtgtctcccagaagtgtcagagaagctacaccagtaagtcttaccatcatggctgcctaaacatgacccgaacaaggacaaaaccactgggataggccacccccaagtcagctttagtgtttcatagcagagtataacggagttgaggtcttgaagacaatttctggagtcggatagtctggaaggaggaggaagaagagatgagccaagtgtaagagatctgaagagatgccaagacccaacggagagttgggactatgagtttggggctagaaagatggcatgcacagccagcagaatgggggacattgcggacttgagtttgatcccaaggacccacattaaaaaaaaaaaaagcaggtgtggtggtccatgcttggaactcactgctggggaggtagaaacaggtgaaacctgaggcttgttggctagcagtctggccaaattaacaagctccaggtgccctgtctcaaaaagaaaacacaacagcagtgaggatcaactaagaaagacacctgaggttgacatctggcctctgcgggtataagtgcacatctgtgtacatacctgtccacactgtatgcacacatgaacatgtgtgtactcattcatgcatgtgcacacatatacacacatctgcatgcatgcagacacactaacacacatacacatgtttgcacatatttacacacacacacacacacacacacacacacacacaccacacacacacagtggctcgagcttgtatatctgagcagaggcaacagatgataagattggctcttggtagcatttgaccagttagatgtggttgaaagacaagacaagagagagaagttagggcagagtgggtgtgtgggagggatgttaaaaaaaaaagaagaaaatgtaccaaagggctaacaaaaacagtggctacagcatgtaattcagttatttgtgctgaagcacagaacacagtccctcaacccagacaaacaggtgtcataggagaagggcaggaggctgttaattgatgtagatttctggacagagatgctccagggtgtggccaggggtagatggaagaagtggcctgtcagggaaggcctatggatggaggacagaaccaggtaaaatggcgggagtagggcctctgttctccttcacaacattatgttttaggctagtatgtttccataaggcctaagtgctttagctgtcctgtgggatgcagaggcaggtatagggcagcatcgtggaagactcctgcccatttgtttaaggatggaaaaaagcccgagttcctgactcttttaggagatttgacagtgggtataatttatggtaatatttcatctgtttgtattttactttttagtcattccattgtttgcaatttagttagtgtattggctctgggaaatgtatttattgtcatcatcactgtcgtcgtcatcatcatcatcattgtcatgaagatcatcatcttttggggttttcaagacagattctctatgtagatcaggctggtcttgaactcagagatcaacctgaccctgtttacccactgctgggattaaaggcatgggccaccatgctgggtgggcaatgcacttaaagctctcttttgctttctttaaaggggtaggaaggggtgtgcatgttatacatttccctagataatggagtagtaacaaaaacaactaaaacttgtaaagccgatttgagcatttcccagtctgcggaaagcagtggaaatgggcttgaattctgtgcatttccatgtatttccatttaaagtctcatttgccacatgccatgtttccccttttactttaaactggaggcacccttcgtctgctaagtgaagagtaaaacaaatgatggagtcatcattttctatgatgtatcaagtagcgagggcacataagagaataatcgtgtttcttgctctcagagagcttccaactgagttgcagaagcagcacgcaagcacaaaaccatggaggggatcgatcatacagggttgaagcaagcaggcgtaataggaccagaagacacatgcaaggggccagcgggcaggcctttacagaaagcggtgaagtctgaaggataaaaacagtagagaggaaagtaacaggcgacagcttgggcatcaccacacccttgctctgcaccttctgtcttgcctttttgcctcaatttctcaacctcgaggagacggtctgtgttaccgcctgttctgtcagccgacaaaactgattgcaaagctctttgcaaatgaggcctggtcctcccgacgtgtgtgggagtaacagtcacacacttcgaaggcgtgtggagttttagtttaataaggttttatttcttttgtttaggtttatcaagtaagatgttaaaaacaaccacatgggcacatattagcaccccccatttcctaatgagagatgaagaaactttaagcaaagtttacattaggaatatcatttccatgactttgtgtccttttgtatttcctttttttttaaagatttatttatttattttatgtatatgagtacactgtagctgtactcatcatgagccatcatgtggttggtggttgctgggaactgaatcccagctctctctccggctggtcctactcactctggtcaaccccgctctctctggcctaagtgtgtgtaaatagactgtagctgtcttcagacacatcagaagaaaggcatcaggtctcattatggatggttgtgagccaccatgtggttgctgggatttgaactcaggaccttcgggagagcagtcagtgctcttaaccgctgagccatctctccagcccttgtatttgttgagagaagatcacagagagtaagagccactacagaaagaatccaaaccttcgaggaaagtattctgtgactctgcctcttgacgaaggcatccttcaggaaggtcagtagggattaactgtagattgacagatgaccactttaggggaagcccaggttggcatcagttaactttggaagtaataggtcagagttcactgtttcccggacatgaggaaataggagctagtcattgaaaccttacattaattgttttgagaatctgaatgctgttcatcaggcaaggaagcttgtacccagacttggtaatcaatgcaagtccttatgcaagcaatgcccttctccatcccatgtttcatggtgcttttgtgcatatgtgtgtgtgcatgtgtgtgtgtgtgtgtgtgtgtgtgtgtacttgcctcaggtgccaaaggctctgaggtaattttagctcctgcagctctttagtgatgacagaaattggactagaggtccttaggtctccccagccttgattctgctgagaatacctgtctgaactttgctcctagcatcctctctgctctaagatagcagtaaggtactctactgtggtgtgggatgtgtgggaaacaatgtttctgactgtaaggaaccctgttttcttgaacgtatctgctttcctatgggtcccatcccttctgggacagtgagggctttcccccacttccatgtcctttctgggatggtgagggctttcctccacttccattcagtacggagctagagcttaagagatagaagaaggggctggagagatggctcagtggtatctgctcttccagaggtcctgaattcaattcctagcaaccatgtggtgactcataaccgtctgtaatgggatctgatgcactcttctggggtgtatgaagacagctacagtattctcatatacataaaaaaaaactttaaaaagaagagttttttttgtttgtttttttgtttgttttttaaagagtcagcagaagatatggcagtaagaggagagtgacagaaagatgaagacagtgtgaatggtatctgtggagaagcatagaatcagccagtagctaatgctcaaaaggaccaatgcccacctctaccccagtctaaactattcagatggcaatgtcttcaagggacacgggatccaaaaaatcagtaggagctgctgctgccccaaagggagaggtagagaccccatgcattagatgtttgctatggtgtaacaacccccaaggttcaccatgggtgaggtcacatgggtgagatcacagtgcaagcctgcttctgctctcctccacagattttccctatttttggcacccagcatggtatctggagcgtaatggcgtcagataaatgtttctgggatgaatagttggatgaatgggtgtagatgccaactccttaactctggcctagttgaagggcctgtgacctggaatcattctagaaaggatgtgacatcccagagatgatgtatggcctgtttgtttcttataatgacaataaatattgtcttcccagatagacaacaggcccttgacctgggatgcttggaagagcttctaggtgtgtgtggatcttatgaaatggtttgtcaagttaggattgcctagggagaaaagtcagatgaaaagtattaccttggttgggcccagtcttcccgtgctacctggggccactgagcatgacagcaatctctaaggcaatttctgctacagatcttggaccctggagcccacccctaacctcttcttacccatcaccagcacttcctctagaaagagagaaacgggatcccaaggtggtctggtctttgagcttgcgtgttctcagcaagcggaggcctgctctgtgatatctgcgggatcctgtctcatgcctgacgcaggcacactcctcccggctgaactataagagaagcgacagaggacagagctgcctttgctctactgtgggtcagcagacactgacgcttaaggtcaaaggaacaaccgggccaagggtcagaggacttagggagatgagtcctctggcacccgtacactcgtgtggttgtttctcatctgtaaagctgggctggtactaattacatcctcttactggactgtggagctaaaaccgcagagcttctgtggaaggctttgtgcagattttatcttttttttttttaatttaagacaggaagatgtttgattataactggtagttttccttcaactacaacaaactcatggaaacagttttgcagcctttgagaatgacactctgtatttgctgatgggtacttactgcccaggtggtagtgttgagcagatgtccattcatggacacgtttatccattatcctgaagacgttctgaactgaatctgatacgtgaccttgggagacgtggatcacacagcctgccaggtctgccgggccccacgtttccaggctgtgcagatcagctttgccttcatcatgccctggggaaaacccctggtgtggcatgttgggatgtttctgaacaggggtgtaaccaccctcggtgtaaggtgtgtggagacacagcaaggcatgactgtcagctgcagggtctgttacacaggtgggtgggtctcacctcgagctctgactctgttgcaggaggtgccaaccatgatgctgttggccctgaaagcgtacactgagaaccacggcactagaaacaccttccttgactgaagggccttagaattatttcttctgagaaatgggcgtggtgtcggcatgattggcgttaattgtgttgctaactccggtttcccccctccctttgcttcagaactcagaattcacatctgtggctcaggtttaacacagcttacactgttcgtgttttaactcgttctcctgtttcattacccccattctgatttccacatgtttattgtaattttatcacatatactcctggatgttgagtctattttgtggaatttagtggttattaggaaatattacttctgacagcatcctttcccagagcatttgggttttaccttaacactaaacttttgaatgttttgtattgctggattaactacgggcagcggtttcctctgaagtgttggtttattaatagcaagcagttagcgaaagaatggagaagaaaaaattgtgactagaacttattttaaaaagtcacagagatcatagcagaaaaacctatttctccatatatagcattatatatttttctatatatatttttctctctcctccctccccaattaaaaattgtctaagatttgaagtgtttcgaatgctaacatgattccacaagttgaaaagattccacctggtttcatgtgatgggctgtagttgaaatacaggtgtgctcaaaattttgtacaaaattgtcccaggctctgtttcaaggtatgcctggaacatgtatgtttagacttgggtcccagacctaaaacatctcattaagtatattaagtatattaaatattccaatatctaaaaacctctcctggcatttaaaatacttttggtcctcagcctttctgagtggagatatttgacctgaatatttccctgaacagacagtcctatatatacaaggaaccatctttggctgttggtggagagaggggcagggtggtgataacatgaagaagaaactacccacagtggttgccagactccgtaggcatgggagtcacctgaggagtttgtcaactgggatgctggtttctgaggcttgatgtgggggtgggatggggagtggggtgaggggtggagggagtcctcatccttaatcgctcctgggagaatctggagggggggcgctggtttgggcaaagtttggcagtccttaatccctaagtgttggggacaagaataaaaggcccaggctgtgttggaaactttcttgtttagagttttccaccgagtttgcagaaatcaaatagtgtcatgtgcatggtggtgttattcatattactcagccttagctgcaaaacgttactcccgatgttagatatcccttggcggtttgtagctgtgcttttgactccccatgtcccttggccacccctctcccatcctcctccttcacattgcctcctccccctcctctgtgtcttgccctttcttctgctttcagcttagggaggggacttcgccagtcttgtctgagaacaattctgagaaggaagttattttgaaaaatgtgttgggttctccctgaggccgtccctcctcaggactgtgaagtagctagcagttcccgtgacctttgcacctttgctcagcctggggtgctgacacctggccagctgtgggaagttgggcaggagcaggagctgtgtgccctgcagtctgggaaggtccggtttccctttgcatggctgtctctggctttcttttcacccacctggtgatggagccagactgaaggaacatctgtagtaattgataagagactgagagtatgagattacatccctctgagatttacttgggtttagaactcctcgaggccagttttcctttaaaagtcacatctcttgcataaatgcacattttaaaagagatgtggaattacagaggtcacacagagttccataccctccaactctttcctcgaggactagtgtcctgtgtggcgtgcctcacagtcaatgaaccattaatggcacttgtgctaattaaattccatggtttctctgccttcttatattttactttaatgtcttatttctgggtcagaatccccctagtaactgagagttactacagtttctcagactttccttggtttgggtgtgcttcccaacttaggaaatactagccaggcgttttgtacagtgacttgatttggtttgtctggtgtttctcttggatctagagtttgggaaggaagactgaaggtgctgagtgacagatctgatggcattagtgtgtgctagttaatgtattgccctgtatatacatacatacacacacatggtgaatgaacacaggtcgtcactgatgggagtcttgctcccctggctgaggtttgtcagacatttcttatagttaacccctcccatctatattgtagtcttcgaaaggaagccgctatgctcagcccacacttaggctgtggaaactatgtttcacttccttgagggggtgttcagaaataagttatttagaattctaatcttgtgcccttatttattcagtcagcatttgtgtgtgtgtatttgtgtgcatatatgtgtatgtgcatgtgtgagtgtgctgtcacctgtgagtacaagcatgagtgtgcatgtggatacacatgcatgtggaacctagagaccggtgtaccatgtcttcctccatccaccttgtatattgaggcagatctctccttaaggcctgagttcaccagttcatatagttctactgagctagctggttccaggggatccccttgtctctggctcttgaatgctggggttacaggtgtgcttcatgcccaccaggcatttttgtgggtgctagggatctgaactccagtcttcatgcttggcaggccatctctcaagcccctattcagccatttgtaccattatagacttttagttttacacgttgccagtgttgacctggggagctttcccagtcagcttccttgactctcagtgacatgcctgtcctcactgtgggagtgtagtttgtttttttaagcacttgtttattttctctgcttccatctttgtgtaggtgctggtgatgaagtcaggttatcaggttcaagttgacattgatatttttgatccatcttaatcatctatttcttcaaggaaccttagtttttttgttttttgttttattggagaatggtgttcaaagccaagttaggtccacaggtagtggtggcacacacctttaattcaagcactcgggaggcagaagcaggtagagctctgtgagttcgagaccagcctagtctacagagttagttctaggacagctggggctacacagagaagccctgtctcnnnnnnnnnnnnnnnnnnnnnnnnnnnnnnnnnnnnnnnnnnnnnnnnnnnnnnnnnnnnnnnnnnnnnnnnnnnnnnnnnnnnnnnnnnnnnnnnnnnagagagagagaggaaggaaggaagagagaatgaaagaaaggaaggaagaaagaaagaaagaaaaaaaggaagaaagaaagaaagaaagagagagagagagagaaagagagggaggaaggaaggaaggaaggaagaaggaaggaagaaggaaggaaggaaggaagaaggaaggaaggaaggaaggaagaaaaggaaggaaggaaggaagaagtcaagtttcagatgctaagtgccctcttgttattgggcgatcctgcttgtaagttttctcaactaacagactaaagaagttgatgtcttctaactcttgtatatgtgctcatgtattaagaatttctgtgtgtgtctatctgcaattgatttgtgttctatgtgagttcatactgatgtctctaactctagtgtggtgcctcatggatccttctagcctttgccccttgtctggatgagactcttcttcctggctctcattacccttcatctgctcacttcttaaactgccaagaagtatttcccaagaaagaactccccagctactgttcagaacttgcattacatcccactcagtttctctccgagtctctacattgtcctaaagttgcttaggccaggctgcccccctctcttgcttcagtgacactgttcatacattttagtaattggttttcatttggactctgccttctgtattctacccagggactcttgatgtcctgaatttaattataaaaaaagcataagtgtgtgtgtgtgtgtcatgtgtgtgcatgtgagtgtgttatgtgtcttccatggtgctcatgtggaggccagaatcatgaggagttggcggtctcattccacctttacgtaggtgctggggatcaaattgggtcatcaggcttgcgtagaaatcatctttactcactgactcctctcacagatcttcccagatttagttttaatcgactacgattcatttcacggtgctgtgaagttgtgcagattttgacgagtactagcattagctatatcaatacaggtcgacgtcgatattaacaagcaaataaacgagacaggaaaacttgatgaaacttcctgtgtgaaaaacattaagtgacaaggtttattaaaaagtcacaggcatgtttgggttccagtcacagagtggtagggatggtagccaggccttaaaatccaaactagttcaacctgccactgacctactaagtcactcacctgtggatggctgtgcctcatcgaaagatgacacacgatttcagtctgaaggtggctgtaaagataagagaaagaattgtgtgtggcccatgggagacacagagcccagcagacactgttctttctctcctgtgggacctgctccctcccattttctcatggtccccaagccattgttctttaaactggtagaatcccttgtctgttgttgagttcaacaacagttttgcagcccagctgtcctgtggatcgctctaacatctttctccctttggcctggcttacttttaggtttcaaccctcatttctctctcgggcaagcatttctgctgaaacaacctcctaatacagtcagtatatttgaaaaccagtcaccccaaactagctccccttcttagaatcttccaggtaaaccttttaacctttcagatactggagccctttcaagcctcctgccctttgccacccagttctcttcgttttctattcagcactcactctggtctcctacagtccagtctgccctttccccccacccccaggcttagcctttaaactattgcttaaggatttttgctaggcttttttttttttttttgaaattgacttttcatctgttaacctggtgtcagaaacccttagcccaacacttctaaatttatcttctgacatcattaaactacacagtttaatattccttgctgcataaaggaacctctccctccccaggcctgccggagatgaggtgggcgttatgaataaagtctcccttttgcctccacttcccacgtctaacagtccctttaaagtcatcttccctctccactgtggcgcttggaggttcccagtattgaactttctccaaggttgctcatcacagacttcccacctcccgagggtctcctccggttctctcttcttccttctctctgggtctgttttcccttcctttcctgtcgcccctcctgaggggtttgatgtatgtaaagggttaccttttcccaagtggtcgcccagccttatcttcactccacattttgcctttatttctaacttcttaccaattgtttctatttcaggagttctgtgtccaaacttagactcatttccttccctctgaatcctgctctttccctcagagctccatcatgattaatggaaagtgttccaaaaagtgttttcttcttcttcttcttcttcttccattttgtttgtttgttttctgtaaagggcagagatttttggcttggtggaccataccatctttgtcatcactgtagtcccatgttacctaatgatgggctacatcctgaggaattcctcgttctgcatttttgtcgtagaaggtcataaaaggcaattttaacacagatcttggtggtgaggttcctcactgagtctgccctgatgctatcaggagacctgagaatgggtgagccatgcagcagctgtaacatggcaggctgccgtacagtgaggttgtttttgctaagtatgactgtattttcaaataatgacaagcattcttataggaacttataagccagtactcattgtctgttatcaagtgttatgtgtaggacgtaattgcacatgctgcactcttctgtccctgacagctcagaggggttgtttaccccagtattgctacagccccataattccatgtgcagagacatcaccatccctaagatataactgactgataggaactcttagcttcaacattacctgataggaccatggccatagcagcagtctatccctggagaattgtcatcatatggtccctgactgtatatggtccctgactataatgatggctctggttagatgatctgagacttacaaaggcatgactgtgttttaataaaactttatttacaaaaaaaaatgacggtctgatgaaattggctctggggtactgtttagtgacttttcgacttggtcacgcaacctaaggtgacatccttttgacctttttctcttgctgttcttgttagatggttttcattaattacactattccaaaattatctatatttctagactgtaagttgctgttccctggtttagtagacaacctgcctctctgcccagtggtctctatcattttaccaggtgcagaaccccaggtttctccttggccttcattgtgggctaagtcccctggatgcagctgtttctgattctctgtgaatgctcttccagcctcccaccctactgcctgctctcaagctggttctgtcttctctccacaggccaccgactcagagtggtctcaccttccactcgtaacgtgccttcaggtctcagtgtagatgccacttctcagggagacattctggtggctcagagcactcgattctcttggtctgagcagcacttgtcatgtggatgccacctgctcagttgtgatctgtgtctctcctctttcacccgagcttccagagtggcttaggttagcctagtggatacgtagtcaacagaggcaatcaaattctttttttctagccccgttcgttcccatggagcctctggctcagtcagtgactcagtcagtttgggactaagattggtccttgatcccagacatgccaccccctttacctggtacctcaaagtggctggatagtctccctcctgggtattatttcttcctaaactcccattttgttgcggacttccttcattcagattagcacactggaaaagttctttaatgtgtgcccgtcaccaccactttctgtctacttcccataccgacttctttgtataaaggtctgacacgtaaggatgatgctgtggctttgttggttgaagccccccagtactccctgtcaccccagggtcagggccagcctctaatatgtcatcagaccatattggtcctcagcctgtgtttctgaccttacgtgaacaacctgcatttaaccatgtgtcaccccgcaccctgaccgctgcactgttcctgcctgctcttccccatccaccttgaaaacagctggcaggatttctaggcgtggtctcatcccttgtagggttttcatctctccctctagaagatcaaagggagtaaagatgtcataaaatggctattgagatagatgcttgggtttgatgcttgtaatgtgccttgggatcaagtcttccaaagatagtccagtgggtgagccattaaccagagaggcatgtgaagtaccttgaaatgcttagagttttctctgtatggtttgtacttaatcttggttgattttgctgggccttcacctccttcctccattacaaatgggcaatgagaatcaatagtatagaataattctgggattatttatatcaatttaaaatacccaactttgtcagtttaaactgttagagtgggccagggaacaaaagaataattatttcgtggtgactaagatactcctgttctgcaaaggtatctagattcttcctattctaatatttcttctttcctgaagcaagttctataaaacaaaacaaaacaaaacaaaacaaaacaaaacaaaacaaaacgaaagagaggtccagtcctgaacccataaaggtggttaataagagaggggtacactctgggtccctggaataggaggaatcataggtacagtcccccttccaccagggccacagagacacccctttcctctttcatctcatttgggagggccctacccagcagaaaggagaagtgatgggctcctgcagaagtgctctttgtaggagatctgcagtatggaggagtgtagtggctattcctggttgtcaacttgacaatatttggaatgaattacaatccggaattggaaggctcaccagtgacccttatctggaggcttggagatccttatctggatcttggtttgaagatcttgagccacagtggctatgaattccagaagattgaatctccgagtttaaggaacacacatttaatctgggctacgcctttcatctgggattaaaggtgtggtggaacacacctttaatctgggctacaccttctgctggagacaatataaggacattggaagaagggagtctagctcgagcccttgctccttcgcctgcttgctgcgtgagactgagtaactgctagannnnnnnnnnnnnnnnnnnngttagagtgggccagggaacaaaagaataattatttcgtggtgactaagatacttctgttctgcaaaggtatctagattcttcctagtctaatatttcttctttcctgaagcaagttctgtaaaacaaaacaaaacaaaacgagaggtccagtcctgaacccataaaggtggttaataaaagaggggtacactctgggtccctggaataggaggaatcataggtacagtcccccttccaccagggccacagagacgcccctttcctctttcatctcatttgggagggccctacccagcagaaaggagaagtgatgggctcctgcagaagtgctctttgtaggagatctgcagtatggaggagagtgcataaggcaagtggggctcccctctcccacctcagcatgtgctctggagtgagctctcagggtggctaactggagcagagtatcaacctgacactatttctggattcaggagaggagatggcattctttagaacttgacccagtctttgaggtgctccatcataagcagtgactgtccaggtaccattatttagcggcagggggggcccgagtcagccccacatgtggcaagcacacaacacattcccccagcagaaagtttcagagagaaaaggggcagaccaggcaaacactatgtgcctgcgcacttctgttgtctctgcagtgcttggactcataggcgccgaaagcacacggagacccaaggctgaaaagctacctgaaatcaaccgtaagaactctgactggtttaagatgaaagaaagcaccacggtacctgaacggctccccacatctcacaaatctcagcagggatctaccttctccctagctcctgctcccatcaggagcacagaaccgggctgtcaggttgactcctctcccaccgtttttggcattgaggaggcaagaccagggtgggaagagggtaacaagcaccctcaggtgatgatgacataaatcttgctaggacttccagggagccagtgacgtggcgacctcatgtacaggctggcattgggttgaccagcaaacatacagaccggtggggccccgtgctagagtaccatggagagaggctggtaaggcaaaagcagaggatcttcccagaattgaaatcttaactgagccttccatgcttctatgaccttggctcattcagaaaccccactgggactccatctttccatctgtttaatgggcatggtggtgcttagcctgcagacagtaaaggtgagagataatgaggggtagggatttagcagcacattgatggaggccaagaggaagttgtcctattttattacagaatgcaggtgcccatctcctttcgggtccctgataggatcctgtaaggacctgcatggtcatcataagcttgatagcttcgtctttgaagaatgatgagatatacttcgtcacgttcctttgtctttaagtgcagactccggaaagcaatagaaaagggccacctaacttgtaatttaaggtatgtggacccttttctcatagatgtttctcgtgcagcccacaggcaccctacaccttttgctcaaatcaaagcctttcccttttaacagaccacgttcctctgcttacttcaggccaggatgaagattgcggagatggcggtttcctgcctgtgatcaattctaatgccttttgtgaaaggaaatgattataggttattatcagttaattaaatgagcatttccctggagtcgtgtgctcaggcttttattaaagcctgcttagaatcacggaacattagtgctagacgaagggttctgagaaaacaccccattggaggtgaaagtgactcgtgtcacttctgcaaagtgacgtcattgagacacagacgtggacggggatgctgctgagtgtaattacaaagctgtgggctgggcaacctaatgtgtctgaagtactgttactgttattagtgtgtgcactcgcgagagtgtgcacgtgtgtggtgtcgcacatgcagaggtgagaagataacttgcgaaagctggtgctgtggatctctgagtgtaaggccagccttgtctgcaaagtgagttccgggacagccaggattataccaagaaactcctctgagatctaagagatcaactaactcatagtagtagcttcaaggtctgattgtgtccaagttttgaaaagcgccagcccaccctttcccatttcccccagcttagtacagtatgcagagtgtggtaggatcttggtgtctgtgtacttaacacttctccttctatctcttatatctctggtgcagagatattaaatggcatgcccagaaacacagccaagagaagatatatctagttttagagcccaagtctcttctggcattgcgaccaaacagattcagaggataagtttgggtagggaggtgaggtatttaagcaacatgaattcctgtaggtacaacttcatgaacttccttcttcgtgattcttcagattactatgggggtgcatagtggggcttcttgagctgcctgacactgtacccaaggaccgttacacactaggtactaaggcaaccttcagtgattaaaagtgctatctattaggtagagaaaataaagaggtaggggttgagagtagaaagcacacagatcgacgctttgtgataggtagaggatgaagaagatccgaggcaaagactctttggagggcattttggttagggaaaggatgaagacatgcttcctccctcaagtaagaaactttttgatgcttgttgtggtaataattaatgggggtttctaccccaccttagatcatttagttcccctataaaagacacaaacctttctgtttataataagccacaacagcactagagctgggcagatatctaccctctgtgctattttgtctacttccttgtcaataaccccaagatataacttgctatgttcctcctgggccactcttactccagctggccaggcttcatggccagttctcacgatcccttaccccatggtgtcttcctctctgcaccttctctccctcctcctcagggtcctgcctcaggctccaagctcaggaactgaagccccacctacttctcttatatccagctctacactgtaggcatctttattcaaccaacagttttaaattaaagagcaaggttacatagcatcacttggtgtaagtgaggatttcctcatccttagaagcaatcagaccctggggaccagtatttagcattacagtgcatagcaacagactaaacctaaacagatgctactattacatctatctatctatctatctatctatctatctatctatctatctatctatctattttagatgttcttttttattattaggtattttcttcatttacatttcaaatgctatcccaaaagtcccctgtaccctccccacgccctgttccccaacccacccactcctgcttcctgaccctggcattcccctgtactggggcatatagtcttcgtaagaccaagagcctctcctcctaatgatggctgactaggccatcttctgctacatatgcagctagagacacgagctctgggggtactagttagtccagacactattgcatatgacagcaagattttgctgccaggaccctgatatatctgtctcttgtgaggctatgccagtgcctggcaaatacagaagtggatgctcacagtcatctattggatggaacacaggacccctaatggagaagctagagaaagtacccaaggagcttaaggggtttgcaaccctataggtggaacaacaatatgaactaatcagtactattacatttaaaagtgaagactctgacttgggtcagagacttaagtctccagactactagaggaatataagagggggaatgcttcaggacaattttctgggcagaggttttgtaggagacacacatatcaaaatcacatccaacaaaagtggaaattgacaaacagggttacaccaaactgaaaagccagtgaattgcaaaggagacagatcatgaagagggcccacagactaggagatgagatacagaatttataagaaacccaaagattttatctgactctaaaaggggcccatgacctgtgtatgtcttttcaaaggagactgtgtgaatggccagaatgcagaatgctgttacagaggacatgccaatcaaagctacagccttgataaacatcatctctctatagtaagaatggttatgataaaaaaaaattctggtgagattatggagaaaagggagattcttgtcattatatgttttcccaatctgaatgtttcgtatgaatggaatcataagagatgtgtggtcttttacaattagtttcctgctttcatgatccatctcactactgacagctcatgtctggcctctgtcaatggacttttagctctttttactgttgtctgaggatgtgtttaaaaaaaaagttaaaagtaccacatgccttccacacttctaaccctttaatggttacatccccttccttgattatggtctagattccttggtatagcacacagccatggactctatgcctccttccagctttcagtctttgccagcccacaacaccaaacacatacaatttcaaccacccattaaaaattctagcacgttctttctaacaaatggtaccaaggcacccgaatctgtaaagttggactccttcatcagaagttgtgtaaatactaatttacaatggaccaagacctaaatttaaaagataaaaatcataaaactcctagaagaatttcagtaatgaccctcgcagcaatatacaaccacattgatataattataacatgactgttataggagcaatcaatcgctttttaaaaattggatttaagaccctcttcaagaaatggaactcatacttgacattatcaatgaagccaataatccatggctagataagtcatgggctttaagagaaaacctaccattgtcaccctgctaaatggacataaccataaatgactcccagtgaatcattgctataccagtagatcactgcatcaattaaccctcaccagagaagtttattcctgctgcagatggcctgtcttaaagtattattcatcagtagatcagagaatgagagatgggaggggaagggctggatacagggtgaacatcagaagggtgacttcatggtgagggttgttgggttttcctgtgggctgctggatgaatgacggcgtaagggatggaagaaagtggatcctgaaatgcaaatgttcacagaaaggcatctataggttttgggggaaagatctgtgttgtgacataggaactaaatctgacactgcatctcatcttcagcccaccccttattggaggtgcattatcttctcattttctgttccatcccaaaagtttaacatctcaggaaatcatgggtctgaatcttccaatggaatgaaaagaggattgaagaacagcaaggtggacagatagaggatggatgctagctagctagataaacagggaaacagagacaagcagagacagagagcatgagtgactgcattctaggagcctgagaaagctggagaagaatggggagggccatggaagagtgatgtccagcagcagtggtcctgagatggggtggggaaggaaactgccaataagataaaaatgctacagagaaatcagctgggatgaacacacttgtctttgggtgatggaaatggaccagtccttggatttgacgggaggctgagatgaatctgaagcagaaatcagattataggagatagcatacacaagggatgtgtagttgaatttttggtttattctctttttattattatatgcgtcagagtgttgtgtatgagtgatagaacatcctgttcagcatcgctgaataatgaaggaggagtttatgagcttgaataattgaaagcacgaggctagagcatggcaggggttgcaagttgaaatggtatcataaaatcttggtcttttctgtttgtccactttcgcatgctttttacctcatcctttagttttgtgagacatcaagggtgccagatacttcaagttgacatcctagcatgaagctaagcagaagtgagaccgtgtctctttcttgcagatctaagaattcctaattgtatctacttagactttatgcttaaacttgaattagcagtgaccaagaggagagagttccattgtgctgatagccaggatacagggacagtgtcagttctaggctgatgtattagttgcatgttgctgtgttacatacttgacagaggcaacttcaggaaggaaggggtttcttacgttcagagtttgggggtgcagcccatggtggtggggaaggcacgacagccagaacttgaggcagcctgttccatcatatctgcagtcatgaggtagaaagtgttgaacattggttctcaatttcctttctcctctttctttggtgcaggacatcagccaacttaatggtgttgcccacatttatggtggctcttctcagctcagttaacttagtctagatatttattgctccataggcttgttctctttagtgattctcaattctgtcaaggtggcattgctaaacatcacagtccatcaatccgggtgtagggacttgtgctttgattgattaatccttggtcatatgtgcaacctgtaatttgggtgggggtcccagctgaatgtttggaccaaagatcaagagctgctctaggtgttgcagtatgtatcatggtctagagagacagtttccattaaagctgtggtggacagagctagagtcagtgagtggaaattattgatctcagtacatctctgctctgagagaaagagcttcctgtggagtagtgtaataaagcgggcctgttgttgatgtaggcagtcagctagcagtggggacatcaaagcaaacaccaggaattaagtgacaacagcccatcttgtctttccaggtctatgatctcacatgtctctataacacagtaaagaaagcatctttatcctgaagaagagggggaggaaagggctgtaggagacagaggggctaaggacaccacaagaaaacccatagaatcaactaacctgggctcatagggtcccagagagcatgcatgggattgacctaggcctctttgcacatacttaacaattgtgcagattggtcgtcatgtgggactcctcacagcaggagccggggctgtctctgaatctgctgtctgcctttgggatccgttccctactgggttgcctcttctggcctcagtaggagacaatgcatctagtcttactgcagtttgatttgccaaggcaggttgatacccatgggaggcctccccttgtctgaagagaaagagaagaggagtggacaggggggtggggagaggaggactgggaggggaggagggagagggaactgtggttgagatacaaagtaaatcagtaaattaatttaaaacgaatgcacctttacattgaaatcttacatgcatataaaaatgcaaaccaaaacatcatgaaactggggcttgggagggtagcttaatcagttaagtacctacctgtctcacgaatatgaggccctgagtttgatcctcagcgccccataaaaattggcgcatctgtagtgggcagacaggtaggtcttagagctcaggtatgagctccatgtctcaaataataaggtagagagcaggaaggctccccatgttggtctctgacctgcatatctacatgtatgcatgtgtgtccatatgcacatgcgtgcacacaaaggaacatgtatacacaaagttttacaaaacagtactcttctttaacacttgtgtttatactttctgtcctgtttgattttatttaaaaagtcccttgcaatatacaatccatttacttgtttttcccatacctgtgattaagtcttggcttaacaatttgaaacctcatacttaggtcccctgtcttagcacatctgcttcccacggacaaagcttgaagatggggcttgaatctggcctctcatgatgcccatcatgctagagaatgaggaggaggcaagcctattcaatgtgtgtaagcacctgattctgggtggtatggtttcctgacatctgtcagagagctcctagcccattgagatgaggtactcatctttgtgggccctctgggcattgttggcaaaggctcacttgctggttgtgggtgtaggatggcagaggtagcctggtagtctgtctgtctgcaggctatcagtggctgtagcagcactagcagcagtttgtgctgtgaggttgagtgtgagttctttgtcaggcctctttgctgaaagtgagggagtggcttttaaaaataacatctttttgacttgaaacaagtcaaggcagagagaggagacaattagacactgacatcctgtttagtcatctctccagagagactattttcagaaccactcaatagaggttcacaagtgccgtcaaggtaggtgacatgacattgtaagttagcgttcatcatgagacaccagcaggttaagttgagcatgggggtgatgtatgaggtgggcttcttactggacacagattctgtgcagagaaaggcagagtttaagaactggctgccacaatagagaggtaaagacttcagagagtacaaagcacattgcattatgaaaggtgtctgactggagcgtgatctaagaataaaatatatatggtagtgaagtaagagaaagaccaggccaccttgagggatctgtgtttacttgtaggtacagtaaaagcaataggtagcactgttaagttctctgatggcagccaggccagaaatgcctcatgctgttccccccaaagtctcagagaacagggaggctctgggggtggaggactggggccactccagagccaccttcagtagagtcatgcagtccttcagtgcaggggtcctctgttgtagcatgagatttgcagcttatttaaagttctattctgccccataagtcatacttagctacacttagtctatacttaaatgggcttactgtaggtgaaaggtcagagtcaggaatggagccgtgagctgaatctgaaagatctatttgaggacattcataaatgcatgcatttaaatccacaagcatctcatgttgcaggattttgaaatgtgggtggacagagaggttagaatatgccagctcaggtatctggggatgctgcagttccattctgggtaccctgctgtatgagggtctttagagtacatgtcttgatgcctcagctgatagctaacttcaatggctgttgagcagttaagagtaactaatccttgtcatggactagacgggtatcaaaagacggagactctgtacaattgactccatgaaactaggcctttgaagttgaatgggccaatgcattgacattgctcctccagcccacttacttgccatgtagtttagttacgtgaggctcccactagataagcaatacggtggctccaaagcatgaagcaaatatgtgcttgcttttgcctcacatcaagtaaggtaaaggagggagagaaggcaattcaagaggaagggcgttctgagtacgtagtttccaagcttgaccgtttgttcctcaagatttcgcttatttctttgtctctactgtacagtgaaacacatttggatttgtgtggctgtgatttatgcatttaggccatctcgtaaagaattattcaagagtcacaaaaagtaattcaatattaaaatataatgtgcttctctctctttctaggtggatctggagcctgaggggaaagtgtttgtggtaataaccctaacagggagtttcactgaaggtaagagcaagttgtgagtggtttctggtgtgtgtgtgtgtgtgtgtgtgtagttttggcacatgattaagaggaatgtctatcgatggaaattataacaggagcatttcctgaaagatgctttaaaaccacagtgtaaattgagctgagtgagctctgtggcccggcaggctactggttcagatccacaagttagcgtctattgtggatcggttaattttgttatcatgtccactgcggctcggttcttacccgttgtcatcctagctaaactgctggatcgttttctttctttggagtcacacttgttgtattgtactctagcgtcttgtgctaggcttttggtttgcccccaaaagaaatttgcgattcgcgttctctttttcataatctccactttattcttatcctttaaccaattctgtgctttagtattcggcagacagctactaaactgtcccccacaaaccaaaagccattttttaaaaaaatcgaggcaaaaaattatacatggtgaaacgaaagatcaaatgtgaataacttgaatttcagcaaataagccaatgactcagctctgcagtccagttcttcagaaggttctctgtctgtgcttcctgttggtcacccctgtggcccaaggcaagacgtataatacagtctcattcccatgaagtatttctgcccattctagaagtttgtgtaaatggaattttatagtgtgtttttttggggggtctagtgtctttttcttagcatcatttcttatggattcattcatcattgtatctcagtatttcatctttattgtcaatcgtattccatgtcactctgccatggagacaaccgcaaaccccccagttagatggaattgcctttaatacagcttacggaagttcttatgccttatgaatggagggcctttgtgaaaatgcaaacgacaactgtttgtctcagtttcctctctgcttgcccccttttccttcctcctggaaactgaagtgacgttggggtcttgtgtgtactctgcaagtgttctacacccagctcttgcatagccccttccccatcttctctttttgagatgggatcttactgagtgtccaggtaaacctttaaacttatcttcctttctgcctcaacctgccgagcttttaatttagccattttttttaatttaggagattttatttacaataaagcccagtgtgtcagcatcatcttccatactttgagcattttgtgtcttctttatgaggtctatcatggagggtcacagagatttgttttgttttgtttgtttgtttgcttgtttttgtttttttaatgttgcaactttatgttgaagccagtgtgtgaccttaacgtctgtgatatagcaggaattcagaatatattcacagacactagtaaaagctccccattgtcgttggcccgccacagaacttttgttggaagtcagttgatcccgtgagtgggcccatctctcttatctagtctggatgttgatgtttgggcgtgtttgggtagtggcacacgctgtgcccactgtccatttgcagtaagatgtaagtcacctttgctagtgcttccttagaatttaaggttataattagctggtcatagtattttgaattttgatttctgtttcagcatcggcttatcatttccatacaggaaccttctggatattaaattgaatttgagatgatggctgtctagatcagttttagcagaattggcagcttattcataagtgtcttccacatggcacatctctccacacaatggctttgaataattagtattattggtattgtataattttcaatatagagcttgcttgtgctttaatttttttttattgctaactactttaaggtttgtgatgttggaaatggaattttaagaatttcattttaaaattagtgtatggaaattatgttttgtacattagctttatatgccatggcttaattactaaattcactactatttccaataaatgtttgcatatgcttgtatagtaaccatatcgtctgtgaatagacaattttatacacttatgcccctttaaatgccctcatggtatcccgaggctactgtgacctaaatcatggtctcatacctaccctttctaaggaggaagaccttgccatcctcctgcttcagcctgtggagtagttggagttacaggcatgcaccatcattatcatatttttcttttcttaacatggtaaatctttaagcacgaggctctttagctgcagatatttgactggttgactttatcaaatgaagctttttctagttctggcatctctcagctcttaaaaaatggtaggagaaaaaaaccccagaaagtttgaagccaatttttagtcgggcgtggtggtacacgcctttaatcccagcactcgggaggcagaggctggcggatttctgagttcgaggccagcctggtctacaaagtgagtttcaggccagcctggtctacaaagtgagttccaggccagccagggctataaagagaaaccctgtctccaaaaaacaaaaaaaacaacaacaacaaaaaaatggtaggagaggctgttacattctggcaagtgctatttctttctgagagtatcccgtacaagtcttcttgtattcctcttcatctttctagcaagtacttacgtcactagctgatcccccccccctccacacacacacaaacccaaagtcatggaacttttcaagaatgggactgttctgcttcgttcaggacaaattccacagtcctggggcacaatacgtactcaacaagcaaaggcaatctggtgattcatcgaaaatcctgaggattttaagtctttttaacttttttagtattttgctccatattttcaggacatcttgggtctcccttgcgcagctacagttcaggagatttcaaagcatgtagtctgtttgcatattcagcattgatgtcttgcaaattggttacagttcctttgagagcagaaacctttcttttgcttgttatcttggacatggagaatccgggacagatgaatttactctttgctcagtggaataaaattaatgtgatattctacgtaccggccgtggtacagggaaacccagaagttggaaaagaagccagaagaggagtgggtgaggttctcgccttcttgcaatgctgcagggacacgtacagtttgttgtgctatggcatatctgactatgctgccgacattgtgggagcgctagctctcttgcactaggagtttctaagatgtatcttccttaattgtgctgatgtgggaaaacacgtggatcttgccttggtatttatttctcagtcttagtgattagaagggagaaatgacagattatttgggggtgagttctcttaggtcacagcaactctattctgtttggagctggccctttgtgacaggccgagtttacctttgacaactctatctccctctaagccagtccttctttctgactccggtaagaatccagctagctgctgctgaggaagacaatgagctcattggctaacaacactgtgccaacagtgctcgtggtcctagcgctccaccctaggtgcatttgcatattttaaaagatgatatataatctattttgcacacaagaactagactttaatgttgggatgttgggagcagaggcatctaagtgtgggacttatatgtaggaacctttagcgctgtggtgtctatgggagcattgtcttttcagttgggattctagactgggactcagcttcagctcacttgtggctttagtctaaatgatgttctcttgtcaatgcagaggatggaattcacattctccctctctctccctctctccatcccttcctctcttcctctaatcttcttctcccccctgcccccacctctgcccctttcccagccgagacaccagccacagctgtggcaagagcctgactgcctcttagagaatgtgtctggcttgggcttgctcccagccacccccctcatgttaccacaggggttgcttgacacaggtagtgtggaggagctgaggctggaggcatgccaatggaggatataagaagagacttgggactggacagtgccattcgtagctgttaaacagcacagtcttttagtctctgaagggcagccaagttagtaaattgcagagtacacactacttctagaattggagttgatgatgagggaccacggaagattctgcttgtgtgtgtgcagtataatgtgcatgtgcatgcatgtgtgggtatgtgcacaggcaaggggaggccagaggtcgacgtagggtgtctttttcaaacactccccaccttatttttgtgagacagtctcttactgaagctggacctcacttattcagctagactggctggccagcaagcccaaggatccttctgtctgcttctccagatcagggattcccagcatgcaccactgtgtcaggctttttaaaaacaaaacaaaacaaaacaaaacaaaacaaacaaacaaacaaacaaaagacaacatgggcgaaggggatggaacttgcagttcttcgtgtttgtgcatcaagcacgttgccaacgaagccaccttcccagcccctggggaggaacttaagcagagagaagtgtgatctgacttggtgtcagttggttttaaggcttgggaggagagtgttagatcgtaagagctcagagtgtggcgagccattaggagactataaggggaaactgctgggctcgagcaaaggtggaatctgaaggaccagacaaggatggtagcgctgacagatacatggaagcacaatcaatagaacttggagatccactcagtaccagggggaaggaggactctcgagggttgctcggatggtattgtgggcttatggctagggtcaaaacactgcatggacgataatgactttaggctcggacaggagaatttgaggtatttgtgagaagtctgggaagagatgtccaagttgaccctgaaatgaaagtccagactctggtcaaatattccaagctctaagtgccaggtagaagtcagacacatggctggagggaccagtgagaagctgtagagaggcagacctgaccaatgttgtagctctgtgtgactataaccaactaccaccaactacagctactaccaacacttaatgtttagcttagagtatgtcaaatcaacttaaactcccttgtagatttacctactgagcacttgtcttactaacatactcattactgaaataccaatattggaatgcttactgtatgttagggagcttcccaaagagcatctaacatactccaggctggcgtgagaatgtttgatagtgaagattgaacaaagaacgcagcataaaagactttataaagcagtgtttgcattgaggtgtaaaagtgatatcttcattaagatagattcagaaaagctctagaaaccattgctttgtggaaagtcactagcccaggcctgggacagaaacagcttatgattgagaaaggtcaggagcagaactcccaagtgctgaggcagggacatggctggcccatggttattttgaaaagactgttttatgtcattctgctcctctttgaccaagtattcctggggtccatggtctaatccagttgggatttatgacagcggtgaaacagacctggatcttaatagacttagacactggcattgtggctactttagttgttatcactgtgttgggctgagtctcactcagagacaaggaaaaaaaaagttgaagggtcagaaaggtatcaaattaaaagcatactcacttgatttggaagggaaccaacagaaataaagtatgatatcctttcacttgagaacaagtcaagcagatgttgctatattataatgttattggaaaatacagagtgatgtcacacgatttggagagaatgtggatttgtctgactcacggttcctcaagctcaggtgtttggcccatagcatgaacatttcactcggcatgtcacctaatggaagcccagtgaggagggaggcttgtctgcatctagccaggcttccagagccaaccatggggatcagaggatgggagaatatctcaaatgccaccaggtaatgccatcagcaaaatccataggggagacgttttataggaagagaggtttgaatcctttgaccgatttgaaggaaaagaagagccaagaaaatagacattttaaccaggtataaggtatagatcattcttataggtggtgattatatggaattgtaacattatttaggtgtgattgtggctgtttaagataaagtgagcatctatttaccaacaaaatgatataacatctgtgctttatggatagggttaaccatgaattggttggccgaatgattgatttttgtgtgagtgtgtgtgtgtgtgtgtgtgtgagtgtgagtgtgtgtgtgcatgtgtatgtgtgtttctgtgtgtgtttgtgtgtgtgtgtgtgtgtgtgtgttgtcttctggagacattctgtctttacaaagaactattattattattatttcttcttattgacttgattagctcagaaaactctcttaacaaggaacttcacaaccacagaatgttatgtaagtgttaggagctgatccacccatcactcatgatgtatgagagcttcctgacagaaaggaattatcttcctcactctgtcctacctgcagcttttgactcacaacttacgtgggcatattaaaaaatctttcttgagtcctttagacatttaaaattttaatatacctccttagaatacataaaatcgagaattaagaataaaatagcctcccccaaaataccattccctagcttcaatttttaaagcaagaatagtacatgtattcagagttacagcatgatcttggtgtcataaaagcaactcagattctggctttttgtttaaaagataaatactttcttttttttcatttcatttttcttttagctttcttattaaagacaacaccaagaacatgcaaaatcagacaaggcagcctaagaaacccatgtccaacatataattattatgtaaattcagtagtcaattcatggagactggggagttggctctgttgataaagtgctcataggtcacgatgaagccctgagttcagatcccaggctccaacccacaaagccaggtgtggtgatgcacacaccaatcatcaggaagaggtagaaacaagaacacgggtgttcactgcatacgtatagtctcactgaattggtgagctctaggtttggtgagactctaactcaaaaaagaaagcaataaaggaagacactcaacactaacctctaaactctacgagtgtatacacacacacacacacacacacacacacacacactcgttagctgtgagtttgaagcttgcttagggaaacgggtggtgggtggtggttttatcttgagtcgtgtgtctccggggcaatgcagagaagaccctgggtgttattaacctctgcagcaggcagcgagttagagtgcacggtaagggtttgacctgtttctttctgcacgtttgcctcagtgttcccctcatgcttcctgtctcagaccacggctgcatgattgtgaagctcggctcagaccctgcggccacggccacatggacggagaagcagacgagacgaggctgttgcaaaactgcagcccacagtttcacactctggctaatgcttctcgcacctgccattttaaaaagaaaagcagtcacctctgctggcagttgatttatgatgtttctttgtcacctttgaagccctgtgagaatgtcttggcttaggtttgtttttttttaatcagctttaaaatttattcatcttgtttattgcattagtcttgggaatgagtgaatactttagaattcttccaagcctgagcaatccttgtgattggcattggaaatgactggcaagtgaagacagggtagaggaactagggaaggaagagatgatacttgcatctcttctccatggcatctagcgtatttgtggagcatcttctggggaccgggaagtgccacactcacattagaacacagctctgcctcattccttctgctgtcaggatggcctcttaatcatggagtccctgccatcctgaacattagcccatttgcttccaacaaacttgtgtggccagtgtggttctcagtgtgcaaaaggtgaggcagtctggggacagtgatttcctctgacccaatgtaagataaatgacagagctgaactccagtcagagcaagtccaagatcttttcagaatatctatctgtccggaacagggaagcctaggttgaggggttccatctaatgggccatcttgctgctttgtaatagggtagtgttatcatacaaggaggtgggagacttacttaacagccttgataatgacagttgattgaaagacagagctcctgttaccttattattgagctccccatgccaacacttgcatcaagggttacattttccacatatgagcttcagtgagcacatcaacaccccagtacagcattccttagtgttctttctctactccaccccgaggagaactgactttggtggtggcatagggccaccttctgcagagtctcccatcttgtgatactttttttgcaaggtttcttatgggctcctcctttgacatgaagatcagcactcccttgggggcctaatgaacatgccattttgtgcctggaacagcttttctaccttggaagagtgacaggcaaactgtagtaatggaacttggcaatttgtgagatattttcctaaaaaaaaataaaaagaagagtggattgagtcagttacttcaaagagactattgcagatgtttggtgcccgccatcaaaacaaaacctttacaccacaattaggctttcagaaaaaaatttatctctgcctttttttctgtgtgtgaatgtgttgtttatagtaattcaaaatcatgaatttttgaaattgtgtaatgaaatatatcaacttttggaagagttacaggactcagtaaacacatatttttcaaaatgaccaatacaagatattccaataccataatcatgctgaaattgttagactgaccagtgtaaaagtatccagggctttatctcccacattggagcatttgttgagttttgatggatcaaagaagaatagccgtagttggtgggagggctgttaaagtgcttcccctttaaactcctctctgtgtgaggctggatttcgcttactctttaactagaaaaaacgctgtcgtggataaagtacaggaagagagggaagaaggaagctgctgctttcaagtcagtcatcatttaaatttttaaattataaaacaatgtgatcgtttaacgattgtttcattttgcagtacatagttgccttttgaaatgccatgttactatggaatggcttcttccttacagtcttgagtcaaggaagaaatgcttacactttgacgtttcaatccccaatgtgaccatattagtaaaatctatacaacccaaaactctcagagcaccagtagctttaaagtgtataaacgagtcctcaaacggaaaagagaaaaactttttataatttctaggttattgtccccaaagctcaccatttagtgggagaagacactggcagatgttcatttaggttcaattgaggactattaaaattttagatgctgtaagcaacaagctaatttagtcatgtttgtttgtttgtttgtttgtttgctttcagtgtccttgagtgggctcgaacttgttgcgtttttttaaaactataacattttgttattgttattactataagatacatattttcaaccagttgttccttacaagcctgctctcagaaaaataagctcaggaagagatgataccaaaacaatgccaagcttcaggtggtcggtcacaaggagagtgctgactgtctagctagggctgatggagacagcctggttacttctgagcaggtggtcagggctgtgagtgcaacaagctgccctgtgaaacctcggaaccctgctctgtgtgtgcatgggccactcgcctgttaactgcacactgctttgaaaacagagctctttgaaaaacaaacaaacaaacaaacaaacaaaaaaccggtccagctagtttcaggagggttttcaggctaatctttctaaactgaaattacaccgatgtcagattcttccagtggaaaaaaaaaagagttgagtagaacagaagttatttaatttttttgatagaaaaaattatttcttcaacgttttttctaattctatttcagtgttctctccagcagttctttgctttctgttcattttgttcaaaggaacgagatgtaacagaaggctcttcatttttctctgctcgttgtgtggatgcgatgttctctttctgaggtttcccaagcaacaccttgtgtcaagtggcaggcagagggcagaaggacacattccatgtccctctctcccctcctcctctaatcctgatcgtcagcatcataacttcctcatgggttctgaggcttgtgttctgggactcaactgcgtgctggatgactctagcaggacattggtgtagtggcctagggttgtaaaactctctctctctctctctctctctctctctctctctctctctctctctctctctttctctctctctttctctctttctctgtgtgtgtgtgtgtctgtgtgaatttatatttggctggctgcacagcacatgggattgagcaatacttctcaatgactactactccatcccgctcatcaagaggaggtctgttcatctgtccacccacctccccacctatccatccatacacagagtacttacataaaaaattatgtaattgatatatgtgtttacatacataatatactttataatagccctgttttgttctcagagcattcagactttggtgtgtgggcagactctagcaattagactttttaagatactgcaatttccttactctgtggaaaggcattggaagcagcgatgggattgtgtgtatgtggttctctgttcaggtggctagggagggcatagagcatcatttgagccactgaaggaaggaggaagggagtggtctgggaaacgggagccagagaatgagaagtgtaagtccttagaagggatatggcgactgagtgggacttgcagtagggaggggatgtagagaggcctgaggcctgcaatgctttgggtgtcctggttgttggcacacgatcagcactctgttaatgcctacttccatcttccagaaaattcccatatcacttaaatgtagctcactacagcatggttggtgcagcttcccactgggccacgtgaatatccacttgtaactttgggtagaggcccagagggcagaacgtgtcccctcttaccgtgatttcatgtactcggctaaaacaagagttttctcaagttctgaaaattctgtactggtttttcattgttccaagctaccccggaagccgtctaaccattccgagctactaactttattacagcttcctaacccctcaaagttcactttgcatggagcttgaatctgataggtaacaagtctgtgcactgcccagggtaattagctgtaatttagttttgagttatggctcattaaaaatgacttatttatgcaccccactgttcgaaaacacgggtcagaagattgaggctggagcctccgttcttatctccgagcgagccgtcatttgttgtgtagctttaatagatgtcggtggcgcatctttcccctgaagctctgcagctgtaaacaggcaggagcctggtgtggggagactcagtacctttgagaagcttaattcttcctgcattctgatgaagcttacagtttacctatgaatgtatccatcgccctctgagtcctctggcacagaatttagagtttaccaagtagtgaaaacaggaacttccaaaatatgaagtggcaagaggaaaacttgttccaaagtgatgggttccatttaaattttcggggggaaataggcctcagactgaatccaaatctttgaatacgacgcagaagcagccagttcgaacaaggcatctgcttggctgattcttggccttttttgtctgcctccattgtatactaaatcatctcatttgatcaaaggaaggtgttgacgatgggaagagttgccagttggaaaaccacataggagaaaatgcatagaggagtggattgctttggtgtcgtcctttaagagttgaccacggaccagccagatggttctgtgggtaaaacctgaagacctgagttcaacccccgagacccgtatggtggagggaaagagctgactgtgctggctaacagccctggaaatgcctgcaagctctcagtgctggtgtggggactcagtccagccttgaaagtgatacgatccaaatgtgagtatgagttctggctcagatgctatccaaggttagaccagaggcagtctacaaggaacagaaacaggcaggaaaaggtaacgttacgtgattccagttaaaattgctcccacactttttatagtacgtcctctaaaaacaggctcgattggtactctgtcttgaaaacaacagtgttttttttccaccctgtatttgtcagtgatctgtttacaatggcacccaggtactaattcttagaagccagaatggatcaaatatctcagcgtgtacctcccggcctgatctgaaagcatgataatgtcactgtcctggggaaggttaggtttgcaagattgtctcaggaggtcagtgtttctgactccagtgttgatcttttccttcatgttgatgggcccagtgccccagatttgccatgtctaggcttggctatgatctgagtgcttttctgtcagttttctgacctcctgcaccgagtacaagatctcacctattgggtagagactgttatggtatatctctcatactgagaaagggggaatggtgaggtttgcatggtgggccaggatagggagactgagagcatgttcttcagtgacccctttttaggctctgattgtgtaatttgcatatttaaatctccctgttggagacattttggtaatgagtacttagatcatgagtttaggtgtctatgacaacatactggctcttaactaagatgtagtggatagtgtctattctgtgggaggaaataactggctaggtaccctcatctcgtctcctggatacttgagccaaaggagcatacagcagttcctagagcagataatatcctctctcatcgtgggctttttgaaggattcataaagactgcagtttacactggaagggagccatactatttaacaaaaatattttgtaaacaacttagtagggatgatagcttcccctctttagggagagctgaggggacacccagcctgtgttgtagaagggtcacagtcaggagtatctggtttgtcaatcttttctacacctctctcccacgtgttccttgaaacgttccatttctacattcttgctctttgctggcttgatgcacagaagtggcctcccatacagctcgggataatatagttttactcttctgaggggctttgggtgggaagaagtgataaaggaatctctttcattcttttgtttgaccccagaaaataagtcctgctttcaggtggaccttttaaaatgggtttgcttttagacatattaacgatccagtataaccgtataacaggtcaaacgagctaattaccagccttttacttaataatggtgacaaccccctacccatggatggctgttgtggggggtgtctctactacgctggatatgtggggtgggtggctagaagccattagctttagatcagataaaccagttctgccacacgcaggtagctgagtgactttgagcaatggttgccttgtgtatggaccaggggcctaatgatccccacccctaggattgctgcgaaggtttcgggagattatgcacaggagcacacacccacagtgttacattagggtctgatgcagcgtgtggaccccacccacttgtaaggaaatccataacccatttacttctaggttcttggtgaatcatgaaaaaggcactggaaaataatatgatgacataaaccctgtttctcagccattgtttcaaattctaggcagcaactgaatgtcacaggatgtatgtcagagcggggtggggaaggtgcaggaaggttcattctccagctgcctcaccagctttcagccctacagctggaatgtatattgcctctagatccacccattagacttgagtctctccttccccgaggcactgccctaaggtctggctaatgccaggggctgctgactggcttctggggagcagctctactttgaatggtatagacaaaccctagctgtaagtatccctagtgctgttctgagggagtgtttagacttgagctttaaggtgatcagagaaccagagagttgtcatctcagggagttgctgtctggggtctctttgcaaagcattcccacactagctgcattcttcagtataaaggaatacagtgtgtaccttctccctgctctcttaagatgaatacattcatcaatatttacaggacatttctaagtcccagaaacaagatttaagagattgaataagacctgaccaagggagtggccactgacttggttattaggtcacaagtagatgggattgactcattctttgtacttatttttttttatggcctttggtctttcccccaaatatttgtcctcttttattaaattaattctcatttttaaggtaaaatatgccgagtgtttgtggttttaacctgacaggctttgttgtcctcaagttaccagataacatctttagcttgagtcctcaagctggttttgtttgcttgctggcttgttttgtttagggcttaaccaccacccaggtcctttgtaaattaaaggtggtaacaagctccagagaaaatgcattgaggaatccggaacttgcataattgattaatatacactatgcaaattttgtaggcaaaatgttaattttattacatgcaaaaggggaaagatgcctgtttctttctaatctgctctgtgctttgtgggtatgtgggtgtggggtcatatatgtgggactatggaggctcgtttgctgcagtgtacaaatctcataaatgtgtattcaaggcccttttcattgagggctgctgggaagtcctgctgccaggagagaatggagtctatctcagggtatttgtttcttggtatttctggcttgtggagtatggggaggttgactttcatctctccattggattcttgggagccatgttttctttgtccaagagtttctgtttgctagttcaaagaaaagagtcatctgtggcccgtgtgcctgactttttcttctggctgtggaagacacagatgagggcagccatcagggccggctctcttagtggtcaccctcaccctcactacttctgtcagcttgcacttgtgacaatgactggtatacttggctaattctaacccacatggcgtcctgaagcttgcatgaccacatagatacattttagtggagagtgatagcaaagatacagggaagagaatgggatgtgatgggtgccatctctccgatctactgtcagttgggtagctaactctcctggagcaaagagcagcagagcccaccagggacagcatcctagtgacctcttagacacatgtagaaccacgtgacagagggtatcattcctgggcagggggctgagccacccttggggctgccttcctcatgcccatggtttacgcattgctctgctcatatctggtgccacctcaagtgactaacattgcaggtgtcaatggttgtgtagtaggaaatagagtaattattttctctctctttctcccccccgacacacacagagaaacagagagacagagacagacagacagacagacagacagacatcttgtggaatctcttacttcagaatgatcagtgggtaaaactagagagttatcaattcaggaggccactcccagctaataaaacatggatttatcaggcctttaaagctggtgggataggtagtcctcggaatactcaagggggcttttacagttactcaagattttgtaacaaggatagaatttactcagctcgaacataacaaaatatggataaaataaatgaaaaatgggtttttaatacactagctacccgacaagagaaatgggaaacatataaaatttatgtattaaaaatgccttgaactgggtgatggtgagacaggcctttaatcccagtattcaggaggcagaggcaggtggatctctgagtttgaggccagcctggtctacagagtgagttccagcatagccagggctacatagagaaaaaccctgtttggaaaaactgaaaacagaaccaagaaagctccctgagctaggtgtgcagttgtgttggtgttgacacacagcttgcctggaatgtgttaggtgtaggtttgattccccagaagcacaaacagaacaaaaggaaagaaattcagatgtagggccttgattcattatccagcgggggtcatgaacctgcactgagagtttcagattgtaggaagaagaaaggtgaggcacctgggtgcctctgttcagggtcacaaggataagacttcggggtagggagggagggagagagagagagggatgagggannnnnnnnnnnnnnnnnnnnnnnnnnnnnnnnnnnnnnnnnnnnnnnnnnnnnnnnnnnnnnnnnnnnnnnnnnnnnnnnnnnnnnnnnnnnnnnnnnnnnnnnnnnnnnnnnnnnnnnnnnnnnnnnnnnnnnnnnnnnnnnnnnnnnnnnnnnnnnnnnnnnnnnnnnnnnnnnnnnnnnnnnnnnnnnnnnnnnnnnnnnnnnnnnnnnnnnnnnnnnnnnnnnnnnnnnnnnnnnnnnnnnnnnnnnnnnnnnnnnnnnnnnnnnnnnnnnnnnnnnnnnnnnnnnnnnnnnnnnnnnnnnnnnnnnnnnnnnnnnnnnnnnnnnnnnnnnnnnnnnnnnnnnnnnnnnnnnnnnnnnnnnnnnnnnnnnnnnnnnnnnnnnnnnnnnnnnnnnnnnnnnnnnnnnnnnnntaggagggggcaggggactcatcttaaaggatcagaaatgattttgtctggtgcccacacaggaccagaaataaaacctatacctaccactaagacctgtaaaccagaggaaagaggctttggggcacagggctgggcatgcagaaagtagacaggtcttgtcttcctggtggaggataactagccctgagtgaatctgcaccagtctacctagcaaatcttaaaagcaagatctgatggtatcaagctatttccaagtaccttaactgggtcacagatgaaactgaaaatgtacggtgaagccatctagcactcagttggcaaaaattcacattgtctggcattcaatcaaaattcaacaggccaagaagcaagaaggtattacccacaccgagagcaattaatttgaaactgactcagaatgcagaccatagaattgacagacaggatggttaatgcattgataactgtattccccatgtttaaaatgttaattgcaaatgtggaagatttttttaaaagtccccagttgcatctcaaaccatccccttgggagctcttgaagaggtcactgaggagagtgacactgcctggtccaggaagcactcgtcacccaccatcttacgacactgatgctcgtcatgcctgctctctcagagtcctgccctctgacatctacactctgaattttgagggtccttctggagccctgtagctctctcttgcttagatctccgggtgtctacgcctttggtcagtgttcttcaagggtcagatctcagctcccgtccctgtcattcagagtccaccggctctcctctggccatggattgtactctattctccattccttcatctgtgtctgtggcctgggtctcctgagtcctagctctagtcaggtactgcgcactcctacctgcattcatcctttcacttagcaagcacacatctcccatccctatgtttatttgagtataacatgcagcatgtggtggaggaaagtatccctccacactcccagacccctcttctaccaacctcctccctcttctgcccccccaaaacagttttgtgtccttgactagtttttctgtttccttccccaatttctgcccatctctctgtcttatgacttgccccgcctccttgctcagggaacgtctgtggtaccacattccaattctgttctccccgtgacccttggtttcatcacctcagactccgcctagtcgccctgtttctgtcattgcttccttccgggatgccaaagcttcaacagtgaacacaagtatttccccacccaatgttttgtattctcagctaagttaatagctggttgagtgccctgtacccctcccctccctaacatggtgatatgtgtctaaagaagaccaagaggaggcgagggagcaatggctcttgtcatttcccctttaacaagctgctgcagtggctgctctcctccctgctcatgctgtattgtcctctcagaggttatgtatttggggattttattcagccagataaatgctgaggaagagagttggtcttgagtgagggtgtgtaatctccaatcagtcaggaaagactcagcatgtttgtatggctctattgacagtacttgctttagactgtgctgtgcaaattctttctttctctttggctaccagatcccttaacgccatactgggtcagctttataactttcctatcaccctcctttaaaataaaaatgattctgattgcagtaggatgcacataacatgaaaggtaccacctcataaatgtagggctcagtggtattgagttcattcgctctgcgtgcaaccactctgtccatattctgagaccttgtcctactgcaaaattgaacctgagtgtcagctcaacaccagttcctctgtcccctgacagccaccatgtaaccttctgtcttaggctttcactatgctaagcacctcacatacgcgccatcttacagtatctttccattctttctagccttcttttcccaccacatagtataccccaaagtcagccacattgtattatgtgccagaattgtgactttacccaaagatatccactatctctccataattttgcttacctagtcttctgccagcacacactgttactcacctttagttttaaaatgtgttcgtactattaagcttgaaccttgtgcattttgaaaatttgcctcagactaagtggacactttcttagctcaccacctctaacttggctcagctgcttggagtgaagaagaggccgaggtctcgtcctgagatctggttccccttaccatctctccacattttctttcttctgttccctccccacttgccccggaagaattctcttagagtttccctcttggagtcatttctcctccaaagctctgcctgcctccaggactgacagcccttctttcctctggcgtattctgactctgaagacatggagcagaaatggaagtgttctcatctccaagaagttcccagaagagaaggctctgagagctttatagtggggtactgggccctaagattctgggacaagaggaaaagtccacccaatatctgtgggaagccacatgtgccgttgctgagtggcactgactactgctggccaccatgcataagattggacaaacaaccaatgtgtacatatgcagtaaagttttttgcaaaaacactgcctggcccaggcatgataatgaggttctgtaaggtactgagagtataaccaatcggatgtgagacatgcaaatgaggtatgataatgaggctcagtgaggtactgagagagagtagccaatcagatgaggaacatgcaaatgaggcttagtgcataaccaatcagggtatgagacacgcctctcctaggcctataaaagcagcaccagctctgggcaaaaagtcttttcgcctctacaatcaagctctcccaataaacgtgtgcagaaggatcctgttgcagcgtcgttcttgctggtcgagtcgagcgcgcgcaagaaatatcctgctacgtttaaactaaaaaggacctagtagcttcctatgccctgtttagggtttgcccagaaattcttccattttccccttctcatgtctaccatacttggacatgaggtgttgggattttaaaccctttattaatctctgcaggtggcttcaccctctataggagccagcctcttccttatacatgggcttctttgaaagggtttttgtcaggctatctgaaccccacagtgctttagcaaatagaatctttattactccccccttgggcagccttccctgatgtctcattctcagtggatgggaagtgcttcattcctaaggccgagggaacaaatccacacaaagtggcttcgctgctttgaaccctttgattaggagaaccaccactaaattccccagagccccgcagaaacatctttcttggttaccaataatatacccaacctagtaacagaattcagagaattgaggaaggaaattaatgaggtccaagtgaggctggagaggtggttcagtgaataagagctctggctgctcttccagagaacttgggggttgattcccagcacccacgccatagctcacaatcatctgtaactctagctctaggtgttctggtgccatcttttagtctccatgtgtgccaggcatgcatacggtgcacagataatgcatgcaagcaaaacactcatgcacattatggtggtggtggtggtggttgttgttttgtaaaattaggaaaagtgtgtaagcaatagatgtgttgatgcttgattgactgggatagtcagatacttttataagaaggtctccctctgcctcagaagttctggaggaggggaggagggaaggaaaaaaagtggggccagtggggaaaaaggccgaggaggaagtgaacagttatcttgtgtcttataggccaagaccatgcatccactcaatattctactcccatatgccaatgttatggcaccagctgtgtcctggtaataaaacaatgaatgggacagtatttgtattttcagacagttcacagactcaagcagaaagccatgtgaattacttctgtgcgtgccatgtgatgcttactctgcctggagaggtaccacagctttgacagacacagtgactggcatctagtcggaagggctttgaggctgcagtgtgtgtatgtgagtttcatatacacgcctctaaggactgatgtggaagctgtgcttcttggctggatgtgtaaagtcaaggccgtttgatgggctgattaaacttgaaaagggagagtgtgccttctgccacctcaaaggcagctgtttattgaatttctccaccctgtgattgttttgagtatggaaagcttcctggaggaagacctaacagccgcacaggtctgtcctgttctttgactgtgtttactgaagtgacttctgggcttgtgttcttacaatgcagccttcacgtacagtgtgagagagaaaaaaaactgcagtatagatttagtagatcatactctgaagcatattttgtgtctgacagatcaggcttttattccccatgatctgggcatgagcttatatcctcatgacagagagtcagatgtgtcannnnnnnnnnnnnnnnnnnnnnnnnnnnnnnnnngggatggaagatgaagggggcttacaggaatgtgctgtggagctgtgcattctgtaagggccagcctatccatggctgagtgttacttccttgtgccaaaaatgtacctcagagaacctcaggatagcaagaagcatttgtgaaggagaaggctggctgtattccctccccttgaccccagaatcagaattcctcttgtgtgtttatttttggtaccaaaaggtgccggttaacccctgggattaactagaaccagtaaacagtaaatagcagtgactggaaaagtgtcttggagaccgaagagcaaggacattaacactgcagctcaggcagtgttccatcttgagcattaggctccaccccttcctaacttcccattgtggtttcaaatgaagaagccattgttcaccttccttcctaaaagaagcaatatatttaacttctgactctctgccagactgacagagaactaagctctgtgaaggccacacccatggcttcccacccgcacaaacaggctgcccctgtctgctttctctgctgattttcaaggggtctcagctggaggtttgctgctgtgtgctccatggtggctgcagggcccttgattctcccaaccagtggtgaattgagcgggacaaaagacagactcttagctctttataacagcttttgattcgcctttaaaagcaagcgtctgatgtgaaaatccgtgctatttctgcactttaaagcccctcacaaaggaccaaccctttgttgaatagtttggagttcatgcaggtgtcctagagcagaagttttcatttatttttaagcaacaaataccttttccctcaaaggaaggtctccagagcacaagtgctgtggggtttctcgcgttctctatgctcactgccggtgggactgtgctctgcacagtgggctgcctgccagcttccctggcctgtgcccacttgatgccagccacatgcatgctctgctattattgtggcaatcagaaaaatgtctctaaatatgataaaagtccccagaggaattacaaagtccttcttgcttgaggcccaatacaatatggttcatgagactggttttcaaaaggaaggaatccaggtactagtggtgggattaggcccccatctgagagctctgcccagggtcccctgacggatggtttagagatctctgggtgttccagagcagggcagattacaactgttaaaacctgggcccagagagcctattgctaacaaagcaaaacaactgaactaggcagatgcataggtgtcttgaacctctgtacatgagacgcttgtgtgtgtatactctacatgtgtacctggggggacttaataaaggaaaaggaggtggctgggtgatgtctgccaggctccatagcattatggtttagctaccacagtttgccttgaccctgccttcccatcttgtgcatgcagtgtgtgtgtgtgtgtgtgtgtgtgtgtgtgtgtatttggtatttgtgtgagctcgtgtgcacttcagaggccagatgaagactttgggcttctgcccttattcccttgagaccctgtcttttgctgaacctggaacttactgctttcctgttacgctgtcagccagcaagctccagagagccttccgtctccccctcctcccctgggcttccaggtgttcatggccctaccttgctttttgtcactaaatgggtaccaggtatttaaattcaggtccttgtacttgctcagctagtgctcttgtccatcgaatccccttcccagcccccagtttgccaggcatgccagcctcaaacacatggctcccagcacgtgtgaatacagttggcccttagaggcatcaaactccagctcctatgaggcttagcaggactagttctgctcccggggtttcatggatggtctgtcttttgtggcctcttttgattagtctcaccagatttcagatcggaccagagttgttccaaagtcataacatgggtttttgtaccaagtaacacatccttgtgtgtatgggctaggtctagagcagtggttctcaaccctttaatacagttcctcaagttgtggtgactcccaaccataaaatgatttcattgctgcttcataactgtaattttggtagtgttatgaatcatggtgtaaatatctgatatgcggggtatctgatgtgcagcccccatgagggttgtgacccacaggttgagaactgcttgcggctcctgaagctaggtgctgttttctcccagcccctttgagcatgggtctcagggggaactctgggaatttggcacacacctctccacccctgctatgcaaactaaggccgagaaagcattgtcatggtctcttctccagacagaaactggaccttgcaaagtccaaaaccaattccactaagtgagccacttgtcactgggaaaagacaggctgggaacaggaggaagggagaggggattggctgcttagagcatctctgtcaatctgtctcccaagcaaactcagtccaaccctacttggcagcatgaactcaaccttaaatcagtggccagctgctgcgggtcttaaggatgtgcccctcatgctaatgattggtccggctgcaggtgaaggtctcgtgttcggctggcagcgtttcagttttctgaaagaccacatgaccacagcagttagcctgcagatgggagaaccaagaactgactctgtgtggccatctgtggctctactgagaaacccactcccttgggtcccgcagaggcaggcttcccattcctggaagagccagagatagcatgctgccggtgttggcagtcccttcctgctgtcttagattgccagaaagaagctcacatgcatagcttaggttggaacacaagcaaaagacctgacctctctcaccttcaactgcagttccctctggcacttgatggagggagaaggttgcaggtataaaaccaaacctgatctgagttttgaaggcatttgattggcttacatctccagtgtggatcgttgctatgagatgagttacctaaccaggaggactgaacgagactcagcaaaggttatcgctgctcctgttagtttttagtagtcatcatctagcggttgaaagagtggagttccagggggaactctaagctctgtcttccgtgtaaggagtagcgttctgagggtacatctctctcccatggttccctgtaagggatgccatttcctgagttttgcataccggtcacttcttatcaaaatgtgtagttagttttaggtgatactgatagaagcacaacagttggactaatattactaagttaattggaagctgagcgtagtgggctaaccccgtaatttgagaggctttggcagaaggactggaagtctaaagccagcctaggctacataatgaggctttgtataaaaatcaaagacccagctgggtttggtggcacacacctttaatcccacccctggggaagcaggtagatctttgtgtttgagaccagcctggtctttactgtaagttccaggacagcgagtgtgccacatagtaaaaccttaaaagacagcaaaacagaacaacacaaacacacaaacaaaaatgcagcagggattgaatgcatttggttgtagttgcagagagtattcctacattttttttccttaacctaatacacacgaaaacaattacacatgatcttgcctactcatttctaatcagccttttcacaatggcctttccttggcctcaccttgccagcacttggacaataggggagtttgctgtagagatctgtcaggcctccctgtgacctgggaagccttacacttctctctctggtcccaacctgaagctggctccttgtaaaactctcatacttacatgtctatcatacatgctccagtctggtcagagcacaaggcgtgtaaggacctaactgtgttaggctcttttacactctcactcccattgactgcctcacgcaagcatggattcattcactcacccattcactcccgcctgagtgtactgtggacaccaggcatgcatctctctgcccctccccccacttctaggctgagcagtgtgctgctgctgcttaaggagggtggtggccttgcttctgtgggagctgtgaggagggcagtcacactcagactgaaagttctcaaaccccgaggcctctctgaagttggtcacttgaattagcaagcagggtgggagagtaaggagaagtaaggatggcagtggtcagagctgatatggactacagggctggccaggctgggtgagcaataaggtctgattataacacggcctgctgcagatacacagttttgaagatttttgtccaaggcctgaaaagcagtcatttgctgtaggagtttggcgggatgcaggttgctgaaaaaccctgttcctactgacaccccaaaactttagatccaattcaggcatcacctactccaaatatgttgaggattcctggacagttcttgtgcttcttctcatgtctcctagcacactggccacatagaccggagataagacgacaattgcttttatactttttctgtttactgacttgtgtgtccttcctgctggacctctggttctcagcacgtaacatgcagattcttggtcacacctcgaatgggctcactgagaggttgagtctcaggatctctggtcactggcagacacattacagtaagctgggagcttattgaaggccctgctctttacaagtgtgtacacacatgagcatgtgcacacacacacacaggagctcctgtgctttctcttattcacactccatacacatttctgatggacaaggtgtgtatgcaccaagcatttgttttccaggctacaaagggtgttggtgtgaagctgcctacatctctgggtgaaaatgtgttagagtgtaaggttcacagatggctccagtggcaggctccttctcagcatcattgtgctgtcaggatggcccttaggaaacaagaagtccctttggagtatagcatccagggacacaggaatgagataagagctcttgaaattgcattttatagtttttaatagcacttaagtataatccacagagacactattcatggtagtcagacagtctctgatacagatgtcgtcgggaggatgcaaacccataacatttaggtcttgcctgcaagagtgttgtcatcttgcagggctaaaggcaaaaatacacaggtaactgaatgcacacacacagagtgtaaaggctgcacagagcactccctcagcacgggagagcattagaactgaggagagacacaggaagaactggaaagagtgtgatgggctgtgaagctctgcagaggcctgagggtgaggaagtactttgtgaggtttagttttgggaaggtgagaagccatggcaggtgagtgtgtggtaagtagaagcccagcaggagatgggcattaagcaatgagcacaccacaagtttgagactgtcttttagaaggggatgctgggctaggtttggaaactaaacagcttccttgtcttagttaattttctattgctgtgataagatgctgttattgaagcaacttagagaacagtttatttggggcttacagcttcagaggcttagagtctgtcttagttaggcagcaatgtggcagtataccggcaggcatggtgcagaaggagctgagagatctacatcttcatatgaaggctaatagcagaatactggcttctgggcagctaggatgagggtcttcaattccatgcccatggtgacatacctattccaacaaggccacgtcttctaatagtgccactccctgggccaagcatatataaaccatgacagagtccttgatcattatggtggggagcatggcagcaggcaggtaggcatggtgctggagcagtagctgggagagttgagacatgaccatgaggcagagagagagagagagagagagagagagagagagagagagagagagagagagagagcacacgtgcatgggagagtgagatatcaaagcccacacccactgacatacctctttcaacaaggacacaccccctaatccttcccaaacagcgctatcatctggggaccaaatagtcattgagccccttgctttctcctttgagccagcacaggtcctaaatgaaaggccacacgtgccacatttaggaatttaagcctattatccttgatcccaggtccaggaacttagcaaaactgagtgattttttttttttttcatctaaggcagtccccatgtcgtcctctttctggagaggctacccttgacccccaggccaatagaaagcagcccatggagcaactgggatagtttcatttgtgtgttgttgtagttgttgttcagggaaggtttacatatccctgcctctgcatgcacccacactgccactctgacacagtccctgttgtgctggtctgtgccagccccttccatgaaaacatccaaacagacgaaactgtgatcatcttagttactgattctgatgacagttctcaagctgccaggcgcatggctgagataaagcttacagattgcacccacccgaagctgtagaagcaagactggacagatccctccacccacactgccttgcatgagggggtctcctctgaatagcccttcaactgggggaaagcctcttttgtttcacatagcagtttattctgtgtggagcccagttgtgttttgtgtttgctgcagatagggaagggtgacagtcccctgtcgctcatcctgttaggtggagagtctgtagcttattttaaagtagtttctgttcagaatgtcttctcttcagtggccgtgtgaagcaatccatacctttgtcaacagaggaattttatcagaagaaaacatggaaagtttttgtgtgacagtattggactctttcccttctggtgagtcagggcatgatcctgatggaagtggatgaggaagtggggacgtgcaggcccttgttggggacgtgcgggtccttgtggagagcagaggcagcttccctctggaagtctcattttatggccggacctcagaacccacctttgctctgatgtgagcagacagtgctgtttatgacggactcttcccaaaggtcgattgatacatgatcagtgcaattttgacatctgtgttcatctctaagttggccctgacacactaagtctttcagaggcaggtctcagtttggataagggagacatttcggtgtctgtgaggcacggaagatagtccagtccctactggtgtggttctgggagtcagtggttacctacatgactaaattgttgttaaaaatgtctttcttttttttttccccttttctaccttgctttttctatgtgcctttaaacctctttggagaaggaggcagaccagctttcagaagctatggtttcatccttttattgcttagatattttaagagaccctgaatggggtggttcatgtcccattgtggtattcaaggccaaaggttaaaactgttctctttttacttttaaacacagggtctcatgtcagctaagcgagctctctcccaccgagctgtgttcccagccttctttttacctttttggacataaggtctggctaaactgcctctgctggccttgaactccttctactgctcaggcaggccttgaacttttgctcattataacagattgagaggacacaaaaccataaaatttagttctgacctgcaagacattaaaaaaaaaatctttaagaacaaaaggcacacaaaatacacaggcagctgaatgtgtgcaagagtttgaggggggggggcatggttgcctgccccagcagccctaggaacccttggggttcaaggaggtctgtgccaccaaatttgactaaaacaaggttcttaaagggagcagagctaaagcaagatggaattatctcttaattattttagaacccacccctccagttttacaggagtttccagttagtctgggggattgatggaaacacagaaagccatattccttgtgggtcacatgaagccgctcctattttcttgttcagtacaaatactagactgaaggcaagcgtgagggccaggaagagcaccgtcgtctctgtgtccttgcatcgggtaactctgtttacattaagtctgtaagctttgagtgacagctcagataggagcttggagaaccgagtcaactctgtttctcacggcacatggtagctgtttgtaaatgcttgacattcagagggcccgagttcctctgttgtttttgatctctgtcatcaaagatgaagttgaatattttttcaaggcagtctgtacaatagcttagtgcctccttccagaacaaaggcaagtggtcacacccagagttgctccttgcagagcctctggggtcctggaatgtgtgtcccctggactctgccacagttgactagctacagtgacagttgctacagtcagggctatgtccgttaattaggaacttgataatgaggctaacaagattcatccgaaagaggccaggaaaatgaaaaggctgtgcttgtgtgctggaactatgaatagagaaagaatcggtgtcatttggattattttttaagacattgaaatgttacatcttatgctgtgctttcttgtttaatgagaagttttataaaaaaaaaccaacaaccttattctatatattttggctcaaataatcttatatttgtgggaatttaaaactcagtataggttttattgcttcctttccatgcataaacgaagagtagacacactctcttacttttctgctacctttacgttcagtctgtgtgtcttagccaggcagtattcagttgaattctatggaaccaatgtaatgacatatttcttctctcaataggaaaaaaaaaacccactagattctttaagaaaaaaaaaaagttcccacggaagttattgttcaaatgaaagagaactgcttctttagatttgaatagacatttttgtctgatgaagaactactaaatacatgctcaatgtgcctaggaattagggaagtactaattaagaacatgctatgacagtgccataacacaagacgatgacgatactcacaacaccaaatcttcctgagactgggacgtgctagactttttcacagcgaggttgcaataaaacaaaaacaaaaacaaaaacaaaacaaaacaaatcaaaaaaaccggtacagccatggtttctccaggagcaagcagagatctgccccatgaactggcaattcttgtcttagaggaatgaaagcaaatctccttgaattagaaactgccaagccgtggtgcgcttcggaactagaatgagtgtgagctcagcatccgtagcatcttcttcagggagttccaggtgggcgctgagacagtactcggcccttctcttctcagaccctctgcactaaacactatttacatgataagcaaatgttgtcccctgctatgcaataaatacagataccataccaatatattcttctggtgaaaccggcctgtttccattatgcggtcacatctggtccatcgtagtagtattttcaggtattcaggtgctctgcatttcttgtgcttagtgttttgctttgaattagatcaagaatcttcctaccagtatattttactaattccattccccttgtctctgctggtttgtagaagagaagctctctgtgaaaggttatgcatggaatcctgacatgtctgcaatgaattctaaggttcagtactgcaggccccacttagagcagtggaatgggcttagttagtctgcctctttctcctgacttatatgcaagtgtttggttgtaaatttttgtcttttgaagtcttgttagctatcattgctacctttctctatctttgtttatatctacctacatatttatcattttagatcaccatttttaaggcacatggatctctgaggaccttcttcctcattttgaagtgtttacagagtaaaggtcatcttgacttcaccctcattctttgaagctagtttcgctagttacaaagactcttaggaatgaggaaaaaaaagaacaccaaccccccccccccaatcacttagctcagccttttctgtttctagggaactctagtggtaactcagctcagaggcaacaagtaactggtatagggttccttatgcccacaagatagcttcgtccagagtattgcctctgttcaacgttgtaacttcataccaggactctcaacgtttgtccttttatccaatgggattagggtttctcttgctatgataaaacaccatgaccaaaagcaacttggggaggaaaggattatttcatccagggaagtcagggcaggaactcaaagcagtaacccagagacggactgaagcagaggccatggaggagtgttgcttactggcttggtcctcaaggcttgtccagcctgctttcttatactatcctgtacagccttcccaaggctagctctgctgccagtgagttgggcccacccacactaatctcttcttacacttgtaagtggtcctgagctttgagcatgtaaggtgcttcatgtctcttgcatagtttgtttttccaaataggaagtagtatatccctgctctgctctggggtcaatgacctctccagccttgggtagctggctaggttgaggactagacatgagttcccttggaccttacttaagttcaatttagacagctgttgcttgcgtccaaggtgctactattgcacctccgggcctatcttgctgcactgtcataggctttacaggtaagtaggactactgactgcttttctcctttgtcagcttgtgcagccccttcagatgccacgagagctgaagttctcaaagctcctactcagtgccatagattaagttaaggtaataatagagaaagacccttttcaattaactttagttggatccatttctggtagcactgaataaagaacactgggtcacagaggagggagtttcatccaaacacctattttcattagaagttaaaagcccccatcaaacctttatttataccacaaacccaagatacaagcatgcttaattcttaaaatcttttaaacttaatctggttattgtttcattcaaggaataatctaattgttaagcgacagcaaaagccccagttcggcaaccaagatgtatgcttttaatttttttagcctctcagagggagtgaccaaataatataaatgacattggattaaaggaagcatctatttgcctgttcttttttttttaatgatgatgatgatgataaagaagaagaagaagaagaagaagaagaagaagaagaagaagaagaagaagaagaagaagaagaagaagaagaaaagtaactcatgtttaaatctctcacgagtgttgcagggagttgactgtgatctccctactttcaatgtaaggctttgcatcagtttgactccagtgaacagggtaggttgttttttttgtttttttgtttttgtttgtttttttttgtttttttagtcatggtgggtcagccatgggaggcagtgaagttggagaagtggaatttccagcagtggaactggagaaggaagtgacttggcagctgtctccatggctcatgcccagtagggttctctaaatcctctgcccagaacttaggagctcggaaaggactttaggaagccaccagtggaaaaggagaggggtggggggcggggggggggggaatgaaagggaaatggaataagccaaacgaaggggcaggaaacacatgtttatctggaaaagatttgggttggatactttgtttgtgtaagaatcttttttgtgtgtgaggaaggaagaccaacctggggttggaggctgaggtgggggtggaacgagtccctaagcttcaagtaaaagagagaaacagattctaggcaagagaagcctagcttccacgggagggctgtgctcagactctcgagtcatgtctgttgcgatatgtacttgttggataagagatgatgggtccctggtagcttcagtattaatactagccattaaagaaaaatgtggagagactggggtgagggctaaaaagcagttagggcagcacttcagggcgtgtgtgacaccattaatttaagactgtgtctatgtcatgtatgtacttggcatgtttgcgaaggcatttggtggctatttgtatagtaaggattaggatgactttatttttttttaattttatatctttatctgttttcattttatgtttgcctacacatgtgtctgtttgtctagtgtgtgcctgatctctgtttaggcagaggaggacatcagatcccttgtaacagggcttacaggaggctggaagctactgtgtgggtgctgggaatctccaaccgtataggtgttgtttagacaacctcctcctctcccccttttaagacagtatctcactatgtagctctggctgtcctggaattcactatgtagatcaggctggcctgcctctgcctccctagtgctgggattaaagatgtgtgccaccaaacctggctttagggtaattttttttaatagtctttgaatcgtgtgcatttcccatagtgatatctttctaaacaagaacgacaacaatgaacaaagtgtgattcacttctatacaatgtttaaaaagttgtcaggacaggagtttgtgaagggtcatcctctctcagtgaagttttgtaacaaaagacaagaaaaatacccagataattgaaaaatgtttacattttgagcaaataaaaccagcatagggtaatctaacttgagcccaagatgacgtactatgctattttgagaactttctagataaaataatactgagagtaacagtgagatgtgcccctaaatgagccattccagacttgatggaagagaaactttcccatgtcattctgaaacctagtggtaatccagtgaagaattttctttttcaaataggaaggccagagaaggggtaatggcacatttacttatgggtgagataaattcagggaaaatgaagtatttatagaatcacaataagaaggtaggaaattttaatatttttttatgacaagaaccgtaggattcttacacttggtaataaaagacagaaggtaatgtatatggttcaatcatttgtgcagaagcagtgtgtatcatagtcattgaaagttatctttgggaaaatattctagttaaagtccatttcacaaagagtttaaagaagcatatagaatatgcacataaattatatataatatatgcacatataccatatgtatatataatataccacatatatgtgtgtgaatatatgactatatatcacatacctgtgatatatataatatatgtaatagaaaaatataaagaaatcaggagtaagctagcaatttgttcctggattttctggatatattcccttttaccagaaagaaactggaactgctggttagttagtgaacttccagtggcatgtgccagccagagagcagaaacctaatttcttcatctctcctcattacattgtgattccccacaacgtgtggagcctcagatgcccagcatggaaacctgttagtagtgcatactttgtgggctccctttccctctgtatcttgttcctgcagtcttctcttgttctgggaattctttcccaagtgacctccagttgcctcttgatacttgcaagaggttattggctttaggattcctcacagatatcaaagtcgaggtaacaactaagtctctgtatatgaaatgcatagtatttgcatatcatgtatattttaaataacctctatattactcataatattaaatacaatgcaaatatgatgtacttgctatgctatgatgcaagagtgtgtgcttgttcaatagtgatgcatttaagaaagtcttcttgatctgaggttgcttgaatttgagtatttggaaagtacagggctgatggcacttgccatttaagtcctggtctcgagctctgtgcctatgatggtagatactgacagaacaaagcaagaacaagcaaacagccagcaaaggctctgaagacatcaccgggaatctttggatgactccaaggataaaggaactgttactgctgaggacagtgacagtgttgagggaagttcagtctgataaatgtcaagttttacgaaacttagagatatagtgaggggagggatgctaagtagccacagagaagatgtagctagagtgtacatttgggggtcgtcagtctctaagcaactgtgagaagccaagggaacggagcaagtatgagttgctacagagatgaatgggcatccagagagcccagaagtctgatctcccatgaaggagactgagacctgtacaatgagagcaactgggggtgagggtggagcagagcttcttctacaaggcctgagaggcacgggcttgtactttggagttgtgttagatccctgaagtgaggaaggaaaggagatgaggaggaggaggggttaggaggtgagggtgtcttctcaaccctggcgagaggttttcctcatggctcttaatagaactttggtgccgttccggattgccacagttagttaagttctgacctgcttcctgctaccaaggaatgcttcgatgacagcgagtcccctcgccagtgcagctcaggagagacagtcccgtaacaagctagctgcttctccatcctccctttgcactggtagccggcctgtctggctctcagcctgctgagtctttgtcgttctcggagggaggcgggtcctttggagacctggatgcagcttcctgagagccagcgttagacaaggagtccaatggcatcatctgaatctggaagttgctgtgggtcgtacagttaaactcctttggatgacttagaagactctgtgcttttcaatacctctgctggggctttgctgccatttaaaaaggcatagacttccgtgccatgttgggcattggcagtgatggaagttcctggaacttggacactaccttaattcagcaaattcgcatccctctcctctaagcaattgttagactcagcagcacctttatgcagcacaccggaggacaacatatgcatctcccatgattccttcttcgcttacctcctaccgaaggctcccacccagggtggtatatacttgtaaagactcacttaaatgtgtgctttgtacacatctagcctgtctctgttcataccagcattgcttcaagcaaggatcacccatcttcatgtgcatcgtgtttcctgtaaagagccctgtgatcagacagtggcttattctgtgagtgtagtaacatggtggaaagtgctcctgttttgtcccattcccttccagagatgtgtcgtgggagcatccgggacatttggttaattggccaaccctaaggtttcctggtttgttttactcatgattgttttctcccatctactacaaatgataaaaaacaactttctcaatagaataaaaaaagagagatagagcgagagaaagacatgggttcatgggttggtgtcactctgtagtttgacggcagaaaccagaatctggcctcttctctgatgtcactgactgcctgaccccacttaaccttcctgttagtttctgagtttccagaaaatgtattacttcccagagatatcaggaaactccgagaacgaagagcacacagagaaagaaagttaggaaacgtgagcgagcattgctctcgccccttggcagaacgcacccaaagcatttttcaaataaaacctcacatcagcttagtgagacaaacaacttctgagggcgccgacgttaccttttttgaggtaaagttaaagctgatttaaagagagatcagagctccatgttgcctcggtggagcctcacgtgatgtaaattttagtgcacaacagctttttgcaaatgagccctaactgtggggattacatggtagttcctaggcgtaagaagcctacagttctcaaaaccgtatgcagattagcagtcaggtttgcgacacttgaaatcttgtcaaggttcctttttatgacattgacagacttgccctgcaccctatccaggtaatggctgctcatggtcagcccctggagggacatatcagggctgcaaggctgctgacccctggagactggaatgtgcatttcctagccagggctcggagccaacttcctatttatttaggaggccctgggcacttgggagccaagcagagcttgtgatgcaagttttagctgcaaagcatgttggggttgcccaacgtgtctgactgaaatatgatttgaaagatttctcaaagcccaggtggcgtgagccgcagtcacgattaggtagtcttttatagccctttaaattctgacctaagtaaacagaaaaccaggccaagcaatgaggaagctctgcaggtctgcagtgggagagttccctctccccttcctgttcatagcatcagtcaagaggatgtcactgggggtaacacaaaccccaaagttttgtgtccagatgtcttgcggattcccgggtgtgtatgtggggcgtgcatgtgtgtgttcacaggcacatttgcttttgaaacagaaaggtacacataggaaaggatacaggaaagggtgagtggcctgcaggcagagtccctgtgtgctcaggacctgcagagaagcctggctcagggggctgatgcttagatgagagtgggatccgctctcaggctgctgtgatgcaactggagagcattttacctgcctgaggatttggtgaaggctgctgagttctgaagcaggtaggataaagatgagtctagttggaaaacacagaggtattctggggaggatggaagaccggagcagcatagaggacagaaacagattcggcttagattccctggttagaaggaatctagaaagttcagagttcatgctactgctctgcagactgccgccgagcaagcaaaaaggatttaattcatgaaatattaaaaatgcaggcaagctgaccttttagcccatctttgtagtattaaaggagtaaatgaataggttctcggtaattagactcctacagagaatttaatttgtgtgtaggtatggtaagtgtttagcaattcaatgcacatcctgctttggccaccactgagcggtgtctcaggctgatgatcacacaagtggcagtgcctaagcctcacagttatcatctgccacccggggaaccttggagcctgttcactaggggttcctgagagacttttggtagcataatgggaaagggaagggcagtggggtgacttctgtcctcgtgtagccgttgcccaacattgtagatggagatgcagaacctggcagaaatattgattctataacgcattatcctccgcgggcacaggacagcgctctgttttatcttcttgagacagaagacatgagagagaagtgaattaggtagtacaacagagactgcaaactccttcccaaaaacagctgtaagttttacctgtgtctgggcctctgagttcaatggccttttatccagattcactttggctcttcttgcatattcttcgggcttcctaatatagactctaattccccctctgtcttttattagtggatgttagcgtatgaaacagggtttccttatgccatttccatgcgtgaatataagaaacttggatgaactgatcccttctgtgacccatgctcatcgatagtagtgtcccctttgcttccaagtgcgtctagattattgtcaatgtaagaacttttaaaattgagggtctcgctttgttacccagatggtcctcagtgctctgggctcaagcagccctcctgcttcagcctcctgcatactggggctataggtgtaccatagcacctagctgacccaggttctcctggagcagattgcagtacgtatacctggatagactgtatgttcttgcttactggcatatttttatataaaaccaaagatccttcaagtggtttcctgaatgtaagaaaatacacatttacactttgaaagatattagtcctcaccgccaaatatctctgaaatagcttccgtctttagtgctatggattgatgcttcgtgctgagtgttttgaatgtgctctttgttgccccttcctggacagagctaggaaggcagtgctgcctgcttggtacatgggagtgctgaggctttgtaccgagaacataccataagtcctggacattcaggatcccagtttatccttccaccaaccactgtcaggtgcacacacaagtctcttcatatttatgaatttaggaagtagagcaaaatttagttttgttcttaagtgactgtcttacataggattcgataccttgacatgtttactggctagctgcgaagtttttaaattgtcttttataatctcagccttatttttatgagattgttcacttgttttccttattgggtccttcgagttcctccctccttccctcctcccctccctcccgcctcttcattccctagggtctagggtgttctagccaggtgctttcccatcaagttgtagctctagtcctcttttaaactttttatctggaaacaggatctcactaaacagcccagattaggtttgaattcaccaaataccctaggctggtcttgaacttgtgaccttcctggctcaagctcccagttagctagatttcaggcctgttccactatgacaggctgatttctacatgtcttatgtagtaaccctctcccttgtatggcaaaccccttttctcttcagtttgtttctatcaactctttgtgtgctttgccaaacagaactttatatatctaattgtgaatccgttcatcttttaaggcctgagtggttggctacccttcttccatcataggagtataatattttctatgctttcttatgtttctataattcctcaataacatttatttgtgattgactccattgggttttgtcactttgacacaaacctagacatatcgaggaagagggaatcataattgaaaaaaacaatgcctccgtaaggcaagtttctagagcatttttttttttgattaatggttgatgtgggagggcccagtccactgtgggtggggccattcctagacaagtggttttagatggtataagaaagcagactgagcaagtcatgagaagcaagccagtaagcatcattcctccatggcctccgcttcaactcctgcctccaggttcttctagtgtttgagttcccgccctggcttccctcagggatagagcgtgccctgagagttattagctgaagtaaaccattttcttcccaagttgctttctttgtcatggtgttttatcacactaatagacaccctaagtaaaatcattttagatactgagaacagttacagccagattgcaaacccttgtgttttgctacacagagggtgatgtagttaataatcttgtattatattaatcacattgctgtaagaaagggtttggaatgttcccatcatgaagaaatgataaccgttcgagatgatgggtaatctgctcatgctgtgttgagcagctcctcaggaatagacagatatattgaagcatggttctgcactctatacagcctgtcagtcctctagcctagattataaaattattaatttattttcacataggttcttacatgttctttatagcagtgatttatttcagaagcatcctgggaacgtaagctggctttaatcgtcacgtttctgcacgtgttggggaaagcctagtataatggcatgcaaaacatccactatccttagatgctgcacagtgtgcaaggaattcagttaggagccactatttttatatatcagtttagaaaaaatcgaacccacccacttttacctaatccagattaacatcggagggtctgtgccgactgtgtttggacaaccccatcatttgggttctaaggttggcagaagtgaagactaaattggtttgccaaggaaccctaaagttcctcctgtctctacacaagttcctccagagctcagattacagacctgtgttaccatccaagctatttaaggggatttgaactctggtcctgatgattgtgtggtgagtactttttgagtcatatcctcagcccatgtcttcctttcttgtaacacacagccactctccagagagaccgcatcttcaagcattttaccaggaagcgccaaagggctatgcgaagacgagtccatcaagtgaacggacataagttcatggccacgtacctgaggcagcccacctactgctctcattgccgagagttcatctggtgagacagcctgcttacccccaccccaccccactttcacctccatccctgggcttgctgctggaggcttctttggcttatgtgtggtttcaggagaaaacataatggatactattcttcagatctgacttttgcctcctattcgatacattgatcctcttttaacaggtttaaactcctactaaaataatagcaaaactaagtaatttacggacccaaatgttagatattatttcgtatactagttactctattgaagatgctaatagatgaaagagcatgaatcagagagagaggagagtcaatcaattgataaattagaaaacctggctgaggagaaaggaaaattatttttgaggaagttattaatgctttgaggaaggcatggatcgtgtgatcagttatgaggaataatcgtggtgagaaagcctcgttctcagtggtgtccagacatatggcatccggaggaaggccatggcgtccagtggtcctctaccaccatctcatctccagcagttaggaactaatgtaattaaaggttgagaaattctaaagacttggggcactgtcttacaagaagtaagcctgaacaagccgtggcaagtctatagcagaaaataaatgtaagcaataattactttcaaagagagtcaaggttaagcatacttatggcatttgtaaacagaattacaactcccgaccccaacacacacacacacacacacacacacacacacacacactaccatagaacacatcagggtgagtcataaatcaatatgaacagaaaggagatgatggcaccacgtctgcccccctgtggatttcagcgggagatgtagagataagacaagggagagtgctggagccaggtagctgcagtgtgtgtgtgtgtgtgtgtgtgtgtgtgtgtgtgtgtgtgtgtgtgagtgaatggaggagctgagttgcttttcactaaggatttaggagacagctgaagggaggagaaacgggaaccctcacnnnnnnnnnnnnnnnnnnnnnnnnnnnnnnnnnnnnnnnnnnnagatgtttttcataaggggccagggaacacacttcttctagagaagtataattatagatgttattactgaaccatttgactgacagtaatttttctcccttttgtcttgaacaggggagtatttgggaaacagggttatcaatgccaaggtaagaaaaacatgtttacaaccgtgtttaattgtgcttctttgtgaaaatatgataacaccaacagaagacaggccaggctgcctcctatcaataccatgataactctccgtaagacacatggtgcccgtatggcagactctagttcgtaccagaccctggacgtttttgacagtatagagggaatctgttcatttctaaaatcaacacccagaagagctttgcagcttaaagttcgctcttcagtaacttgagagagctaagaaggagtccaaggcatacaagggtgagtgtgcccttgagtcttgaagataaaagtcttggtttttacattgcacttttaacaagatgagatgtcgcatgctgtgttcatgtcacctgcatagggaatggatgctcgtctccaaattagctttatctttttagctttctggtttcagaaacaaaacagaacaaaacaaaaaaccgagggtctggagaggtggttccctggtgaagagcccttgttgttcttgcatagtttgtgagggttcagtcgtgagcacccccacatggctgcttacactgtgcaagtttagaggatatgatgccctcttctggcctccaggggtactacatgcttatggcaaaaaatacacacaggccaagcaccataaacataaaataaatggctcagcggttaagagcactgactgctcttccagaggtcctgagttcaattcccagcaaccacatggtggctcacaaccatctgtaatggcatctgatgccctcttctggtgtgtctgaagacagctacaatgtactcatatacattggataaataatattttaaaaaataaagtaaaaagtcctcagttttttttaattaacttcatttttaaaatgagatattagcatgtaccaggccatggtcttgatctgtaactcaatgaatgaacgaatgtgagaaaaaaatccacaattaaatacattttcagaattctaaggtaaaatcaacttagtatcattcttgaagacttaaaattaaataaattcaaagtgtgaaagcagcctccttctatgtaggggtgtgggctgggtccccatggccttccgtggggctcccttcctgttgccctgagtttggtcagtctgtatctgtagtactgggcatcttgactttcactctgcaggtgactggtagccgtgccatgtattctacagagccggtccacatgtaaataaggaaaatcctctttctgttttggaggaagcaatgcaatgtgggtcgtgtnnnnnnnnnnnnnnnnnnnnnnnnnnnnnnnnnnnnnnnnnnnnnnnnnnnnnnnnnnnnnnnnnnnnnnnnnnnnnnnnnnnnnnnnnnnnnnaatcccagcattagggaggccccccccccccccccccacttaggagaactgactgagacataagcttgaatctaagttatgtatgaaaatttccactgaattctcaaagttagagagagcaagcatagcaattgtaagggacctataaatgtgaattcagtcctaagtgagaaaatagctcacaaggtaggacgataacagttttcagcctggacctgtctaatataggggtatgctctctagtgatatatatatccatatatatatatctccatcatatacattcttatatagattgagaagctctagatacacaagggtaccattgacagattaaaatgtatgacttaagggtacatctgttgtgttgtttttcctctcagcatgtcgctgagacatctgatggctgacttctggtggggcacctgctctttaaagaacaggaaagaacactagttaggaggcatgagaaagttttgtttacatttcaccgaagaacgtaaaaccaaacgtgtggtaggagagaagtatgcgggcccaccctcatcagaagcacagggtggtgtttccgactaatcaggcttgaggcagaggaaacggccagagctaagaaggccactgtgtgtgtagtagtaaccgggccggttcttcagacagacatgaatgtggttggcgtgtacatacctaacagtgggcagggaagcacgtgagaacaaggcccttggaccacaagggaggtagacaggcctactgtcatagctgctctgtcgatcattgctggcctcggccaggccaggcagaggagcagtaaggctttggttgatctaaacagagctgtcacagtgtgatcaaactgacgttgatgggaagcaccagcctgcagcgtcagacaacacattcctcctaagctcacgtggaacattcaccagcagagaacacccgctggaccttaaacctactgtaacaaacaagaaacatacagaaagcacaagactcatgctgtctggccagccagtggctcagcaggcaggaggccgttcctgtgcagcccgagaacctgaggttgaatcctggatcccactaggtggcagggtagattcagagttgtcctgtgcgcgcacgcacacacgcacgcgcgcgcgcgcgcacacacacacacacacacacacacacacacacacacacacaccacacacaccttgaactcacatatctccacctgcctctgcctcccaagtgctgggattaaattcatgtgccaccatatccagcttcttgctcattccatatacactacgacacccttatagggctgcaaacgggaaagcatattgtcagagttctaaatattcacacagctggttgaaccgttctgcaagtgtttattcaactgcccattcagcccccagcatcattcagggaattccgggcaggccccagccacatgtggaagatttgaagtaggagtcagtctgaggggctgtaggaaatcagaggaggagaggcagtttggggtgagatattctttgggttttatcttgtcataagcattagatgcagttaccaggtgagtaggctatgttggagaggcagagaaaggccatacgtttggaaccgtgctgggtttgaacactgttgatggacatgagaaacccactggaagtgttcaggcatggacagaaatgaccagggttatactgtgaaaagatttctctgaaggatggggcgcagtcaggaaggcgaggacagcttaggacaagatggcagacagcttggatgtaaacaaaggtcttgttaggatggtgtcagtagatgcaggaaggatgagggcactggctgccaggatgtggccagacatccaagccaagtttctggcatgggcagctttcgttgactgctgcaactggctgtcctaggaggctctgataaatgtgtaattgctggatttaatttcccagtgtgcacctgcgtcgtccataaacgctgccatcatctaattgttacagcctgcacttgccaaaacaatattaacaaagtggatgccaaggtaagtgagtgctagtttgctgactaagcacaattccctctgtgtgtgctctctctctctctctctctctctctctctctctctctctctctctctctctctactcttccctactcacctctccccacagccctcccatagtccttaggacccacaacagtgctgctggaatttgtatttctgttctttggcagtctgacctcactttgcctagtggtaactttgcctcacttccacagaatgcctccccataactacccatactaacatagtatatggatagtaacccataactacccatagtaacccataactatccacagtaacctgtactaacaggagaaaagggttactttgtcttgtggttttagatacttcagactgaagaatggggagagctgtacagagcagaacagttcccggcagggtggagaagaaactgattctgagacttagggtggggtattacctgcaaaattctgccactaagaatggacttttaaaaagctagatcccacctctcagtgactctgtagccatgctcagtggcactactgactggggacccctgaattttgaacacaagcttgtgagacttatttagcattcagagcataacaccttgcaaggacacagtcagtgttcagctgatcaaagatgtagacaccacttacactgttctagagagaggactctagttgggggaaagaggcctgggcctattatatagcatctggcttttccaatgctgaggcctgcctccactagtgatccttgtcagcccaggcctgatccacagcctctgtgtatcagtctgaaatatctgggcctcactcgtgtgtattagcagcagttaaattgaattgacaagtatgtcaactgtacataatgcttgctaagcaaagagacactgggcctccttcagcctcgtagggactccaggggaaatgtgtttaagcttccgttgcgtttccctgggatgggcagatgttctaaattcaagagggagaaagcaaggggagtgttgttgaaacttagtggacttgcagatgcttgggaaagcccaacttggggactcatgacatgaacatgcatgatagtgaaacacacagagagatatgaactagagctcgtaaaggaaagaggccaggaaagtccagagaggaacagtcattgtcttaccctttctcatgctgcacctgtagtttttgcttcaatttgtaaggctgaccagagagcatatggcaagggggtacaagagatatgacacataagagaccattaagttggcactcactttgtctataagcaaatgccagaggctagaggggctgagtgaggtggccactgcagggtcactgtggcatgacgcagagagcgttttgatccgaatataaaagatgaaggaaatgataacttctccttctttctccaaatggtgaatggttcatcatatacctatatcctgtatcttagtcctgtcttattcatcaacaaagtgtgctaagatccaaatagcaggacagttctgcatggtataataatatacccagcacgggtgtcaccataatcctcgtcatttcccactccggtcatcacaaaagacattgctgagagagttgacctatcctcctcttcccccagattgcagaacagcggtttggcatcaacatcccacacaagttcaacgttcacaattacaaggtgcccacgttctgtgaccactgtggctccctgctctgggggataatgcgacaaggacttcagtgtaaaagtaaggagtgctggcttcctccttctctctgtgacagcattgtactataagcctttgaagttctgtgggcttataatctgacctggggctgatggtttacatattaatacctgagttgtgttatttaagcatcactggttgggctggagtacatgtaaagagaagtgtgtcagatccctataataatatagattaaattagaagttacatctaaagatctactgtgctagttgttggctacttgttgctgagtatgcttttaagaggcatttgaaagagggctttgaaaatgggttctctgagagagagagagagagagagagagagagagagagagagagagaaagagagagagagagcacaggtgggaggaggtatagctgaatgaccagaagagaaggtttgggttctaagtgagaactggctctcatcagaagtagggagcagttgagctgtcacattagcaggagctgcgtgggttgtctgcaagagtcctgtggtgtgactgaagaagctggtagggcaaagagcgagagctgaagctttgatggtggctggcacctcaccaactgcacacggtgctgtttggagctcttgccttttcaaaggctctgagtggggtaaaggccagcacctgttttgttaggggttgtggagctattggcccggagtcattttccatgagtatgtgattatctggggtgcacctgaagccttatgagacacacactaggatgacaactttcgttggctgtctgggacagtcaaactgtctgtcagcaaaagggaccaaattctagcaaggcgtagtaactcatgcctctaattccagcaccaagggtcgatctacatagtgaggcccagagcagcctggggtaagaagaaaaccagcacaaacagcccatctctctggccctgtggcaccgtttttcattcacctgaagcagcagcaagcttaagtgaagcagcagctttgcctgaggtgttgcttgctactggtctcaggctctcacggggagtgagccacttccgttttcctgtatttccggctagggtacagatccacacatagggatcacctgtagccctctgttcccgggtgccccagagcagcagacctgcagtgacttgactccttcaacttttggttttattgccacagggcttttctaaaaggcctttgtcgtttgcatctctctataccagtcgatttcccatgaagctaatggagcttaagcatcagggcctctctctgcttcacgcggtgtccgttttcataaagaaagcttcccaaaggacaaacgcaatccccataacgtctaggttgttctgtgtctccaaagacggagtggctccatcgaagagacatttattgcacaaggcttcagccgggccttctgtcagcaggacccacttcaagaaacatgatagtaatttatgtctgccgattaaacctgggagctgtcattgtcccgggagcttcacagataacaagaaatgtagcttgctttgctcccttctccaaatgtcattaaccctgaccttcaaacacttcaaagtttgctattttttttcttccctataaaacagttagaaccacagccctaccggatgttctttgtgggctaggagtaccacccaaccacagcagtacccggaaagaaggtgcataaacccttcagaaacccatttccaccttgtttgaacagtgaccaagctgcagcctggagactgctgcctttatttaatggcaagagggagtgcagtcagttagcatgatcctttgttatctaaccgccccgtgatggtctctgtgatgagcatcttcatctctgtatcgtgtcttgctgccaaggcaactgttacgtgtgatttagatgagtctatcctctcgagccacggtgaagagagtcaaaatctattattcgaagcctgctattctttcatgctctagcatttctgcctctgcactaatcagaagcagggaaaatgccaggacttgttctaaatgcgagtttaatcttgtgagatcacactgccagctgcccgtatcgttcttctgtcacagtcgttaggctaccgatgttccctgcaagcacgtttgtgaacctggattctcttctcttccctccagtatgtaagatgaatgtacatattcggtgtcaggcgaacgtggccccaaactgcggggtgaatgccgtggagcttgccaagaccctggcagggatgggtctccaacccggaaatatttctccaacctcggtgagccctttgcctctggctgtgtattgtaggttgcaagttattccggtgcaatgagctcaaatgagagtctagggggacataatctcagcaaatccagtgaacaagtctgctgtgctttaaaaaaggcattttatctccccaactagagtctacacagttagggctcaaaacagtgagcatgcatgtatatcatgaagcaagagaacggactcaccccccacctccccttaaaatcagcttcctatcaatctggtctggcaagaatctcagaatccagatgcctagggtacgcccctggctggtgtccaatcgggacagctggtcagaagccaccggcctctgcttccttatctctaaatggggttgaaggtgccagtgcctggggttctccacttccctagactgcagcacgtgtccagggttgtgagttcatctcctgctttctgcagcagacagctccttcctcgggacgcttgggaatgggtggagtggttttcttgccctggctgtgttttgtcctgcaacctccccaagtgacatccagctgatgctgtccatcagagccttagctgctgcttcctagttcttagtgttgtctttctggcccacatccttggttggaggctgggaagcagccatgtctggatggctgtgagatctggagccaggctatgtgacagtcccagaatgggcagtgcctccttctctgtaacatcaagtgtctttagtgttatggtattcaatactgggggaaacatctacctgctgacagcacatcattaaaaagatagaattataagtaatcaaagagaaaagtgggttaaaaaaaagattaggggactctagctttgaggttttagctctaaccaagagtgcaggttaaggaagtaagattcaagctgggaccacttttctgtctttgaaaagtctacagtagatttggaaggagagctataaaaactgctgtgtttttaaatataagccattttattgtattgttaatgcctgttttgtggggttaaatatataagatccttggaggttcaggctgtggagtagttggcttgttttcagcattgcttgtaagtctctctagggcctaaagtctagacacatcctttttaaccagatacatcaagaactccagaattcatcttcttagagttggggagcagcttggtggtacagtgcttgtctggcatgagtggagcatggggtccagtcacagcacctcaaaggcaaacacagttaaacaataacagcctcctgggggctggaaaggtggctcagcagttaggagggcattctgcccttgagagtccagttttttagcatctatgtcaggcaggtcacagccacctaccttcaactccagggggatctaaaaccctcttctggcctccatgactctggcacacatctgcagatgcacatacaaagatgcacacacacacacacacacacacacacacacacacacacttaaaaataataaaaacaaatattttttagaagtagcctcacattctcaaaaaaaatttaaagatgtaaaaagtcattgtgaccatttaaaaataatactgtgtacaataagacaataatttagtcatattttaaaatttagtatgaaaatgttttatctttgtacattgttttaaatatatgtactaagagaaggctgctgggattttaggtacttaacatttatttatatttactgtctttcctatttcacattgaattttatttgtataatttaaatttttatattaaaaaacatattctggtcctgctgccgagactctgagcaagcatgaaaaccaccctttgcgggaagtggtcactaggtgactcccctagaattgacttctctgtggtgaagccattgcagcagaaaccacagtgacaagcctaaggccttggcatcttcatttatgcacaagcttgggcatattctccacacggcagtgcatacagaccagaagtggatggcaagatagttttcagttaaagaagctggacatctgcccaggactgggtggagacaggctgcttgcatagggaggtctccccatccatacccaccttgagctcacagcgtcatttctactttcctcctccttgcagaaactcatttccaggtcgacactaagacggcagggaaaggagggctccaaagaaggaaatgggatcggtgttaactcttccagcagattcggcatcgacaactttgagttcatccgggtgttggggaaggggagcttcgggaaggtgagtctgggctttggccggctggattgaagtaacaagcatgctgtgtatgtgtgctgttggcgtacatgtatgtggggggacaccggaccttctcacatgtacccacactctcaagcctcgggtctccctcatgctccctcctgctttgctctaggtgatgcttgccaggataaaggagacaggagaactgtacgccgtgaaggtgctgaagaaggacgtgattctgcaggatgatgatgtagagtgcaccatgactgagaagaggatcctgtccttggcccgcaaccaccccttcctcacccagctcttctgctgctttcagactccagtgagtatggctgggtactccccactatgagtatgacaggtgctcccccttctatcctagtgactatgatggtgctccccacctcacagcctcctgtctcacagaaagaggagatattagtgaggtgttgaagatgtcacggagttgcctggaatcggccctcaaggcattgccatgtctgacaacctgggcacaagtgataggggctaatacattaaccccttccttcatgctgtcccatgaaaggctcaccttgagggctgtggtccctgattttgaaaaggtcttcatatataagtttcctgcagtagagcggttacagaagtctgagggtagagtcaatgtcatgagttatcttggcgaatttggctatggttcttgtcctaagttctgaacagccttgaacccgaatgaaggagtcgagaagtggatctagaaggacccagaaagagcaccttggtttgattcatcccaagatcttgttcctgtccataaagttcctctgcctggtgccttcactagtcttgggattcgatgggttaagagtagcaatctaggatgccttttgttgcagtccgtagaatgctgagctaatgagagtttaaacaaaaatcatggtgcccttggttcaataggatgagtgtaaagtctggtggtgatcactaggattggatctgtggcccagggccattagacatgtcttctacttggtagctcacagtatttgatgaacctttacacatcacactttcacaggacagcatccaaaacagaggtcatggggtagcatgggccactcttcttccgtggtctattgggtcatctttttttagcagcaggagctgggagaggagatagctcaccaagatggagccaatgaatcaaaaccatcttgcactaactctggtccattctctgggccaggtcatgctgccgcctttctagaattgggtccatacttgggcttctctaatcagcaagaaggtgacctctaagaaagcatccatccaagttccaacaggtcttccagtcagatttcctgtcagataggtcaggttttcctattgtttgggagactgaacctggttgtgcccttggggaaacacacagcggcaccccaccttactggtgatggaaattaacagctaagctgaggcgaaggtgagacttcgatattgctggcaaagagaatgcttcccacagtgggtaaacagctccacagagctaggctgaggcggagcatccattgtgaacgaagctcagtgaggctctaaagctgaggtggtcttgactgtgactgcacaggactgtaacttcaaagaccaggctgtggaatgcagcagaaaacctgggaagaaactaatgtagaggaatgaagggccaggtttaatcacagaaagccagcttctttaattgacggcatgtgcatcctccacatgtctgttctctctgtcacaggaagccttttaaggagtttttgatgcataaaagatgcacaccaccctttaaaaaaacacaaaatctggaaagtcctgcagagattgctcagcagttgagagcactggttgctctcccagaggactcaggttcaattctcagtagccacacggtgcctaacatggtctataactccactcccaggaatgctaatgccctcttgtggcctctgccaggtaccagacatgcatgtaatgcacagatataaatggaagtagaacacccatacacacaaaataattagaaaaattaaaacgcaaacaagactgaacttcgactatgactgcactaatttttaaaaacacagtaacagttaaatcttggaggttttatcatattggcatacatctagctgcttcatttttaatagctgtagagtattctgtattaagaacatattgtgccaagcacagtggattatgctgttaatctcagttcttgggcttcaggggcaggcaagcaaacctctgtggtttcaaggccaatcaggcagccaaggctgtatatttagactttatctatctatctatctatctatctatctatctatctatctatctatctatctatccatccattcatccatccatctatcccttgtctctgcgtgtacgtacgtacgtgtgtgtgtgtgtgtgtgtgtgtgtgtgtggttaattacctatctggttttttatttcaacccatcttgccacaagtccccgtgtactttcatttttgcatgtttatagagcatttctacgtggcatattattggaggtagtattgctcaggaaactcgagcatttaagatttggacggagtccagtggtgcttacctctatggtagttaacatggcggctgacattttatggtctgccttctaggcactgttctgacagctttgtgtgtactgtcgtatttaatctgtgcagtgaccctgtgcagtaataaagtttcagtgggcatagagattcctaggacttacagctgaagtcttcattagcatccctggtggttgttttttgtttttgtttttttcccccctcttctattaaaggtctgatgtttggccacagggtggcagtcgtgactgtaaagtggccttgatttctcaccacctgagcagtgacagtctggagcatttttaaaggttgtgggttacaggtgctggctcccaaacaaagaaggaggggagaggaatgctctgaccttcaggttagagggtgaaaggagtgatgggaaccaagaagcaaatgagttcttcacatggccaggtagagacagggtcttcatttcactctgggaaattatgggactcaagtgttattcttccatctggaaatatcctccatgtctacccctatctcctgtaaagctggctataaaggactggaaatgctagtcactacgaggaacggtaaacttggatggctctagctacttgactctgcaagccatggcccctcaagtgaggagtcgggtgctaactgtggccttctgtcctctgagtagctcatctagttagggcactggagttttccccaaatggcctggcaaatgacatttcattgggagagtccatgttcagtaacgtgaactccctcatgtctggccctgtggaatctctattgctgaagcccagagatgggaggagctcactaaggtcctcttggcttggtagtgttggagacagggttcaggtataggccaggctgactctgacccatgggtcatgtgcagtctcacatcagctactgaagcatctgcctggagagatggaaaagcattgcccttgggactgtccactcaagttctcttcggtgaccctaggtcgaaatgctgagtctgttgtcaaagtcttttctgcgtttctccaagtcctggtctcagaagtgagacctctgtgaggatccagtgggaaggtaaagagactgactactcacaggtcggggccgcagctagctgcccgagcctcggtggatgacgccacagccatgtccatatgggcacactgctggagttaatggattattggggagggagatttgaagctagaagaaaaatatattgaggggcctggtgagagggaatgggaaacagatatggttaaaatgcattgcacacgtctatggaattttcaaggaataacaattctttttaaaagctaaggctgttccgtgatgaacccacttccccacaccaagcaagggcaacgtcccagagctcccccctctaaaccataaagtgggagtttaggagctccttctgttcctaccaaaaataaaacaaaaagcaattttcaaacactagatactttatcaagctttctgcataggttaaaaatccctaaactctttggctcatatctctccttaaatgttactgttagaaataagtgagaaatcgcagaccttctgatagcgtcaggaattccaacactttgtgagtaattgtctttatcttcacctgtaaaagctgttaggtctgctggttttattttcattgtgtagccaacagacacaatacaataatacgatagatgttgtatgtaaagatgcttgatttgggttggtgaggggtggtgggtaaaggcacttgccttgagcctgatggcctgatgaatttgatccctgggacctacagagtggaagaaaagaaccaagtctctaaagttgtcctctaattgccttgcatctgctgtggcatacatgcattcacatataaagacacacacacacaaacaaatgaataaatgaatgtttttaaaaatgcttaaaccttaaagatggttaatatatattattagtccattgctgatagtctttgattgacagctccctagctcctaccctcagccctggcatccatcctttgctcctgggagttctttagatttgattttctatgcctggtttatttcacttaatcttctccagatccatctgtgttgccacacatgccagggtttcctcccgtcttaaggttgaacgatggctcattgtgtatccaccccacattttctgggtccatccatccatatctctgtccatccagccatacgatgataatgttgccgtgaacagggcgtgcagttctcttttcaatcatcttgcttctgacttcagacttcttggatataaaccgagcttgtggaactgttggttggatcatacgcatattccattttaacttttgaggcgtctccatttggatttgggcggtggttgacggactcacaggcccagtgtctgtgcacacggatggatgggccttctttccttcctgtgttgctggagctcaattcctttcatccttttaatagcagctccagcagggaaaagccaccttggggtggcttcagtttgcatttctctgatggttagtggccatcatttctcttaaatgtatctattggccacttatacttcttgttttgagaaatatctatttagatctttttctttgttttagattttggagttatttattttcttatcatctgagttaagttgaaatgacctgagctttcagcaaagggaaaacacttaatgtactaattgaagtgggtgttcttccagatgtgatggctcagacctggagtctcagacaggctatgagaggtagagtccaggagttccagatccactaggtcacttaaaaaaattcaaaagtattggatatcagacattgtcatcagcacctagcatgcatgactaatggcatgttgtcgctccataagatagactcggttattatctttgctttgtctgtagttcagagaaacatggaaataataaaacactccctcacacccagcacttttaagaaaccgtagaactagaaggttccaggaaaggatacagtacttacaaagatgagtggtttgtatccatatcaagttctggccaagacagcaaagtggctctccattccctacaaaggcaccagccagaaatgatgataaaaatctcatcaggacagtagctgagtggcggagttgctgggttggtacacagttttcaaatgcatgttttgttttgttgttttaaacaacagagctagtgagaataaggcattttttagccaaggaacacttggttacaagggacccgtgtcacaaatctagcacatgctgttgtcctcggtgctttgaagctgactttgcttccgggtcctttcatcttcattggggctgtcagcctattggcatttatggcctggaatggaggcccaccgcctttcttccacaggcttcccgcttgagtaagaagagctttcagctgaggccaggcagagaaaactgagcttcagagaggcagataggtggggtaagaggccagccagagggagaggctggaggagggagaaaggagcaaagacagaaagcagcctcccaggaaggggttgggggaagcagcaaagtcaatattggtcagatgccccagtctttgttcagagacccagtttatctgagcaggccttctgcttcaaaaatacaggacatcctgtgtccaaaacctagaagagggctgtaccgaggtccctcctcactccttaggaattcaactctgtttacctctgcttctctaatggctgtagaccacagaggctcccagggacaggaaggacaggaccggccccttgctgtaggtttcctcagagcctgggctgctagacttcctgggtcagtcctgaagatggagctcgagacaggccagagggatctgctgctcctagctggcggaggagtagcagcaaagcccagccccaattgcagaaggcgagattgttcagaatctgtgcacacaggcacaggacgctctcagcagacgctaaggatgtcagggaagtgacttggtaacacaagggcaagagagcgttgcttcctctgtattttcctctccattgttgtcatattagttattagtaaagcagaatatgtagaggtgagaaaggggttattattccacccccctttggggcaggtaataacaagggaaccttgagttaaagtttgggctctggctttcctagcacttggtgtctttaagaagttctttatttcctagtttgcctagttaggcatctccagtccaaaaagaaagaaagaaagagagagagagagagagagagagagagagagagagagagagagagagagagagagagagagaagaaagaaagaaagagaaagaggaaaggaaaaggaaaggaaagaaaagaaaagaaaagaaaagaaaagaaaagaaaagaaaagaagagaaaagaaaagactgcctttctccctagtgagtaaagagcctctagaaggagtcccttgtggggagggagctgcatacacagggcaggggcagattagccacagcccacagtccacaatttactgagccagtcccaagtgcatcctgaggtgctaccatcagctggattgggaaggaggcacactcagctcccatcatgccatcatctccctgtgctctgatactctgccatcctggtcaaggagaagagaccccccaaggctacaggctaggagagaagaggagaagacaaaggagatgatggtctgtctgcagaggcctctgctagcatcagtgtgcctggttgatcattgttggagtctgaatgtgtccgttctgcaggatgggcaggtgcagaagctggaagttcactgaagtgcactctggatgctttactcgttcttgctgccccagaaagtgcacactgctatctgataaatacctgttgggcaaaatgtcttgcagtactccaaacaatcccagaaggtgaagatgtttgcatcctccttggaacagtttgcacagctgagctccagagaggttaaacaatctatcctggatcacacagcaaggggctacctgaaagtatgtggcttcttgcctgggttatgccgttctatgccatgcctgttacactgtagcaagcaatctcccctctgtgcagtatatacatctgaaaagaaaggggttgttagaaagaattgttcttgtgtaccatatgtgttttctggccttttctgaaacacccaaggatattttcctctgctctctctggaactaggtttcttcctttccttgagcaatgactacttctcatgccatgtggtctgcttctgggtcatttgttctcgtttgcctttggctcagatggaaatagaaaacaaactagaacatggcattggtgttctccagctctgtttgcttccaacctgtcagcatgctccatctttctctcaggctggtagctatggacataggtccacgggtgaaattcagatgtctggaccaagttgtgtgagcttacttcctcaaccgacaatccctggggatggtgttcagaggaccatctccaggcacaggatttgggtttctgatctcttgggctactgggtcacatggtcttgattatgaatggggttgggtgggtgggggagtcagaaggtgaaactgtttctcttcccccgtgtctcgattggtccacaggctactaggtgtgtctagagttaaaaccgttgtcctcgaggttgtttaactataattggcttgtttacagctgtcaccacccctgacattctggagggtaagcagcccctatacttttacatctggacagatgttttgtggcaccgggtgtcatttcctttgaagtccccagtcttcaccagggttagccttagtcatgtgtgctcacagtgactggtagtgttggagctggtgattgcatagttacaggttgttcactacagtaggtcaagttgccaatcctctgccctttcaagttcaagtaccaagacttctgctgttttagctgaaaaggggggagtctggtgaaatccctgtccttcttcttgttctaaaggaagactggcactcatgaagtgacagtgagaaattgaactcatgtactaagttccggatcctgtggaagctccaatccatgtgctgggctttctgcagaacttcagtccccaaccaactaacactgtagtttttgcagtgcctgcaggtagtacctgggaggttgggtaagcactcaccttgacagacatggttatccagggaggatctgaggctgtaagtctgtaggtggagtgagtcgaccccaccctgtagacagttatgcagttgtaaaaaccagactttcttgggtagcaaccatgggttctcatgtgttctagttttgaaatacttgagtttcttgttaatacttcatcactggttagaactgggttatgactgtttctcatgggccccagaaatagccagtgccggtcataagtagaaacagccttgttgcaaggcttagcttacggtagaaggcaggaaagcattcattcactcagcccttgtaacatggagtgtctgtgatatgaagcccaccctgagaagacagtaggggacaaagaagaacaggctctgccctgtgtagctgctctaggaatctgtaggcctgaagctgtcctatgtgggtagactcagcaagtgaccagtcattcctcggaggttgttcttggatttctactttggtcaggctcagaaaagccacatgtttgggaaggcgtatagggagctggccttgaagctatatttgtgtgtccaatgcactcttatttatgtggggtagaatgaatttggtatctgctgattattattaagaaggcatgatccaaaccccacatcactcccagctggtgattggtgctgtattaattgagtaattgacaggcctaagtcaggaggcagcataggaggagtcgcagccctagctagcttgtctgctcacctccatgtttgtgtgttcccctcgcactggcatctcctgttccaggccacagggagggacatttgtctacctccctgcccactcccaagtaacctcctgagccaccaagaccccgttgtactgctcttttgtaagactccttttcctgctttctgctgtcagtcagtaccgccctggtccctggagggccacccagggtgtttctgcctctgatctgtgggaggcttcctgcttgcaggactcttcctgctcttcagcagaagagcccgctatattgtgagctcacccctccccagctctgccctgtcgtggatctctcaggacctgggaagggggtgttggaactcttcccagcgtctcttcatttcatcctcaaggtttatgacatcttaaatgttaaaatgatgtagaatataattccccgtcaaaacaggagtgccaatcagccgccctcccttccctttctttgcagcgctccttggaaagctactgtggcattttgctgctctgtcaactctctccctccctggggaacacagaaccatgctctctttggttttctctgaggagacacggggtagggatgagccactgtccacaccgtctaagccaacatccatctactgctggtgaaagctgcttagggttaggtcaggaaatgcaggcagcgcataaggcagagttggtctacatttctcttctggaagcctataaaatgtgggcctgccattcacccgactaactcctctttattagggctttaggacagatctgcagagaaagttcctttccacacggctcagaacatcacccctaatgcatgacccatctcagggccggtgagctattatggttgtagtgaaccataaataaaatgctcgcacagcgccatgtcatgggccctcttttaacacacggtgggatacgcctctcttggagggctgccctgtgcattgtagcagcatcctaggtatagactcattcagtatcagttgtgcccttgagttagtaccatgtattccctgaggaatctgccttggctggacgctgtggccctgcgtgactgtccagtgatgtcctcagtgtctggcctcacagcctagaggactgtttctcacagggaaagtgaagtgggcccttgtaagagtgtatatgaaccagcaagatggctcagtgggtaaaggtactgaccactaagcccagctacctgagtcctggaacccacatggtagaaggggagagctgattccaaagttgccctttgacctccacatgtgctccgcggcatgagcctgcccacacacatgtgaacacatgcaaaaatatataaaatgttttataaaatataaaaagcatgtgtatgattggaaaggccgtcattactgtcagtgtctgctctgtggcacttcctgggacttacatggctcctgaactgggtgacagcaagggtttgttcagtgtgggtgaggacctggctcataccccgctggctctctttagcctagagttctgctgcacaacaaggcagaggtctccaaggagccaagtatgagttcactaaatgtattttaagtggattgtgtcaaacacagagtgggaggcgtgtatagcttctcttgttttgatatttaatgatcatcttttcactttatcaacaaaacatcgaactggtgctttttttttttttttttttttttttttttttttttttttatgaaagccactgcctccactgttggaaagcctcagggaggcccgctgtgagtcggaaccccaactttcttgtccagggtatacaaggttagatttcagaaatggatgatcaaacctttggaagcatttcccaactggtatggaaatatctgcgagtgataacatgagtgtgctttgagaaaacttgtagtttttctttttgttttccatatatgggaacatcatctcacttgaaaacagccatacatggaggctgagcatacaggctttaggcaaaggcaggtggatctttgtgctgtccgttcaaagccagctaggtctacacaataagaccctgccttttaacaaatcatggtattgttaaaccatatcttcaagaccaagtggtctctgactgtgagagcagatctcatcagcccggacagacatgttgcttcaagacagaatgatatttttgagctcgctctgtgttttcagtttagtgtatgggggctaattaacgactaggaactaaaaatctatacaaaaagaaaatagcgggcccacatcttaactacctgaagttaaaggtatcgcagtgtggtaggaaaaggcaggagatgatcttgaaggggcttgaacagtcttcgcagaggaaggggctgtctccaccctgacctgcggggctaaaaggaggcctttggttatgagagaggccatggtctaagacacaagacggcagtgccagagcacagaacaaatcactgggacactgaaaacctagacggccagatgcagcaggagataggagaggaaacgcagaggctgaagaagcagtctcacacctttgctaaggagtttagccataaccgtggacgtccaaggtgtcagtaaaagccctccaactggagaacagcctaagacattcactcaggttcaggttgctgtctggagaggaaggaggcagatgagtaggtgagaaggctgagccagtgacttttgacctcctggcccagggctgtgatcccaggagtggattggcatggactgtaaaggccttcactgggggcaatccagaaagcaggtcaggtaggagagtggggctccatggccttttgatctggtagaagctggaatacaaaatccttcgctgcctgtctgtggagacagagaagaggagggctacaaagggaggtccgcaggagggcagagatgggtggcgagcaggtagacaagagacatagaagcgcattcacaagaggagactcaactagtagggagtcgggtcaccaaagaacttggaggtatgtcttggattgggcagaaagtggtgggggtttttggcagcgactacagagccaatctctctgttccaaccaccctctggagttttactacagaattaacagtgtcctctcccagaacagcttttctagtatatttctaccaactttccttcctcacctgagggacattattgtctccctcacttgctgtgatgaacaacctgatgaaggtgacttacggaagggtttgttttggaactagaagcagctggttaggtcacaaccataatcaggagacagagttgaacactaggactcagcttgctccctccctttttatacagctggggaaccccagcccacaggatggcagcacccatgttgtagggtctttccatgccaattaacttattctagaaatttgctcacaaatttgtcatctaggtgatcttagatcctgtcaagttgtttcccttgtctggtacataggctggtcagggttcattgtaagacaaggctgttacaagttctggccgccaggacacacttgccttgggggttgtgaattcctccaggttcagagtccaagttcccaaacctttgcttgcaacgttggagacctaagaaccttacccacgatgagtctgtccacacaaggtatgccttgaccccaggcttgacccaagggttgctaggtgtttgaatgaacatcttatgtggtgtgcagaatgatgaaaaacaaaaccattagactccatttcactgtttctgctgtgaagcctttgcaatcgttcttaatgtggttaaattcaagtggtttccagttcaggcatggtgcaatcaaatttcctcacaagggtgctttccaccatgacctctttgacgtcagtaactgcttcctgttgatgcgaactctctgtctgttaacccagctgacaacgtggtcagcgaaaagtaacgaaacagcgaggcctaggagaccgttcagcgctgtgctgtctgtttccagaggctcttaatagcactctgcagctttcaatatggggctcgttattcacacagaaacacttccctgcagctcttggagtctgatgagcgtagataggccttccagttcaacagcgcctcgagtcactatctaaattattcataaccgtaaatgtaattgctgttctttgattttgtttttctccatcttcgctgtggccaatgtgccgtgactgtttcttattcaaaacgtttcattcccaaaacaacatgtctgccaatgaaacattatttgtaaatcaaaatgatgatgtagtctagttttaaacaaagaagactccttcttagtgtggctgtaagggtgagtaagtgctacagagggaaagggactaccacgctggcgtgttgcagtctgccaggcagcccgtttgttttgcgagaataatgtttaaaaatccagaaggctgagaatcagactctttattcagtgctagagaactgggaagctgactggaactgagggctggcttggtataattttggttatcaacacaattttgtgactcttaaaaaatacttcctagaatgaaaagtccttacctggtcaaggtcattgccatgtggcattaggaaatgcttctgctcaacagctgggtgtggagctagggggactctcatttccttggacctgctagactttgggttgcctttaaactggctatgtatcagggctgtctgtctgtgtgtctgtacatatatgtgtgtctatctgtctacgtctgtctgtctctccctatgtatgcatgtgtatatgtgtgtgtcagtgtgtgtgtgtgtctctctccttgtcctcctccccgtgtcctgtgtgtgtgtgtgtgtgtgtgtgtgtgtgtgtgtgtgtgtgtgtgtctgccggcccttgtgtgttgtatataatgggttactgttggatgggctgcagttctagtcctggggccatgttggctgaagctgtagtggagaattatgcaaaaggggtgataatagtgatagttggtatcacgttttgagcactttctgtaggccaaatactggtcaaagctcttggcttaacagagttagtactcgaatttagtcattttgacacctccattttgcaaggtgagttgaaagaagggaagggaagagatggagggaaaaagagaaaggaagagagagaaaatttgaataaagttcagcagaagctgcctgtacctattgagaattttgggtccacagctcaggcattatcacagagataccaaggacttggtactgggcacaatgtcttctttatcgtctcctaataagttctgtttgttaggattctgttgaaagggcctggcactctgcggccccttgcttctgtctatgatcccacaatcactgttgctgtaggcattttgccctagattttaaatcaggaagctcctccctccttaaaaaattgtatgtattttacttaaaattttcctggaagtaacagaaaacttacctgaggctatacaagaaaggacctaatgataaagattcacaaatatgagaggcatggtggtacccgaagctaggaattgacacaaggtaccctggtgaggtcttctaatcccactccctggtcttatttctgctccactctatatttcctgcttcattcttaaccttgcatttacctatctgtctgtccatctatccatccatccatccatccatgcaccattctgttacactaaagaatttcatgtattcctgccagagacagcttcagctctcggagtcatgttctaactcacagctcagactggattaaaattctttatctcagtttgaatgttctgggaaagagactcaggaagcgtagccttgttccaatcagtcgtgtgctggagacacaacagttgtctgcgtggccctgaacagatacctccgaaggtggtcttcctgcagtcatagaatcattttgtcacttgtcccatcttagtggagctctgctacatagccaggccttgcctcatctagttgggtgtcagtttcaactcccaggagcgacctagaatgagaatgttgagaagtgtctcccgctcaggggctatgtgttgccagagagccagggcagaaagctgacacaggcagtgggtgacaggaaccgaggcatgtgacgacaggaattgtattattgccatgcaccagctccttgaactctgtgcctgtaactaatacagggcgtggggaccgagggatttctgagttgcttttattccctcaggtgttcatgattccttgctgaaggctggcatttgtggttagttgaatcagagaccagagagaggcacaccagacagacaaagggcttggctttgaaactgaagcccaaccagtctcctggacattgggtttcctactacacaggccagggcaaatctgccttcaaagagccaaagccacaggtgacgctcagcagatacttgggctcagcttctaggaaactgggtgctaggagtcctgacatggctgtgcatacagattttaagtacagagagaatcccctggctgactctgccaaggtaggattagcggagccctccctgccctaaaagtggatcacagccaccttaatccattatacagtccctccctaataacacaggattcccctaaagggtttcatcttatttcacagtagtgtggattgggcaggtaaccatcagaagggggcctttgaggtactcctcctagctgccaagatgtagcactctcagctccttctccagcaccgtgtctgcctgcctagacattgccatgcttcacgccataatgataacggactgaccctctgaaactgtaagccagacccaattaaatattgccctttataagagttgccttggtcatagtgtctcttcacagcaataaaacccaaactaagacaccttttttagccaacattttagaacagggtcaataaaagttcaggtctctagaagtttctttgcaattaaaaaaataaaaacatgttgctgattgataaacataattttagcttgtaccttgtcacatggctttcataaactagatcttgtcttcatttcatcccggttgcctctcctctatcttgactttcctttttccttgacttaagtgctggtagcagctgaggggctgtgaatggtacccagtattctagtttggtgccaggcccatagtagaagtgagactctggatggaaagaaggaagaacattgaacaaaacatccttagttttaagtctgaatatcccatttctctccagatagagcagaggagaaagtgctagattctgtaggtcgaggatctcccccccccccacccccccacacacaccagggctatagcaagagccaagatggaggggaaagagaagacctgaaggcagcatattctagcttctcacacctgcagtttagaccagggtctggcctttcagaatttgggatatgaaaaagatattgtatgtgaaagagaattccttctaaatgtccttatcctctcatgaccactgctgccgtggaaactcttgccaaggacgctgacaacagcttcagaatggccacttacctatgggctgacttccagtaaggggtgttcactaaaatggggatttgagtggctgactgcttccatgaaggtgacagtctggtgctacttattcagggatgctgtagggtggcttttccatcacaccttcctcacaccctggggctacccctccaaatgagttctacattagcataacaacttcccaagcctgtattgctttgctagctgtctctggagtgctcacctgccattggagccatttgctaatgtgccccacccaccagactccagcccattgaatataggtcagccattgctcatgtgaacccattcacccaattctgcccctccctttgccagttgaactcaaatgagggccttttgcttagtcacaaagcctgctatatttgtattgttttcccttgggctatggggtgacctgaaaagttgagttggtgaaagtcttttgttattatgaactttgccattatgttttctctctcaaataaattcatgcttctagcatatatatatatatatatatatatatatatatatatatatatatatatatataatttcaaactccaagaaaaggtgggttcttgtttacatacatcctttgataaaatgtcagtttgcccacatagtgaccacccacattcccatccccagaaagaacagcatcgactctgaaggagagatatatacacatacatacatacagggttgattccctccccttctgttgaggttttacttaatacaggaagtaggaggggttatgggttgcactgccctgatagagatcaactttataatgcagcagtggtgcacctgaaagtgagtcaaagccagactccccaacatagttcagtctatctgcgcccccactccccctagcaaaactggtaacctttcaaactctaaggtgggttcttgcttgtatgcatcctttgacaaaacaccagttggcccacacagtgaccacacacattcccacccccaggaagggcagcgctgacagtgaagtcctcacctgcaggccttgagatcaggcacctccctaaacctcatgcaggtgtcagatgtcccatttcctctactgcttccttcattgctttaccagaatgtttagacttgctgtttatattttaagaacccacgtttcttgtgccagcctttctaggatggaactgatctgctctgtgtgtgtgtgggggggcgctctttgttgggtccccagtaccccattagtgctcagggaaggaagtgaggaaatccattgatgctagatgtctgtaagcagaagcctttaccctgtgtgtctcagggcagtggcttgctgaatgggcttttctgtcattaaatagtctgaccatccgtgagttcttgatgcactgttctcatggtccctaggtttctgcagagggagcttgttaggagtccatttccctgcctggtgagagtcactgcaggtggaagccaccggtgtggtgtgttttacatccacttctaactcatggtcttttgatggaccagaggactttctaccagacactgtcagttggacttccatttgtctgagttgtctaaagtggtttacctgttctatgttttctgctcatttgggaggaatggagagccctcccaagtgtcctctcctctgggattaaccctgtgtgctccactgaagacatttgcctaggacttaatgcccatgctctcctcccttaacatgtcgggctggaatgagaaccaaggtctcttaatggttagtgacgtagaaagtcaaggttgtatggaactaccttaaagagagtccatgccacccctccctaagagatcacagacctgaccccacacggggctaacctctgttcccacacagcactctgcatgcttcttggactacgtctcttcgaggagaatgatgctggtgagcaatgagagtctaatccattcccacacgttttgtttaggaccgtctgttctttgtcatggagtttgtgaacggaggcgacctgatgttccacatccaaaagtcccgtcgtttcgatgaagcccgtgctcgtttctacgccgcggagatcatttctgcactcatgttcctacatgagaaaggtatcatctataggtgagtttgcatcccgggcgcctcttttgagtcacccccctgcctggctcctcacttagcccagcctttcaatttctcgtgatcattgactcaagtgtttagcaatgaaattcacagaaggcccaagtattcattagagttatcacagagatgaactcttgtctccaaactaaaatgtacagtctggattccagagagattaatatttatggattggttcagccagcatttgctgcagtagccaagccctggaaagtgctggattcattactgttctcctcttcccagtctaacattctaagtgagttggctaatgtgacggactcattctattttaagagctggcaactgagccaaggtctgtgtcttaactgttgctgatagtagctgtaatggcactaaggtcagatgaggtgggtttgccaggccacagctacgcctaggaatggggcagacaatgtttctcatgtgtagcctcaacagtatttgattacatgtcacaacacaatcctttgatcttaataggctgtaatttgagtggactcaaaatccgattggtgttctcaagggatatccggtgaagcattaatcagagagatggtggaccgcgtgtgaatggaatggctagcaagtgtcctggtgtgctcgtgttgacattttctgttcacctgtagctagagtcttcccactctgtaaattacgttaataccctagttgccacatgtgatggctagtttttatgatcagcctgacacaatcacaagagccaccttagaagggactgtcaatgaaacattgtgtagatcaggtttgcgttgggcatgtctgtgggggaattgtctcagtcacattaattgatgtgggaaggcctggcttgaatgtgtgtggcactattctctgaagttgggtcccagatgatacaaaagaggagaaggtgagctgagcacagtttagcctgtatgcatccatttcccttgctcttgactgtgcgtgtgagggattagatgtttcaagttcctgctacctcttctcccctgctctggtgagcctgtggtgctttgaaggagaatagcccctgtgagctcaggtatttgaatggttcctggttggttgatggaattgcttaggtgtggcctttggagaatgtgtgtctgtgtggataggctttgaccatttagaaacacactcctggccactctctctctctctctctctgtcactttgtctctctgtctctgtctctctgtctctctctccttcctgtctggatcaggatgtaaactctcagctactgctctagcaacatgcctaccgggctccctgctgtgaattcaccctctgaaactgtaagaaagtccccagttgaatgctttctaccgagtctcttcacagcaacagaacagtaagagaggaactgaaacccagcgttgtgtgctaaaataatcctttctccactaaaaaggatttaagggagaaatgtgtttgttcattttatcacagcaacagaggtgaacccagcaatgcactcgttcttctctggtaatacagttcttgctgaattaccctacactgtaaaacataaatctgttttatggtacaatcctaaatactaaaacaaagaattttctgtcagaaatttactatctgtgagttgcccgtctctaccctgagtgccccaaagagagactcttaccacattaacttttaaagaacaatgacctcactacttggaatgacttccattgtaaatcaagctaattattatcagccccacaataactgaattgtatacacgttccaagatcaacactttacctacatttgccccccgaaatctccttaacatcatggttatcgccattgattagataaataattcttagggagatgtactaaccaggctgctaatggctagagaactgagagctcaaaccctgtctaacgaatggttctgctgccttctctgttcaggagaaacttgaaaactggagagccggtatcttattctccttatggtgttgaggtaactcttaatcgtgaaaatgaaggcagagggggatgaggagtgaggcttaaaggttcacgtggcctgactccttcgggcctctctctcctcagaaccctgcactgatgcaagggcaagcttgctcctctaggttgaacgccatacttccgtctgctctgtgaatgttgttctagagaacattgtcattgcagtcgacggtgtttccggtgaggcggcatcgatccacttcctgaagcttcctttcagtttcttctatctgtggctcaattctaattttcaattcaattctgattttcacctatttcacttactcttgaactcaggcccccatgttcatagtctaactgatatatatctgactttgaagggagaactcttaatcaggatagattaaagtgctatttttgttctgcggatttgtttaatgggacacttttaattccatcaggctcctgactgggaccagagtcttaagggtgaggctctgaaagccaagtgcttggaattcatccagagtcaagggcatatactgagtcacagagagtgtgaattagatgcatgcaggaatctaataatcaactgaggaacttgagacagctctgtttatcatgtgtgtcccaagatggcctttataagaactgaaatgctctctcttgaagattcctctgagctgtctaaataaaattgttggttggatagttggttggtttgggaggctttacctcctgggtgtgtgtggcttcttgttcagcaagtcataaagatgataccattggcaagtcctcaccaagtaggatctcagagaaaaggggaagaactctctccaacatgaatttctctctttccattgactaaatccatggggtagatcagaagacaggctggctatgtgttttatagcttttgtgcagagggaacaaagcctatgtcctgggagactcagctgcagaaggctctgctcttgtgcttttggtgtagagactgttgctggccagagcccttacatcaaaaccaaggtgagctagagagcaggcagtcatggaatcagcaggcagtcatggaatcagcaggcagtcatggagtcagcagacagtcatggagtcagctttgacagaggagaaaaacattctggttaccagggacccagatggtgcattaatactttctatgtaacatggatgttcttccaaaatcaaacagaaaagccagaaaaataaaaaggcatacagggcacatatagcaagcagcacaggaacctttttctatcatgctccataaactgtattaaaggagaattcagccatctcttaacatttcaactgcaaaccactcagccctatgttacacacttgctttgatgtctctaaccaagtatggaatgtatttgtgatttattgggtaaagaggaattacagcaatttagatcctgatgcctgctgaccaagtttcactcaaacaccgagtatatctcaacacccattctaccatgtgagagcctgattgtatcaagtcttttgcagcccttggcagactgcaatcagtgttcactcctaaagggctgttacttcactgccccattttccagatgtgaaccagcctacagaggccaacagtcagacctggcatgctgacttctcttacactcacagagtatggtattaaattttgacctttcctgaaaatcacctttgatatctcttcagaaaaacttgcttctgccttgtttgtcttttttttttttttttttagctcataagactgtggacatctgtcccaggacaagcactctaacagagcttgctattcccaactcgttcttaaacttacagttcagtgaggttaactctatccctatagggacggttctgttaaactagaccctgaatacagcagctgactctctgtgaagataaacttctcacacattgcttacctcttttctcaagagcaggatcaggggtattggggcctggttggttcagatacttatgtggtctgaacttagttgggtgtggctttgcttagcaaacccttggtgagatcactctgaggaacgttgcttccttggctagagattcactaggaatttgcttgcaaatcagttctgtgttggatctatggcagatgtttcatgcctgagtcattctgctctgcagttctccccttctggaaaactgggtcaatgtctctggttcccatctccccggcctccctttctcctcgccatcttttatgagccaacttgcgaactccccagataatctctcatttgagcccggagttttgtagtcttacctcacctgttttaggctgcatttccatatttgcatttttcctctgtgttcaatcagaagaatctctttgaagaaaggtgagagtcaaactcagtagccctgttaattaacactttctcttccaatggcatcattctttccactgagaagcagtttcgttccttcttcacttgctacacagcaaggatggccacctgttgccatctgtcattcagaaaggaccagacacagaggtgctcagagtgtgagtaacttccatgggaaattttggctctgagctctccccagaactttttagtcataagcctgactcccttcttgcccgactttgctcattcagagactactcctccattgtcaccagacagtgaccaacgttccgtattctttttccaaaaatgtatggagaactcacggtttccagctaagtggacttacctgacatactgcctctactcagtctcccctttcccacaagaaaacacttggccttttcacttcccctgagcaacccttagagaccactttgtgttcagtaaccatcgtctcatagccaaggacagacgtaaggttgaacaaaaccaataatattccctggtggaggacacagtacagtgatggaggcagttgtcaatcaagtctgtccaatgccgggatgcagggaaatgcagtgtcctggttgagaatttccccagggcgaagggtctggctagggagagatggaagatcttcttaggaagtaactcttaggctcacgtcactagtgaggaagaagaaaagtatcttttaggctgaaagaacagcaactgtagatgcccagtatcaggaagagtggtgagttctaaggcttttaagggatgtgtagttggaaccagtgaggcatattttctcacagttagcactccattatcccagagtcatctgatgactttaaaattttattagacgtacctcataaatagtttatttaagagttaggtaagctggtcatgttgccaatccctggaggaaccaaccagtcactgtgtgtttcttgcatccaggacacccaacaataggatttttacaccccaaagattacctaaggccagctttgtttttacaggtgaggaaactcaggtctcaaacatgcaaccagcaaattgcttcacacagcagaggctctgtcaggatgggttgtctgcagtttgtagtcccatgtccagaaactgaaaataggattaatttttaacttcctgctcattgatgagttaatcaggtgttctgaggcatccattggggctccatttcatcaagggaaaatctagtcacagcaagagcaggtcaggaacacagtgtgccacgcaccgtgtgagaagggttagctctgcaatgagtgtggtagggtcctctccttggtggctttgtctgtaggatgagatagacaatccacagaccactaatagcaggtagagcccaaaactggagcatgcccagtatgtcagttccatttcatattacactctcaaaatacctcacaaaaagaactcagagaggggaagaatttgtctagttcatggttagcttttgaccgtcatggtggaggaggcacgatggaattcatggcagcttcatctgggtggtggtagcttgccccatggcttgttcatattgttccaggcagattagggagcagagagctgtggccatcaatactcacctctggtgagccacttttataagctaggccattttcccaaaggtcccacagtccctcaagataatgctaccagctagagaccaagtggtccatgcactggcatgtgtctgttggggggcagttgcaattgcctttacagaatacccaaggtatcttgagaatacagggaatgccattcaacgtgagacattcaggcagacttcatggaggaagcgacatctgaggtgagtgtggaccgttacaactgaacaaggataaggatagctttgtggctgtggaaagggaccacaagagagccaagcagagaagcaaaaagatagatggtgaccagataggtagaaactaacgtacaggaattgtggtagtaccaaagcctaaaggttgagatacaggggaagagggtcccctggagacagcaggaatgaaactgtaaacggcttgaaatgtttggcttctgcatcttttaggattcggcaccattaccagtcacaggaagcctaaaaatgccaattacttaagccatatagaaacatgattgtcttgtaaaactcagggtcagcccagctcggccccagaagctccacagactcctgtgggacccggaggtctgagtatccagttctgacaccttcatggccatcttagtctacaatactagctaagagtcctgggactgctttgacttcaaatccaggtagtcagaagggctgaagggcgctgttccaaactgggtatgctcccttcttgaaggtatacataatgtatatcatggggtttgctggaagttggctatatgactgccccagctgcaataaagactgagaaatacagtgtaatgtttcaagaaatcatctccagctaaagtccagcctcttgttgttaagaagggagaccatagttatgaggtgagaaaaagtatggacactgtctttcccagggggtttagactgagcagtctgtgtgacaggagtacattttcgtcttgcatgtgtcaggaggtagtggtccatgtggacatgtgcatggtgggtggcaacccacggggtttctgtctgagccagttacagtcttgtgacctaagtaggtttctatctgaggcagttacactcttcctgctgagaacttaatgctgacctaacttttattgtaatgttgagacagtccatgtattctttttccccattaattaatttattcactttatatccctactgcagtcccctcaccttccaacctctcccccccaccccccagctcacagctccctgtcccctctactcctccccttctcctctgagaggagattaggcacccagctaggaaaacaggatccataagcatgcaatagagtcagggaccacacatgaacatcaaactgcacttttgctacatatgtgcagagggcctaggtccagcctacgtatgctctttggttggttgttcagactctgagagaccccaagggtccaggttagttgattcttggtctttcttcagagttcttatcccctctgggtccttcaatccttcttcccccaactcctccacaagactccttgagctctgtccaatgtctaactgtgggtgtctgcacctgtgtctgttagcagttgggtggatcctctctcagaggacacgtatgctgggctcctgtatgaaagcacaacaaagcaccaacaatagtgtcagggattggtttgtgctcatagaataggtctcaagttgggccagctattagctggctactccctcagactcttctccattcctgtctctgaacctcctttaggcaggacaaattccaatttccctgaacctcctttaggcaggacaaattccaattggaaggtttttgtgggccttctttctgtattctttctgctaataatttgagtgattttctgtgaacctggccagcggatccaatcctggttctggatacctgggcaaattgctgaaggctccaagccttttttaacccactatccacacacgtagagccagtgtctctgtaggatgaaatggaagcctgtagtctggcagcttcaagcctgctatgtcacgaggacattctttttcacattccagtcaatcatcaggtgatctcgattccttccacttaggaggttgaaattatgcttaggacaatgcagctgagatgagattcttcggacagatggggtcttatcttattcagccctttgaagagcaggtttggtgtttgtttttttttttgtttttgttttgttttctttctccagaattatttgtatttcagttctcctttggagcgatgattatttctcgtcttatcctatatttgttacaaacctttgaggtgatttttctggcaaggctgttgggtctcgggacaggttgtgaaagaccctgactctctaatcttgtctcagaaagaacagttggactcttggtttgtttctttgtttaccccctctagtgaagtgaaacaaaatttgaggtggttaatttgaggggaaatgcaggggtctttcaagaccttcggtagactgagaaccctgaatcccagtaatgccttttctcaaagatccagcttagtgtcagagcaaaacccaagccccaggatacctaattgttttgtgtacttcattcattcagtcattacatcagagtggccgtcctgacatgccatgtctgtgcctggctttagtgtcaacgaaagctgtggttatttgtaactcattgataaatgtgctaatcggtttccctggctaatgaaatcagaccaccagtttggctcttttttcctaccaaattgaccacaaaacctgtttttcattgtagttagcgacaacttggatttatctgctgagcaataaaaatgcagcaggttgacctttctgtactggctgaatgccaccatttgtcaaaggcaattgaactggacagctcaacaaatgtctgaactgccccctctactcagctttgtgtctgattcctggggatcaaaggaggatatagatgagccctggcctcaagctgggggcttgctcatgcccttagcctgatgcttatgaagtatctcccgtgttccacataaggctctaagccctggagaaatataagaaataaaataaacaagtccctcttcctctcagggaggttacactctagcccaagcagacaagccaaaagtatggaatgataaattctatgaagaagatgttggataactgagggtaaaatcgatggcgttgatttcacagggagaatcaagaaaaaacttctccaaataggggcctttgagcaaaaaagaagagccggtctaagaaggaggatttatgtgaatgtctcttgggagcacattcaggataaagccagggaaggaggagctgggcatggcttgggcgtgtccagggaaggcagacattgccctcacattgcttctcactgtctagatgattgaaggctgcatcctagcctgtttcttacctgctcattttcattcagtctcatgtatcctttagttgttggcacgggacatagtgacatttcttcatttatgttttacctctgtctgtatttgtccatcagaactcagtgtgtgtgtgtgtgtgtgtgtgtgtgtgtgtgtgtgtgtgtgtgtaagattgatagcaccacggtgtctctattgatcagagagccagagagagtggcttcagccaggcctagaggtgcaggctggtaaacccagctgcccaggaggctgaaacgggaaggatgcaaatgtgaggctagcccctggctacatggtgagttcaaagctagcatagataacggaaggaggccctgccttacaattaaaagaggttttttgtttttttttttttttttttttttttttttttttttaaggattaggagtctgtctcaaaggtaaaacccttgccaagcatgtgtcagtcctgtccccacccttaaaaaattaactgtttacgtataacgttaaaagtacattatgcacagacatggccaaaaagagcaattgttagctgctgcactgggaataccatgagagctaatgctccttcgttcgtattcctgtcgggctcctcagtcccttttcctcgtgcctgcgagtgctcccagtagtgttctgtgcatgtacaggctgtgtctgaatgttgttgaaaagcaaacagtggcctgtcctacgtgtacagaattgttcctctgtctctatagagatacaacctaaacctttacaaaaatgtgaggcgagcccgcctgcttctctccgaagggtctcacagtatcggagccctggaagaattttgctgtttgtgttggagaaactgcaggggttttcagattctgcagcaggcttataaaaaatcttatcttagcagcatagcaacaaagctgtcttccacgtggggaggagacgcatcgatcgctgtcactaactgggcttcagaatagtatgcacttccccatggtgggcagtggcgtgcagcagtggaatacctctgttgaggagacaacaaaaccaaatcctgtcaagggaggaaaatgaagagctagctcctgttttctgagaaaaggtgggggcagtctggaggcccagccctaccccagagttttcagtgaagcaaggaaggggataacaattccacatgattccaggagtaagatatttgcccctcccaagtcacccggtgaagattttagcactcccttgacaaagaaatgggagggaggagtggaggaggccaggtaacactggattacaaaattctttctttagagagtcaggtcctgctatggagtccttcccaagggacccatagctcttatattgattaaaagaagagagacagacagagacagtcagaaatcaggaaaggagacaacgcacaaggcagaaaagcaggcctttatttaaagaaaaagtcctagccagctggggttgagatagacactggcatggagtcagcttccaaagctaggaaaatgttgacaagcatgaattgtaactgagagtgctgtggggtccttcacttccttgagatactgagtctcgggaacacagggttggcctaaggaacactgagggtttactgtctcctctgtgaacaggttcaaacctgccaaaggctatccgagttcccttctgactgatttacgtgtgtgttcacagctcttctttcccctctgcgagaatcaggttgtgtaattcagaaggctaaaaaataacagagcagaaataagtcagagacgttagctgaggtcctccacctctgccaggaaggtgcccacaggctggagacctctgtgaggtctttgtttctccctctgcagatccccggccactccaagaagcctgcgtgtgctgttgggttccagcagcatttaagaagtaaaaccctgttctccacagcttattcctgtaaactaggaagtttgtcctcacaggccaggttcccagcatttcctggcatctcagccttggcagcaggcttgggaaaactgggatgttttatggccgggaggctgaggcatgatggctgtgtgtttgccgcccagtgtgtctgagggctgcccagcttccttcagtctgccacggtgactgtgttcatattctggttttataacaagaaagagggaaagttgggctcagcgtcagggatgttgtcagagtcatcggccaggaggggtgccccgtgctagacgttgtggctttatctctgtagttcaggtgctgggattcaaacctgagacctcaggagcactaagagtgtgctcccacactgaactataccttagcctacgaccttggttttcttaattctgaaacataagacttactgttagaagctcacagtactgtgttttgtaaggatgaaaatgtgtcggagatgaagatgaggcatagctaacgcaccagtctatgcaatagaagaattgagcagtgcttctagttttggaagagtgtggctgagcttatccaggcaagggacagctcagaccctgtgctgtcgtttatcccggacagtccccagttcactctcagaggctcggtttagatagaacatttgccaccacctatgaagaggtgcctgtcttctactctcctccccaagatacaaagccaaagggaaaaggattctttcagatgtggggtgggggatcccctgagtgggggagactcccctccgtatctctctcttagactgttcttccccagtccatgagtagtaggttcagcccctttctgggggatatcggtattaagtcccatgcatagagtatttgcatgtcacccatacaaatcctcccatttactttaaatccatctctacgtggtatttcaaagcgaaatagcaggggaaaagtctatccatgttcattccagagagaactcttgttcctgagtgttgtgacccatggctacaaatccacaggtgcagaggcttgactttatttgcacgaggtatacatttatctgtgcttgcaactttgaattcattatttatctattcatccacccattcattcaacagtattcactgaaacctactgtggacttgggaatgcacctgtgaccaagataggtcatctctccagggatctagatccttgtataaaaccataaagaagtaaaagtaatgactagagtagaaagaaatggttcttgtttgcaactttgtttcctcgagctaaaggaggagaagtgacagacaaaaaaccctccatgcttttcattatttatcgtctaaagtatttcttagccggttcagactgctataataaaataccacggtctgatgtatacacaacagacgcgtccttctcacaagtctaaagtgcgggaagtttaagatcaagatgcgggtctattgatgtcttgtgggagtttttttttttttttttctggtgtataggaatgaagcagccagtgagcactccctctgcagtccccttgataaggacactgtctccgagggggcatgcccagtgcacatgggtatatgcataggcacacacaataaataaataaataaataaataaataaataaatgtaataattttttaatttcagtagatctcggttggggggggggtgtctcagaaactagggcagtgctagaattttccagtgtactgagtgttttccacctggttggaaacattgaactctctatgtctgggcagaaagactgctcaaggagaaccagtgggtaatctaagcacttggggaaacagtaggatcctgtctttcctcgtggcatttctatgcgtgggagtggcttcctataccccagcctaggccaaggggagcactgtccccattcacttggtttgctagcccgaagtgctacccctgctccagctaagtttgcaattcctaggtgagccttctccaggagagctcttcttccatgtctccctagccagtctgtgcctcccaccctcccaggaagcttattttcactgtcagcaaactcagagatgtggagtccatcttcttcacagcccctacgaaggagagaaggctttgttaactggctgacatcccctattcccagactaagaggaaagaagatataaggggaatccttccatccttcacacagtggctcttcctcaataggcatttgatgaaatagtagtaacagttcctactggtggaggccttcggagaggcctcttacaaatcactggtgtttaagtgaaactactgcctctgttctttttggagatcacacacatcctcaccccctcctctcccnnnnnnnnnnnnnnnnnnnnnnnccccctccccctctccctctccctcttcctctcctgtgcactgcctacatttccctgctaaggtcttctttcctgttacaccagaaacaaacaaacaaatagagaaaagactacaaccgactagtgggctctgcacagcataggaaacagtcaccctcctgctatgtggatgtaatttgtcccctccaaaacctgtcttggagttcagcgtctgatgtaacagtgttgaaagactctaagaaatgattaggctggtgcggcgcacacaccttgaatgctggcactcaggagacagaggtgaatgacttctaaggtggctgatctacacagtgagcgctggtctggccagggttgcacagtaagaccttgtctcaaagacacaggggaggcccttaggacataaagagaggttgatagagttcttaacagactgaatttgttgttgcagggacacacagtggccccttgttctctgtgtcttctgcacctggcatctgccttggcctttctgctgtgccctggtagcacagggaccttgccacatgtgtctgtccagtcttagactttcagcttcataatcacaagctgaataaacgcttttcttttatacattgtcctagcctcgggtgttctgttataacagcaaaggacagactaaaacatctggacccttatgtgtatcatagcagtattcatgtcaaccaaaatattgaaataacctaaatgtccatcaaccaatggatgaagggaatttgccttggaacacgacttagctttttaagaggaggagggaaacgctgtcctttatagcggtgaagatggtcctaagggatatggcactaattcaggcaagccggacaaaggaggacaaacagcatgatttcatttaactgtgtgatcccaaagagtcaggcccatagaagcagagtagccttgtgggtgccagcatctagagggaggtgctgaacaaagtgttcagagtttcggtaatgagagagaaataaattccagaagtccgtcctacagcacggggattgataacaaacaacgtgtgatggtttctcagtttgcttacgagggctcatcttgtgttgtgttgagtactctgagcacagaaggaggggaagtgcagcaattttggagataatgggtgtttaatgcatcagttgtagtgatgactacatggatgggtacttaaccaaacataccaaattgtatgtgctaagtatttgcatcttttggggtcaatcatacctcaataacttaaaaaaaaaagaagtctcctctttggtccttcatcttttaacacagttattgaaaagaggaatgtgttgaaagaccagtgtctctggttccaagaatcgccagtgctgatggtttttaacttattccgtataacagcactggcagctgacacaaccttttgaacttccctatttctgaggcactaaaagagagggatgaagcagaagggcgagagcagctcaggttggagtcatgtttcctaggtagcaatacaagtctacctaggtagcaatgtctcctcttgggatacagtgatggagggtagactggccactgatatcatcaagacccaagcaacagtggaagagaaagagaaggtagactctagtcagtaacatgtctgactggtggaggtgcacacttttcctttctgtgagacatcagtcttgtgtgtgcaggaggaagctggaagctgctagctgtgtctagcagcctctgttgctgcctctggggaagccactctgcctgagtcccctaccccgctccttctgcttggtgggcttgttttgtattcagggtcatttccttcccaggaactggggaatctgatctaagattaaagcaggcttagtttttcccatgttacagaggtaaagatgaaaatactggtagcagttaacttgtcttgcttaagggttaccatatggatatattattacaaatgaggaccttcttagcatgggaggtagactgtgccaatgcacggtttgcagagccatgtagagacagaagagactccggaaagatgccccctgactggtcctcttccgagggaccaggacatagagtttccacttactgtatttggggtgggctgtgagttatggaataaatacactgtttgtggtttaagtgtacgcttggtttggacccgtcaccccaggctgtgcacacgacactgtactcatttgcccctgcttggctgatgcctcacacagatgcagactaggctatggtctagtcagtcatggtctagtttaaccatgaaggaaatttctccaccattccattatgaggatgaataagccctgagcacctgctgtctactgtgtttgcttttgaaactcaagacaaatgagataagagacactttcacaagaatttgtctgttggggctttgaaccatgtgtgtatgtgtgtgtgtgtgtgagtgcacacacatgtgcacacatacacgatgtcttaaaggcttaatgtaggcaatacaacaagagcacagaaaaggcagtcattttgatgggaaggccttgaggaaggaacacctcttgaacctgtgtcaatgtagggcgcacctgccagataggttagagcaggaaggatagaggcatggaaactaagaaattgtgaagattccatgtgatcaggatgggagcccgggaaatggctgggatgaagtcacatctgaggaaagctgaggtcggggcaagggcagttttgagatgaagctacaaggtttcagttttccttgtctgtcagtggcagccatcagatgtttggggaacagaccaacagtggccagcccagaaaccaagatttcagaatttttggtcataggccaggcaggaaacaattctccaagcaagccagtggggagagaagagggatggaattggtagcgcagtaaagcgaaagtggacagaacgaacatggatggtagagcccgtagacatgaaagatggcccaagatttccagtgatgagcttttaactttccccacccccaagtcaccacagccaaggggtgactttttacttccagtctttttacttccagtctttcaaagtctgagaagtcaagacagccctagtagctatgcccagaatgcagttagaaatacagactggcatctcccaagagaggagccagggtagaggtttacattcaagagccaactgtccaagtgatgtttaaactcatgggattgaattccacaggtagagggcaaaggcgagtatgcgtgggagggaggatcctgaacaggacagcctggggtctgtcacctcagcatgctcaacttatatgtgcaaaatggcttccagtcttccagcaggcgactgctgcatgacttgagagagacagaggtacctttctcagattttcacaaaggcgccgtgtgatctagcagggatgatggaagttgatgtaggcaagaatcaagaacagagcctcctagggaaccgcccacccttccagggagggcagggaggaggacctgcctaaaagacacttagaagtggttagagacttacataggattattgtgcttggttgcttccttagtcaccacagggatctctcatctgcccttggtttcgtgactcaggcggacctatacccccagtcccaccaggtcatagcatcacccccttccccagaccagctgggtttgctggtgatctatctctgttgggttaagattcggaactgtcacacttgtggctgccatgtgctcctgaaagccaatgctaggcaggtgaccatcatccttacgaatagctgtctttgtttagtgaccatcgttgtgcctgctggtggagcagagaaagcggtgctctctgccctgtggttcatccaatcacaaccaggttctaggcagccaagattcaagcaggaacaagccacagcagcccagagcaggaggaaccttggctaccctcaggtccttccttctttgggccgggcagggttggggaaacttcttgccctggtgactgcatagagaagaaaggatctccccagaacaatggcttggaagctggcctggattcctcatggcttagctacagaggctcactgcctcccctgtctgtgttggttgagacactagaaatgtttcttgcagaaaagaaggcatgtccctgtcctggcacgtgatcatctgcccatacagacctggcccggcttcatctggcatttctgaccttcttcgcatgggtggaaagttacaggggtgaggacgggtgacagcaacacctttctggccaggaatgtgccatctgacccagatcaccttgtgtcagcaggatccaggccaatccagggacatcagaatgacagcgcacctcagtgaaacacagcaagctgtgtgggtggggcaccaccatgttagtttcctaagccagccaggcagtgctctttgcctgtgaaatagttcagaatgagagattcagagttggcttgagtaagaaactgagtctctttccttttttggggggtggggtggggtgggttttagggtttttgtttgtttgtttgttttggtttgtttttggtcttgactatctgtgaagtgtaagtcttctgaccttcctgactttgggcaggaagccttgcaagagctctgagagaggatctcctagaatttattctgtatgtgggctggtgatctggtgccgtgtgttttttgtgatgtgtgtgtgtgtagatgccagaagttaacaggtagctggggggaaggggcgagtgtagcttcctaaataactctctatcttattttttaaattaaaaaatattattatgtgtgagcatgaccttatttttaaaatcaaaagtatcattgtgtatgaacatggagtgtgcatatgtaggcacgcgtgccatagagtatgtgtggaggtcagagggcaaacttaggaagctgtgctctccttccatctttacatgggttcggggactgggctcctatcattaggcttgagcacgcttatccactgaacaatcttgctagccctttattttatattttattattttattttatttgagataagatctcactcccttatctgaaccggaagctctctgattctgcgtagctgtacggccagtgagcaccagagattcacctatctatctctgctccagcctgacagcactggggtcacagatatctgcccagcttttataaactgggcactaaggatccaagctcaggggcgtatgcttacccacagacccttgaccgatgaccgagccatctcctcagacccccatggcctcttcttaaagacagaattctaaagcataagttgttttcctgtcatctcgtaggggaaatctagagaggaatccaaggccaaccttctggagttttgttccccagaggccttctctggaaaagttaggaaactagctgattcccaaaggaattaatttattaactttgaacaagaaattaattccatatgctgggaatcgtgttctttggtttgggcttaaaggattttctgtgcttctaaatggttttcgatgtactgttccatcactctggagttttccatgaaatgcaatagcgaatttcatcaaatgagcctttcatcttgatgaaggacccagggctctcattactccttttcttcctgaactgaccttttaattttatgcaggatgcacaggggcaatttgtcttgtctggtcctaatagcacattgccgagaggatggttaatcaccgggcacacacattcgtcactggtggttgtatgtacaagctcaatttttcttacattaactggagaaccagactgagccagagagagaacggtgcatctggatgggtgcggaagggatatttgccagcagatacagagagtgctcagaccatttcttcccctcaggaccactgtgcagagaacactagtgggatgctagggaaagtatctaggctgtaaggacttcacacttaaggggcatggaaagggagtgcaaacaaatttgggaataagaaaaattaacacctgttcagcttgcctaaaccagtgccttgtttggggaccagagagctgaaaagtaagcttgagaaaggagaagaaatgcagcagaaatgttagcgctaagaggagaggcttgtactatgaagggtacaagaggcctcagaaacaggagcaactgtgaagacagaatttgtcatccaggagaaaaacggaagggaggctaagccagaacccttctacggtaggccttttttccctgcaagccatttagcattagtactttttgtaagatataagtaaattcctaggaaaatgaaacctcaaaatgatgaattaaacagaagccaagggctggagagatgacttgacagttaagagcacagactgctcttccagaagatgtaagtttgattcccagaacccatgtcagaaggctcacagttgtctgtaattccatctccgggggaatctgactcatctggtttctgtgggtgcctgccctcctatgcacacagccacacacacacacacacacagagacacacacacacacaaacacacacagccacacacacacacacacacaaacacacacacacacaaacacaaacacacacacacacacaaacacaaacacaaacacaaacacacacacacaaacacacacacacacagccacacacacacacacagacacagccacacacacacaaacacacacacacacagccacagacacacacacaaacacacacacacaaacacacacacacacacacacacacacaaacacaaacacatacggcagggggaaaagagagagagagagttaaagtaataaaataataacatatcttaaaaataataagtccaaatcttattagatcaaatagctatctatcactggcaaatagttgcaaaagtccctatactctccttgttgcccttatctcaccactggccagaaagcttgcagacaatccatggcccacacgtttgagtaaggctccttgtcgaggacaacacatgataggacagagggctcccaggaggctgggtgtgctcctcttcaaggtcactgagatcagaccatagagccttagcgataaagacaaggccagagtgactgctgtggctggtggtaggggactgtgaactccaaagccatctgggagctgcttttagtctcagatgtttgaggagaaggtcagaactatattttaaacaaacaaacagctggcagagcataaagaaggagtaaagcagaagagacatgatggggctaaataggggcatggagactcagtggagagagagtatctgattctaagtgtagctgaggataactcaatccttaatgattggctggagatgagaagtgggaggggagaccatccttcatttcccaggtgaagaactggcccagagatatggcagagctgtggccagatcctctgatttctgccttaggacaaatgttttgtcccttggctatcatgaaactttacactacataaaacccacccactctgattggtctcccctggtcccaccctctacagcctgtctggcttctctctgccctctgccatggtccatgtctcagtaatagaagccactccaagagttcactgcatccagcaagaaccagttaaattcacattaatcctgtttaggcagtgtgatggaattttaatacccttcttttgaaagaaccaagatctggtctcttgatactgagttggctgtagacactggtcatgaagtattgatgtctggagtgagaaaggcttgaggatatcgccttagaagattcctggggagctgtccgtctcgtagaccaccaccaaaggaagagaccccagaaagcaatggcagcttgacaatatgcttgctgtcaggtgacttaacagcgtgagtccacccagctttctaacagtttccacacctcccctaatccagcctcacctggcgtcttaagttaaatcattcctgagagagaagaatggctactggagcctacatgtattaggcaccagagggacccccaaatgaaaaaagacagagataagagagagaggcaggctcattagggagattaaaaaaagaaatctcataagaacagcctaagatggaattttggaacttctgccccctcttcagacccccatgccttcttttggcttttcctggtaaagaaacacaaacatcagttgtgtgagaacacacaattgaaaacactaacatgttaggacgtacctgggtgtctaaacagcaaagaccaagcgacacatatcaaaggaggtagcctttgaaaggcctggggttcattgctcctttgagtctgtccaggtggtatctgctgtcctaaagtgatttgtgtcctaaatcaattaggcacagcgggcaggtgataaggattaggtgttggaggttaacttgatttggtcactttgggatgtgcaaatactagacgtgtcgtgaagtccactccctggaaagtgtgtgcttgagctttggagactattatttctgcagagtgggaataaagctctccagtctcagtcagagaagccggcgatgtcctgccttgtcctttagccgcttactccacctaaaaggagaggtcacctggtggtaaccaggtgacatccaacagctcaggatgagccaagtgcaatctgggcaccacaccaaccggaatggagactttaattcctttcttaatacttcacaattctgtctcagtgttcatgtggacaaaggtattgtggctggctaatggcgttcaaccatttctgaaatacgctgacattgggactttgtctccttaatgcactgcacacaaaaacaaaacaaaactttctttttaaaaacaaagcattcacacagagccaagaatgtcctgggtcaacagtcctcagcctccctccctggactgaagagatctttgggctcagatggagaagcagagatctgctacttagagatcactctccaggtccagccatctggcctgggccaagcacctactgtgtgtgtcaggaactcaggggacacctgcagtagcagagcataggaagtcactcaccgtgtttgcagacagacaaggcccatgtagcaagcagttcccggtgtcatgaagagaaacagtgtgaagctggggtgagtgggcagttcccacgcagtcagtaatctcctctgcgttaagagtgatgccactgagtttggtcattttggaagtctttcaagaggagatagatttgagtttataggaaaacgaaaacttgaatttgcaagaggaaccgagctaagagcagctgggaccacaatgagtcgacatgtaaagagagggatctccaggcatgtcggaggagctgtggttcaggatgtacacattgtgtgaggacgatgcaaatccccttatagcacctctgtgtataataaacaacccacatctggatgatgagaccaagttctcttcttcaggctagactcagcactgcttcgatactcccatgagcacagttgctttattcctgcagaatgcccactcgcttccctccaaaccttacaactcccagctgtgagattttgcccttgtcctgtgtgcctggcacaggattccatctttagtaagatacacacatcatcaacttggaccctgcttcccagggaatgtaaaatatatccctgctcaattaggttgagaaataattataagaattgacaagtgggatcccgtgaaattaaaaacttttgtacagaaagaaactgtcaggagaacaagaaacatcttacaaagtggaagattatctttgcctgtaacatggtaagagattaatgtctgggatctacaaaacactctaaaaaattaagcacaccaagccttcatatcattcagtcaataagagagttaatgagttgagtgaggtagctcagttgatagagtgcttgtctagtatgcaagaagctctgggctgcaaagtcattctcagctgtgtatagtggatttgaggctagcctgggtcacatgagnnnnnnnnnnnnnnnnnnnnnnnnnnnnnnnnnnnnnnnnnnnnnnnnnnnnnnnnnnnnnnnnnnnnnnnnnnnnnnnnnnnnnnnnnnnnnnnnnnnnnnnnnnnnnnnnnnnnnnnnnnnnnnnnnggaggaagggaagttagtagagaggaagggagggtcggggaaagagaaaagggaaaataaaatattacttgaaaaaatctttgtcatcagggaaatgcaaataacacgacattgagctgatcccatcatatagcagtcagaacagccaccatcaagaaaataaatgtcaacaaatggtggtgagaacacagggatagaggagccatagctggtagaaaaatgggctggtatagccacgatggcaatcagaaaatgtttcagctaaacttaaaatagagctgccatgtgacccagctgtacctctcctggcaaacatctgcgggaccctaagtcagtatgtgactcacatggcccagacaacgagccagcctgggtagtcatagatggatgagcagttgaagaaaacacagcccgtccacacagtagagtatcactcaggtgtggtgggcggggagtgaaatgctgacatttacagaagaatcagtgaagccggaaatggacacattaacctaaataagcctgactcagaaaaataagtgtcatggttcctctcatgtgcagaatctagatttaaatataaatattaatatgtgagagtataagaggggttattggtgagagagacatcttgtgggaagaaggaagaaaagaaggtaacagggtagaagagacaactgccacattttctcttacatgtggaatctagacttaagcatgtgtatatatgtttggcctatgtatgtatggtatacaaggaggggagactatttcagggggtggaagggaactgctgggaagggagaggacagaaggagcaaggccaaagatttaagtgtgaaaatatgataaagcccattgtgtcatgcagtaaaacatgaagtggggtgaaaacaaccaaaactcactgcatacatggagaagctgtcaaagagtaatgctccctgtggtaatgttcgattgaaccttatgttgtgcaaaggtgtcgccttcctcattatacacatggaccagtagtgtctctgtataggtgacttgctggcactctgggtattgactatttagattacagcctcgcagccttggtatttttaaaagaaattgaactattggggagactgaccagactcaaatacctgttattgctgggtgaagatttttttcaacgtgcaggaaagaaagacattacttcttttttcaaaagatctctttgcccacatagaggcaggcaatgtactctgcaccaaagctaagatgtaagctaagaagtaaaacttctcctggtctctgatttttgtgtgcttctgagatcggggaaattaggacagctcaagtgtcggcattgaccgcattgttttgacagagtgtttttgacagaactggacacattctttgagtagtatccccacatataaaaactcagatatttaaagaactaactggctcttttgggataactgggctctttgcaaaaaagcaagtgctggaaacagagtgactcagaaaatgtttcctggagggaatttcttgggggaaaattcaatgtcttctatgcattttgcttttgatgggggaaccacagttagtcaacgtcttaaatatgtctctcccccaccccctgcccccgtgtgtatccttattctacagatgacctgagaaaaagagacactccaaggtgcccttggagtgtataatctactcagagtaaggaaggctttttatttttaggcaaaacacagaggacaaaggaatgctgactataatccagaattaaactgtgaggtgtttaattcccaggatgtgggaatggccctgaacgacatatttcctcttgggtgtttcagacttctgtttggatgctgcaggcttagtttgttgggggataacctagaaccagaagagacctgttgaagccgagttaagtgtggtacaggttggaaggatgcccttccttcctttcctctgttatataagccagtactgatgctgacaaagggcaatgtttaacccattgccagtagcagccagtatattcccccaaggactagccctgtagactttcctctcttctcacaggacatacatcccttttcgcaccataaaaggcaacatgactagacagaaaaaggctgtgctttctctgcttgctttttcttagctgaagagacattcttaccctggccattcccatcagctgaatgccctctaggacaagccccatgtgtctgttggaaggaacgagttggggttggggagcaggccaagatatcacctcacccttcacttatctatttttaaataaatttgtgtgtgtttgatacttaacaacaggctgttataggatgccgatagacagtaaaatacttgcaatgggtcatattatcatacagtaaccagaaattaactttttaaaaataagagcagctagcatctagttctttttttttttaaagatttttttattttatttatatgagtacactgtagctgtcttcagacataccagaagaggacattggatcccatgacagatggttgtgagccaccatgtggttgctgggaattgaactcaggacctctggaagaacagtcagtgctcttaaccactgagccatctctccagcaacatctggttcttgaacaatgccctacccagtccaatacattttcattagctgtagatctcacgctgtacatcctacgtatatatctatgttcttttatcagcagcccaattatgtggctccttccaactgccaggaaaggcacagagtctgtcccctgggtaataacattggtagaactgctaatgctagcatttgcctatagagctggtatactctccaacacttgtagtttttgttaggcctgagttcagttggtaatgggtctgctgtgcaagcatgtgtgcctgggatcgattcctcccattcccacagaaatagccagatgtgttgttggcttgtgcttgtaatatctgttcagggagaggtagagtcaggaggcaccagtgagagaccttgtctcaataggacaaagctcctggagagaggttgacattgaggttgacaacggctggcctccacacatatctacccatgtgaacaggagcacacgcacgtacacacattatcttgtcttgttttcagtactgggaatggaatcccttagggtcctgcacatgctaggtaagcactctaccactgagctgcatctctgaccttcttctgcttttctattggaggcagggtcttattagggtccctaggctgaccttgaacttgctttgtagtgctgacaagctttgaacttacgatcctctggcttcagtctcccaaccatgcctagccatagagttcactctatggatgcttttctcagtatagatgctgggtttccagtgtgaactggacaggccccgtatccctgcccctgcccatccctatgctaaaggctttgattagaattaggagnnnnnnnnnnnnnnnnnnnnnnnnnnnnnnnnnnnnnnnnnnnnnnnnnnnnnnnnnnnnnnnnnnnnnnnnnnnnnnnnnnnnnnnnnnnnnnnnnnnnntctttcagccatctttgtgtaccagccttgcaagcagccgtccatactctcctggtaacaggtcctccccatactgtcctctccttagactctcagaatccctgcaccccaggtttttcattgtttgtgtcctgtcttttgggaaattcactgtaagagtttttctttctttcttgaatttctgtggccaggaggtagagccatacaaatgtgggtttctgtgaatcagctgcacttggctttccatgcaaggagagcgtgaggaattggggcttgggagcctctggatcctccctagactagcaagcccaagcacaataacagtcctgctcttctatgttgttagagctaggcccagcagccaggaggcccattgccattcgtggtgagttaccttccagatctgcctgagcccccgacctgccactctgcatctccctgagcatatctacaacttaaacactgcaggtgtcatgtaagaggcatcttggcaaagagagtcaaaaaggaggttttcctggcaagtacagaatattagtactgtaaagagctactaaataaatttgtgttggttcagccctaggggaattgggggtggaggaatgtcgaatgctaaaaacattttataagtcttaagtgtctgcctgacggctcctttattatctatcctaagaaaatctgtggctgtagatgttcgtaaagctcatgtccttttgtatttgtttttatgattgccttttcctactctgagacatgctgtgggggaaacttccccatgttatgatcaagcttaagtcggttccctgtgtacccagtggtaaatgtggtgacacgttgcctgcctgtcagcaatgtcagactctcaggactgaacggagaccaacactggatctgtaggaattcatttctgtttaaaagaaggtgtagaaaccggactcacagaggtgtcattttcatacgttcccatcccgtgcagctgttagaaagaggtcggaaggggcaggaggaagagaaccagggctggtgtgagtgtctattgtcatccactagagaaggagctgtgtgctcatggtgatgcttgtccaggtctcaggttctcgctctcaggagacgttcccatagacggaggctaaaaacaccaggatgagcatgggaccttgtgaataggactgtagatcctggggggcctcagtcatgacattgtatttggttcaggctgcaggacacattgtggagttattgaaagtcagcacccaatgaggttgtgtactgtgggcaccaggcaatgccggtggtaaaagaatgagtgtatgataagaggtttggaattccatgaaccacaaaacttcatgtcctctaaagaaataacagttttcttaatattcctttgcagtcttttcgcagagaggcctttaacatccctgatggtagttgtatttcctttactcctgtactagaaacacaaagctcaatagctcagaagggagagaagaagatgaaggacaggatgtgctgtggcagttacacagagccctgtaagaagcttagaataaaggaaaacacaccttcttgagtgtagggaataggtcttaacccttctctctcattgtcccctgcctctcaggtcctttcttccttcctttgacgcccacatcctaatataattaagagattgttgaaagtgtaattttatatcctgttctcacacttacatcaggctgtaaatattttacacagcccagaagctacgaatgagatgctcatagagctacataaaaatgggaaagttatcatgcacaaaacttaaagacaaattagacagaagtataaggctgtgtaaccatgtatcgctctccacaacatgtaaagaacaataaataaataaacaataaataaaataaaataatcccaaaggttaaacagctcaagttctaaaatgagtaaaatgtggataagcaaggaaactacaagcagcccttaggtacacatttaaacttttctacttgaacatatgtctgagagtattatttagaatactctgcaagtgtttaaatggtgtccttggcaccaccgtttttaagaagcaaagataaataaaataaaaattgaatagttgaaatgcctagagaaaagagacattttccactgtggtttctctgtagaacaggttagctaacccatcctggatcatgaggcagacccagggctgtgtgaatccctcccagacatttgatgatgggaaaaccagaccactttatggtaccacattaaggaagcctgagagggaagagactgcaggaataggacgccatcagcctttccccaggacttttcagcaatagaactatttcataatcacaaacattattttcaaagggcataaaaattccactgtaagtatttctctacattttaagtcttgtaacactttgttactttttcacaaaattatgtaaaaaaaatactacacaataaattagcttgtttccaagcattgtgaagtcaagtctgttggtttggggtgactctgagcaggaacagcgtgcagtgagtttgagagcctagctggagaccaactgagtgcctgtgaatgtagatctgtaaatctgtttgttgttttggattagtttgttcatttgtgtgtgtgtgtgtgtgttttgttgttgttttttgaggctggcctcaaattccagacattcttcctgtaacagcattccaagtgagaggattatcgatgtgtgccaccatcactggtggcatcctaatgtgccctccaaggccctcctcctgctagctctaacctctcactatcagtgatctcagtgtgaaaactcaggcacccccccccccccaataagagtgcattctgtagctctcctagattctcttacttcatgcctctctctagctgagttcatccgctccatcgtagatagtggcaaactctttcctccagctattatccatgtacattcggatgccattaaacatttctactttggggtctaaaacaaacaaacaaacaaacaaacaaacaaacaaacacatttccaaaaacaaattctgtgagtcagaaccttatgccatctctctgcatttaactcttatatttctctggtccaaaagccatttctcatctgtgtacacagggttcgaagcttactcagctctctgtgcctaccaccccaaccgtaaccctcaccatcattacttcctttccttttgacaccccaaactctttcttactgatctcttcaggtttgctccccctaccctgctcccctctcccaacccaagcttgagactaatccaaatatgagattataaaatcaccaatgccatgccccccaagttctgtgtcaggctttgtatagtctctcttctcccttgggcaagaattcaactcttctctggaccctacctcatctggtttctggatctcttagttccttctcgcccagtcccttcccaagacccaaggcacatgagtctttatttgattatatgaagcagctgagcacttccctgatggctggccgtgtgtctctcctcacttggttaataaccttcgcagctcagcagagtccctcgtcccactcctcctctcccacactcctgggtttccagctcacatcacactttgcaattagagccttagctactggttatctgattgtctgcctctcatcagacttggagagagtcaggctctttgcttgttcttgtcgtcagagccccttgcatattgcttggctactggtcagtgctcagagatttgttgagtggctgaaggaaccagcatctgatattggatgagacatgacaggccctcctatctaatacaggatgaaacttaagtttttctcttttgatatttcagtgatgttttaaaaagcactcaccaagttaacacgataatctaactttaattttttttcaaatataaagccagacactcaaaactcagccaaccctaactagctttgttttgaaattaagataataatgcaaaatcatgttcttggcaacgccagctgttaacatctgcatgtcagcctctcctcctcagaagagggcaccagatcgtcctctgaatattgaacagtaagagaatactgctgtgtgtcttcgagcttgggtgacctgaaatccattgaactctttcccagtgcacaagccaaagacagaggtgtgtctgcagaatgttaatggcacattttacactggtgtaaataaaacagcctctttgttatctcaggatattgatctagtctctcagaaggctcataatttcaataagcgaagtcttctcgaggatcattacctgggaggaggccagcaaccccattgcatagaaggaagtgatcctgaggtccagtcctgttcttgcccctagcaatctggcttcaaaaggtagtattgagtataaaattagtcagcatgtataaaacacatagcatttaatttgtgttgttacggacaacacttttattttgattatccacaaaacaccttttcaggaccaagatttctctctctctctctctctctctctctctctctctctctctctctctcacacacacacacacacacacacacacacacagaggcaacaaaaggcagagcgttgatggataattgactatcaactattttaagataactggcccaatgttttttttttttttaattaaatgatcgtcttttggattcagataatagagcacagataagttgcattcctgtgttggatttgtttccaaataatatggaaatagatgggtcagcaggggagtgggaagatgtgtagccaggacaagatgggtctactggtaagtgaggagcctgggcttgtgcaatcaccaatacttctgactgtatttgacaatttcatcaataaatggagacagcacactgtagacagtgaatacaccctgcctgtgactagcctcctggatcctttctaattcactgagcccgttcccatctcactccctttatttcttttggaggaacagctgagtttgttgtactaaagcaggactccactccattctgttttatttcttagggggcagctcagggtggaaacaaaataaatccaatttctgaatcttctttgtcctcaaccacttgggaattctctctgaaactactgtgggcattttaagtaaccctgcttacccagcaagaacaatgtacctttcaggcaagctgagaggataaaataactctgcctctctgcctttgcatgccagacaaaggccttagctattaaataccagtgctcagtgagctaatgactggtgagctggcattgtgtttggcatcttaggatctcagcctctgtcctgtgtgaacttgtaatcttcatcaggtagccgtgttgtgtttggctgttgtgttataggccggcttatgaagcagaggaaaaactccagagccaaaacctggcctctgcagtttgtaatcgcaagtcagagagcataggatggtagcttttacatttggtcctctcatggtttaccctcccctggtgtggatactggccatggtggtttgtttgtctgctttcttatgctcaactcttccttctcgatgggagccagcggagagacaatggctttgcttggccctcctggccctgagattccccttccagatcaatttcctttctctggtttcaaagagaagaatttgaacttgcgtttcaggtttcttattttccctctggactttgtgtcaaggtgtgtgatacacggccgtgtagctggttcacgtcagaacaagggtctcagtgaattctgtggaacatctttccttcttctaaaaataagtcagactctgagttgttcaggaccgccagcattaggcatctgaagtctccgtttctctcttgggtacctgctgtcaagactgaactaaacctggaaaggaataaggtgcaggccttgcaaaagaaaaggaaggtgcatgccagagccttctagaagccagtgtaggggtgctaccatgaaagtctgaactgagtattctaaaggcagagtcaacatgagtgtgcctgctttagggtaccaaggcagacttcctagtggaggcatgagatgtttaagctcaaggcagagctgatagcctgattttatattatgctactaattgaatggtcttggaatcccagtgtgagatttttttttttgagttattagcatatagaaagccactccagccttttttttttttttccaggacacacactgtcctgagaaggcctaaaattagactgaaaaatcaagttcaagctgtgtaacgtgcctctgtggcctcaggcatcgtatgaccagaatgagtcatgtcccctgtgctgctcaggtgtgccgcccaagagctgtcccaagactctgccgtgcagaggagattgccatagagggctggcaaactgatgacctagcacttttctctccttaaacaatcctgctgcccatgacagctgctgagtaatgagcaagaagcctcctacctggggtattagtcacttgcccttttgagcaatcagcgagactggaaagaccgttgcggggctctgtcagcacttgttgctgttgcccaagatcctttctgagacttgggcaggcataacggcttcaccaaagttcagaaacccaataaccttgtttggaaatgtaagagtgttctgagctcaggcccacacaggcccgcactgctgggatgtggcatggtatggataaggccggccctgcaggccagttcctgtagtcttgctgactcctgtactgacaccctctcagatctcttgtcagccagtagatgctttccctagaatttcatcatggatcccacaggagccaggtgacaggtattagaggggcctcctgtgccagaaaccactgtggaccatggccttcttgtgtgacaaaattacatcagccctcactccccatagcccatagtgctcctgggagtccagtatgcagtttttgtgctcatgtctcaggaattgggggaccaggaggaggtggcattcataatcacaacccactaaaaacagtggcttctgtggaaggagattgctaggtggaacaggcttagagacagaggaagctcatctttctaagtggcacaaggtactccgcatacctgggtctcatgcccctgaccttggagacagccgtcaagaacccaggagcagaaggaaggcctgtgccaagaaagttctactacactgcccacaaagcattcttggaaaatgggccttcatttttcatttctgggcaatatccagtaaccactgttgtaagacataacagcttcgttgtaaggtgtaacaacgggttgtgccaactcacagggaacaaaccacaggtggctgtggcagttctgtattctcctccctcctcaaccacaacacgatctgagctggacagaaaccagcctttcccttggtcctcacagcccagtggacttttgtactcagaccaaggatagggaaacagagccatgcattttgactagcgattagcgttatatacttacagacactaccataaggggagcttctaggctcccaaccaagtggcccaaagctagagaagttgctctaattggcagttagctacctatctccagctgttgggaatctccaggtcacccagcatccccacgtaatatgctaccttcttcctatgatggaactgtggtttgcctctgagcacatcattcccttaaaaactgaagtagacatctcctgcatgctctcggctatgcctgggtgggtggagcctgtgatgattgataggactccttcccaccctgagctcatttcagccttccttggtaacagtgtccaggctgtggctagtgattggcagctggatgttagagcccataccagaagttgtgttagaacactattgcctttggcgtgctgataaccgttgtcaatcagcaggtgagatgcagatgagatatgtgtgtctgactatactaaagtggtttttttttttgtttgtttgtttggtttggtttggttttgccaaacaatccacttccttccagtaacttctctaagatgttgggggaggggtggaaagagcctttgtctgagatgcccagtacctagaccttcagtggcatggagtgtactcacacagaccttgttcccactcctgtctcattttcctgacccactggctctgacagaacctgggaggtgtcttcctgctgtgtccccaggtcacctcatctcaggcccttgctgtttgccccttgctgatcgcacttcacaacgcctctgcttactctgcccttcctccaccgacccccaatggctgctcctccactgccacccagttaaggtgccagcctctcccagacattgcagtgcccctcgctgatatccctgttctgcagggaaccttgtgtatcttgctaggctgcggctttcctctgagataggaattaaatatcaaaatccctttgaaagtggtgccatagcttcagagccctgtggtgttttttttcacagctctgttttcctgtgtgggctccactccggcgtatggtctgagaccacttgcacatccatacctccttgcctgccactgggcacctgtttgattcaatccatcctttcctgccaccacaaccttctcacatcctcctcttggccagggatactctgggtccgtgccttccaccacaaagctttccctccctcccgttggaagaaatttattttatgacttgtttctctcacaatactgagttttgaattccgctgtgtccctgatattacagagcaatggacatgctctctctgtccctccctccctcccctactctggtatgtgcattaaggactcagtgctaggcatactagtgaaccaagataagcagattcctgtctgcgtggagctgagggtcgatcacattatccgtgctccggttacagtgtgagttccttgaggagaaccctttgagacacacatgctctaactctgtagcccaggctgcagtgaattcgctgtctcacctagtctggcttccagctcagaaccgttctgccttttccttccgagaatgggcattgcaggtgtgcaccacacctggctatgatccggcaaactctgaatggttgtcacagtccctgacacacagctgccgcttgttcctggagtgctctctgaatgaactctgatgggcagaaatgggtactaacgtggaaaatggagtgttggtaggtggatttcctatgcgtacaaagtacctggaaagcctagaaaactcagtttcccctcgaactgaggacctctttcttctatgtggttagactattcatggagactcatcttctagggtcccttgaagcaagttctgagagctggtgtacactttttgtgttttaatcccaatagcccaaagaagtttgcgctgaaacatttgatttaggaagcccacgtgaccactgtggtctgactgcctatcacatgctgtacctggtttctttcagagacttgaaactggacaatgtgctattggaccacgaaggtcactgtaaactggccgactttggaatgtgcaaggaggggatttgtaatggggtcaccacagccaccttctgcggtacacccgactacattgccccggaggtgagtgtacctgctaggtgtggctagctctgcttagccctgaatggaaatatggccaggggttatcatgtgccatagctccatgggccgcacctacactactacttccaggctcacatacagctcattgaatgaatggcaactgaaaatgtcaagaattggtctaaatcagagtttgagagatagtgtaaatcacacaaattgtgtgattggttcgctcacggctcagtgtcctttaatctctacttggtaatttaattctagcccctgtagcaaatctaaagaaagtagttgtatctcttccctacggatgaataggcctactgtgctctcccctccacatcagatatttccaaggcattgctgtttcaatatatatgtgtccttgtattggcctacgcaaatcacaaatgctgggcacttagcagagaagtcacctagcacacacactgtagagatgaacgaaacacgcatgtcagcaagcgggacttgtgctttggcacctctcacaccgccctctctatatagatccttcaggagatgctgtatggacctgcagtagactggtgggccatgggtgtgttgctttatgagatgctgtgcggacatgcgccctttgaggctgaaaatgaagatgacctttttgaggccatactgaatgatgaagtcgtctaccccacctggctccacgaagatgccacagggatcctcaagtctgtgagtctgacctgcccaacccgcttccgcttccagcctgttacagatgagcttgcctcgtaggcctcctgtgtctttcttaaatgtcttctgttagtatggtgggccaccaccaactaaaatttgtctgaagaatcaagaatttctcctaggctgttttcctcttacaccgttgttatttctgggaatgtctgcagcatcaactggcaaaaagggagtcgttgggaaatgtcaagtatttctagcacttatagattgagtctaagtgagatgagacaccctcatcatgtagtcaggccacatacgggtcaagggagagtcagtcaccgcttgcgatatcagttttgcttctgttgacaatgtccaagagagaggacttcctctcagtgctgaaagaggagagggctcatcaaaacctccctaggccaccatgtcagctttttatgcaagaccaaatgtcaagcttatgtttttggtataactcaataaggtgtcactgtgagaaagtcgtcttctgttgttaatacagtcaagttaccatgttccatgccttactttgaagtaagaaagggcatggatttaatgcccttagattgaaaataaaacagtcggtatggttctgtaaccacattggttgagttcaaaattcacattggtatctactgtatgcagaggagatataaaaatgaatttaaagtatatgctttagtgaaaattaggacatgtcaccctctgttgaataacatctatgaggtgtatgtgaacttctaataggtgagcataatcctcaacttctattcctttcattttctttctttgttttttagggttccacgactttattttctccattactttccgctcatctttaggatactgatcaattacacagttgtgcaagaaattacactccagcatgcaaatgcttaatgaaaagacagaagaatgaggttgtagcttagtattaaataatggatgggaattccccccaggctgcaggattgaacagagcgatgaccgaggaagggatgatgaggaagggacgacaatcagtgtggagaggtggcttactgctgctatgccaggctgaacacatcacctgcttacgctctgcacacaggacacagacgtagattcacagtgagctgcaggaagggacgtcattagtgcgtgaagcaacaacaggagaaggagaaagcaggacctatgctgttaagttcagtctggtcctctggtcttcctcttccatatcagaaaagtcaccactgctcccgttaagcagagctcctggaaccagaccagtagcgattggcacgacagggatgctgggctgaggaggctcccgtctcaggttgaggggctcaggtagccccttgtggcacctgacatgtgtatgtctgctcttcccagaaggcaccattgtagtcacccacttttggaactttccatctcctgaaggcctggtgtccactgaatcctgcgtctggttgctgcaatccctctgcccttttcttttgtgacatagatgccctttatatgggtttggtaaatattatctgccataggaaagtctcgacccctccaagactctccagacttataagcattactatgcagggcctccatactggtcctgaagatatgattgtccttgagaatctgctgcaccacccctagcagacgcctcctagaaagcttctcacttctcacccaatcacatattgtcgatgtgcatcacagctcctgcgtctaggagctcaggagtcagtagtcaccaaaatcgagaaaacactaacgtcacagagaagtaaaaataaaatgctttgaatttctaccaggtgtctccaggccagcttaattttcataacaacaagttgtttaaataattagaaaatttagagtgagggaagaaagaatgtggcttttgtaattttatcagtaaaatgtgagcgagaagagcttatgtctgcaatctatgccatgaagctccttccttccttcctccctccctccctccctctctctctctctctctttcttgcttccttccttccttccttccttcattccttctttccttgttatttagataccttattgtcactcattttcagcttctttttttaaaaatttatttacttattcactttacatcttgctcactgtccccctccttgtcatcccctcccatagttcttctctccttcccctccccttctcctctgagcagatggggtccccctgggtatccccccacctggcattgccatggagttccttaacttcctggatggaaatggacgcacggaggcaggcggcagctaaccttgataacaagctgtggggagacagccttgctttgctctcacagctaagcctgctttgcattgttactttcccaatgccgtgacccagaatccttgtgattcccaaggcattctgggccgggtgacctacagcagccaccatccacatactaatggctttttgtggagtaggtgtcatgtctgattactacagctgctttgacatttttattacttaataaaagaaatacctcagcatttttagtgcaacaaattgctagttcaagctataaagaccactatgctaccaccaaaggcaggagacaaaagtcacatgatcggggagcatctggacacacacacacacacacacacacacacacacacacacacacacacactgagcgaggcagacagtctcatggaattattaagacagtttctccttcagaagaaaaactcagtataagtagactgcaagtgttttcagtaaacagcctttgtcatgcagggacatctccacagactccttctgatagaaaagagaccccagtgatcttgtgaccagcttcagtgcagactgggctgtcccttctccatgcagatccatggcctgcagaagacccgtgcatcccatcactgtcacttcctctctggcttctctctaacaccagctcctcctttggctgtaggaagcaccttagattaaatctattccctccttgggatgtcatctctataggaagaagcaggggaccaggcctgcttccctgctgttcctttgtatgaggtggccttggggaatctctttccctttgtgagtctctgatcccacaagtgtaaaacagagccagtgaaacggagcccacagggttcctgctggggctgaattcagtaccatatggaaaccttccaggcacacagcaagcgtactcctagtcacaccttcaaagaatctgatgtcaaagtaactgcaaaagcacttgaaagttgccagacaaaaattactataaaaaaaaattcaccgggagaatttctggggcaattttgcatattttagtcttcatgcctgaaagtgagaaatgtaaatgctacaattgagaatacttggtgtcttagttagggtgttactgctgtgaacagacaccgtgaccaaggcaactcttataaggacaacttttaattggggctggcttaaaggttcagaggttcagtccattgtcatcaagatgggagcgtggcagcatccaggcagacatgatgcaggaagagctgagagttctacatcttcgtccaaaggaagccaggagcagactgtccttaggcagcaaggaggggcatctcaaagcccaccctaacagtaacatacttcttccaccaaggccacacctcctccaacaaggccatatctcctaatagtgccactccctaggccaagcacatccaaaccaccacactgggctagactttacagagggctgaagtgtttgcatggggaaggtatcaaaaacagaaacaaaaaacaaaaactgtgaagaattaggaaataataatcaggaaggctgggaatggtgtccatacctgtaatcctagcattctagcattctggaggcagaggcaggaggaccactgtaaggtcaaggccaggctgatttatatgagttctaggctagccagggcttcatagagtgatcctgttgagaaataaacacagaagttcagggatgaaaatccttaagagcacgtttctctagatctctggtttgtagaagaatagtgaggctgaccaaggatgtcatgtgttagaaggatgtgagtgcactctagccttagagtcttaggtcctgttctgtttctgtgactggtttcctatcataaccctcaaactatttagagggtcaagaacctctaaatagtcccagctcaaggtatggtcctgcggaccactgacccaccactgtactggcttcattctctaaggtggtctgacaagcaattacaaccctgctctggctggtgccctttctttctcccagcatgagattgctggggaaattcccatttctttgggagtgcattgtttctatagtctgatagtcagattgtgagacagacagacacacacacacacacacacacacacacacacaagtaaatgtaataaattaaaaacatatctgttaaatacacatgcatacccctaacatcttcttccacctcctccctcaacaaatagattattaaaactgatggtagcttacaaagttaacaggagatgtccaacaatactcatttttataaaaacaaaacaaaccaaaccagatagaggctttccagagtgctgctgttgttgaagtttgtccttgcttttgaaacaaatattgtcttccatggtcaccgcgttacttacgcttgctctgatctgtgctaaaatgccaataatcatgatgtatatggaaaaacgcatagtttgcattgaactttgaaggtgtacctgcgatttgcttatttacctccacaaaggaaggctggaggatgtcctcaaggagccccagaacttagaagggaggttgcccagctcagaggtacagagtcagcagctgtgagggatctcctggctgcatgctaactaactccgatgaggtcagcatcttgccgctgagctcacacaggtgttagctaagtgctgaaaggacttagcttctcctgagtcacctcttgccagttctggaagcattatagtcttggcatcggcaggagcttatcaagagcttttgttcccgagctttgtagaaatgacagcgtatgtacacatgtgggtttatctgtcactgaaaatgatcagatttcaccacccgtgctttgtgtgctgaatccctgctggcccctgctacaaagaggagaaccactgtgaattctggtgccctccccagccatgactgaggccctgtctgtggacaggaagctgtctggggcgcagggacagttaccatctccctttcccacgcctctcttgatggaggttggacagctcaagggggtggctaaaaggagatcagccaggagaggagaaggagggaaggtggggctaacagcttacagggactccagtcccaggccaccagggtgagttttcatatactgttaaggggaacagaacatcctaaaaatggctgccccaaaagagaggtggttagcgtgccgacagacaagcccttcttcaggactggagtttctaaaggaggaaatgatctgtctgcagcctctcatggcagcttctggcgggatcttccttcttcttcatagaacgttcatttcctgagaacagggcttcttggattgtatttgcaggaagttgtgtgaacgacttcctgtctccctcttgttgtttccagctggatttttcacaccacaggtctctttaatctccccctccagctctccacctaggaaaataaacctatcaaaggttccggggcgtgagagtgcggactctgggtgactttcctaaaccagcctccccactcagaagcactttctaagatgggaaaatcctgaaggaagcaggaatcgtctcctgtacacattctttgccagctaccagagatctgattttttttttttttttttttttttttttttgcagttgattgttagctgtggtttggataccaaagattttacacacacacacacacacacacacacacacacacacaatcaagggagagtactgacagaaaagcctcctcaaacactgtcttctttacagtagccactcttaaggatgacacccaaacagaaaacgtttgtgtgacttgggatagcagcagcagggagcctcctttttcttgcacacttgaaagataaagaacctaaaagtgagtgggtagggagatggggaggtggctgagaagagttgggggaggagaagaatatgatcaaatatgttgaatgaaaaaaatctaataaaaatataagaaagttacccgggagtggtagagtctgcctcaggggtcaccatgtttgaccctggctcctggagcattggccaacatggatagtacgcgtaagtacaaacacatgacttggggttccacctgagacacctctgacctatatttgtcccaccctacacatggcctgagtgaagttcccaaggtggtctggggttcaggaaaagctgtgtatatgaaacacaggccaggcagagtgctggccaccccgagggatcagcagcgtgcatgcagaggctgctgggttctgatggccatcgcaggctgggggcacagccaacattctgctgcagatcgagcacagttcctgccctgtggtggggacaggaaggacacggggcactgattgtactggattttgataacagaaaaatgaaacagagtgcactgtgcctctggggattgttctccgaaaatcctggtaggccagtcagttgtaaccagccaggcaaggcgttacctcgggggccattccttcagccacaaggttgggaattttgctgtatcagagtacttgctctttctttctctttcttccttccttccttccttccttccttccttccttcctttctttctttctttctttctttcttttttctttctttcttccttccttccttcctctctctccctccctctctctctttatctctatctcctgctctctctctctctctctttctttctttctttcttgataaaataaaggtctcacccaaagagaaaacagcatttgcatagagaaaatagcatttgcagctgaggatatatactcaggttcacagtgccagctcctttcttccagaatgccaatgacaagtgtaggaagaaaggtgaaggttatggactttaatattgacaccaaccataggatgcaagccttgcctcccatccatttctgcttcagacatctccaatgaaagttccgttcccagcaaaagctcttccatcatttaatggcaaagaaggaagggaaggagaggaagaaaagagaaaaggagggggtatctgtctttaagaacttattttgcctttccttatgataagttccctcctccatccccctgagtgtgcttacgtctcccacctaagctgcctgactgggcaacagccttcagcgtttgaaagcatgagcacaaactttttcacttctaacacatcagccttgcgtggcttgcaataaaatcaggtgttcagactcaaagatgcgtcaggttcatagaaaagcagtggctttgctttcctctctcatcgtacctgctcatggtacacacctcagctacttcatcggtagcagtgagagggtgccatgtggacccagagaggttacataccaagtcctgtcaattgccatttgtgatgttcaagggttaggccgtgattcctaccaatccgcacactcctctccaatccggaatccacgggcgacctctggttgcctccagaagaggtgcaacagtgatccagagcaaaggtttccggtgtcacgtgtgcctggttatgaattccccactctaccacttccagaccatatggacagattacacatgggcctcttcctcggttttacaactgtaaaagtgagagttttccttcccattcccaagctcccaaaataatgactttaagactcaagttatatttacaaataccttggtcataagctttggctgttcctcaatgggctcacaaattgatcatcctgttattctattctaagttctgccacgtggctggttaccttcgctcagtcccctgcttctgtccttcaccgtgtaccctgataactcctcccaggcctgactctatcccagaatccttctgcccaccagatgtcccaccttctattctaccctttcctatagaccacaagcttgttgtttgtttgtttttaattgacaagtgatgcagccattcggtatataagagatttcctctacaataatccataagatagggataataactacaggtgttctaggggttatggtgttatgaacttgaagcatttaactcatttccaggtgtagtaaaaatgctagtacgcctgtataaaagtctctgccactctctaagcaatagcaatgcagcaactctgctttcttttctccatgctctcccctcctgcagctgccctttcctaaacaagtatggacacctggcagggctgtccttcaccatatatctgtgaattgctagtcccagtcttgctagtaaaacccgtggaggtccaatgtgagcaagccagagtgactcccttctggctcacccggtattctatagcagcatctgcagccagcgtgaaagtctactctttaagcactggagccggcttccccagagacattctgagagtccattctgtggcctctccatccttctgcctctcatccttctctgtggattgtcatcagcgtcatctcaggcagacatctgcctctgccttgtcctgtgcaaaactaacatcaacaccaggtcaccttagtgtctatcctctctcctgcctcctcgtctgcaaactcgcacacacagcctgttcctctgtgaccacagctctggggtggagagtggtttgggcacaggtcattccacattgtatgtccccatgctgcttcaccaccatgaagggaagtgaaatgacaaagttggcagtcatacttcccaactgggtcagactcttctagggccagaagcagaaggcatgtgcctgtagtgtacacacacagggcacattttgtcagcctctgggtggccttcaggctatgcgaccataatgaggttggccgtcgcagcagagagccagcctctgttttgaatcctgtgttctttctctgtcttccttccctagaactctctctagagccatgagatgccttcgtcccattttggagtggctccctggaatactgataggagagtcttgtggctcgatttccttcctttctggcctggcagcaagagctgccaagtctgtctgccttttgtttaaagtctgaaatgaaatgaaaggagaaggtcattctgtttgcccaacagccagatccaactattaaccagaaggcacagtgttttctgactcctgggagaaaaccttattgtctaattgctccgtttatataactagtcttcttcctaagaagtccggcattttgaaagaggatgaataattcttgacactgcttagatttcaaagtggatcctgttgtctcgggactcgtcatcatacaggggagtttaagctctgtcgtgtagaagagctgcacactcacacctccacatacgtgtatgtattcagcctgctgccagtacccttcctgccctgtgggtgttctctcgggacatgccttatcaaacctggccagcatcatccagtacacctcactatggtgccaccctccctgtggatttgtcgatggcctgggagcctcccagtctcagagccaggtgggcttctggttccttcagctttcctctacatnnnnnnnnnnnnnnnnnnnnggtgggtctgagcccccacctctctccttcctgctctccctctgtagtgagactcacatttgggatgcaaccaggtctcctaggcccctcccttcctctccccagcttgtcaagtgcttttgttggccctatgaaccatctacttccttcagtagatgtgcctgatcagagagtctcccgcagccacatgctttgccttcttggcaagctttcccgttcggaccttcgtcagagaggtcagtggaggtaaggtatattttaagaatgaccttagatgtggactgttcacttgagttaacatttgagtccattagagacatggacaaattgaggacatattctgcaaaaagcattcgggctgtcgcagcagaggaccagggtttccagtgacaactgtttgcaggccaggatagcaacccctccagcctccagctctgcctcctgcagaatgtgtgctgtgacccatggtagacccaggactgatagcatcttcttaactctccagctctgcgtgtttggagagagtagttacataggggctgtgatccactcccccccccccaaagtcttatcccatagtgcgaccccattacctcctccttacagtggttcctgtcttcacagtcagccctctagagcttctggcttctttgtgtctagtttccgtctcctgtccttagattccacacacacacatacatataccttccccccactctctctctctcagagccttattggtatttggtagcccaggttagcctcaaacttgggactgtcctcctgcctaggcctcctgagtgctaggaattattggcacgagtcatcatgcccaggtagaaatttcttcttcctctattccagaagccatgaaagttgacaagtaatgccggccccacatgagacaatagggggtagccatatatataaaatcacccggggatgccatggccacatgggaatcccatgtccatcattgatcaaacccaggccactcctctgaaggagtaaaaacttagtgttgaaggtatcccatatccaaacgtggccttcaggtaattctgcatttaaatgaataagttaaatgaattatttattatttctaaatgataaataattaaaaattattttcttgcctgccttcccagcttccaccctttacccccacatatcactgagagatctgaccccagcctgcaccccatggaaacaggcttagttgtctctgtgtgggtgctttatatctcagatacaaaactgagcatgtcaatcatccagatttggcaagatgttaaaacccttaattaaaccaaacaataaacagaggttctccaaagattcatatgcttagtcaggatctggcatggcagtgatgttatgcatgccaatatgtaaaccatgaacatattgtgggagggtgacactaagggggaattcttgaaggccaaatgaggagcattacataaaccgcaaccccaggctttataatcaatagcaaagatgttaacaaaactagaagcacttgttgggcagacagccttgcagaagtgttttctgtgtaaggctgtgtggcctgtgtgcaaagagatgtgcttctagcagagtcttctgtcacagttcttgtcatcagatgtccatgcatgcctcccctccttcacaatctcccagctttgttaaggtttgacacaagtgactccattttgattctgactttttgcataatcttaaggaatacttgtttttgtatttgttgccctggctactactgttgatgctgccgttcatgctggaagacctgactctggtactcccttgcacagctccatcagacagcctgggaagatgctctgatcttagactctaccagttcacttagccctagacttgtttattctttaaaaccttctggcacttgtttccaactctcccttcctcttcattacagcactgtagtttctgaacttgcctgtcatttcagctgtctcagcctctgaccgtgctccccactcccatctgactgtgctcccttccccaatttcttacttattcatggtactgtggccactcttcctgcctcctcacacacattgggtaggtcaggctcactgtccacacacttgccctgccatcttcatgtggcagctgtcccgactatatgtccttctgttggtaccccaggtgctcatatgtatccgagtgtgtgtactaacgatgggacaggcatgattgtcttcttcctacatggatcctacttcatttcatcaaacgccagctcctccatggcactcactggcctgccccagtgctgtttactcgatcatcctccaggctctcacagtgatttacatgtttctttccagcgcatcctgttgtgtgttgtagtttgcatcaaagacttaccccttgatgcaatggtaatacctttgttatctgcacactccgaagtttagtacactgccttgcattcactagatcctatatagactttgtaagtggaatagaggcttgtcctcttttaacttaattggaattattttttaatagtttttaagtgtcatgtttgcatcatttaatcccttcctttccacctccaaatcctcccatagcccccacattcccactcacatttatgactttttaaaattaatattgttatacacacacacacacacagagtacctatttggtccatttagttctgtctcatgtacatgtgtattgggctagggttagggttagggttagggttagggttagggttaggttagggttagggttagggttagggttgtataagggattctcatccctggagaataatcattttcctccctgtgtagccattgtctgcctatatctctcatctagaggtgaggccttgtgaatttccatcccctttggcatttccggtggtattgttactatgcatgtcttgtttagacaatgcctgtctagaagaaactgtcttgtagaaggcatcctacttgtctgattcttacactctttctgtctcctcttccatgattgtccctgagccttctgtacagggcttgtattgtggatgcattggggttggatactgggcatggttagtcgatctctatattttgaccagttgtggacctttagaatagtctctatcattgcaaaaaagaaacttcttggattataggtgagagttactcttatcagactgggttgtccagatcttgttatgtggaagatgattgtatctaaaaagctcaaacctaggtgttaaaaaacccaggttctggcgctggagagctggctcagcagttaagagtgtgtacccatgttcacagcacctatgtaggctgcccacaaccacctgcaactgtagctccggggtatctgatgcctctgacctccgctggctcctgaactcatgaacactgagccacgcagagataaacacacatgcacataattagagatgaaatatatctttaaaaacattaaatcaagattactcaaaaagtttgaccagaaccccaagaggaagtgtctaccaatcgtgactcatcctggtccagttctagaagtgtgctcttcagaaaagtcgccactgtgatttgtctgttccacctaaggcaatgcttctgccccgtggatgctcggggcaggggcaggggcaggggcaggggcaggggcaggggcaggggcaggggcaggggcaggggcaggggcaggggcaggggcaggggcaggggcaggggcaggggcaggggcaggggcaggggcaggggcaggggcaggggcaggggcaggggcaggggcaggggcaggggcaggggcaggggcaggggcaggggcaggggcaggggcaggggcaggggcaggggcaggggcaggggcaggggcaggggcaggggcaggggcaggggcaggggcaggggcaggggcaggggcaggggcaggggcaggggcaggggcaggggcaggggcaggggcaggggcaggggcaggggcaggggggcaatgagcagcgtcagacaacaatgtttctgccacacaggcatctggagtccggtgctgtccctctttcctacaggaacaagttacaatcacacattcacaagaaatcctctgctcccatccctggcagatctcggagtttcccacaagccatctgggtctctttctatggtcctttttttttttcctcaagttttcttttcttttgtttttgtttttgtttttccaatttcattattagttgttaatgttcttaaaattgcagatccccatccatcagggattgtaccttacaattaataactggagtatgaacagctgtgattggacctgtgtctgtttgaatgcttattttattctgagtcctactctcaaatccagcatgctagagactctacttgtttgtcacttgtagaaaggagaagccattaaatctcttcagagtcttcattcttactggttcccctttgacattttttaaacgttttgtaaagtagatactgtgggattgctgtttgctgaggcatgtcgctgtcttttcctttagcatgacccttctcggatgacccaaccctgaggccttcatagctctggcttcctggcgtgacccaggtgtcactgtcttctgtgtcttcatcagcaacgagattgactttggaaaaaaaaaatatcattaaaagttcacagtaaattcagctccaaacagtttccataaacacagaattactttggttttatgttcacaagtcaaacatggaaaggatatttggtgactgtcaaaagttgtcattagtctctttacggataacttgattttgagtccggaggtgtggctcagaggtagggtactcatctctgtcacacatggccctgagtttcagtttggaagaagcacaaagaaacttaaagtaacttgatttacttataaccacagtaaccttttgccttgttggtttcccatgattctgggatagaattgggctcctctctgtgctaggtaagcactctcccactaaaccatagccacgatgctgttacctggttttattgctttgttttctgagacaaggccttacattacagcccaggctgacttagcattcaccattctcctgcctcagcctccaaaagggatcacagacaggtgataccaccatgcccaacccaaacacatctctttattcacatttagcttttattttttaatggaaaaatcatttgaaattaaaattattatactggccctaaaaagtgaattatcctgagcccttcattgggaaatgatcaaaacatggagtccgcttataaaatgggaagttagcccaaaatgcctaggagctgagcacaagcagtgtcttccaatctacatgaagatggaatatttggaatatttatgagcagcacttgagtattgggattttgttttagctctggcctctgtaagtcacacgttctcactccagaaacagattccaagctgcaagaggggcatcttgatagcagcaaaggttcatctcaaactctcatagcttagccacagaaggacaagcaaccaactttcatttctcctaaagctgggcacagaagtttctagagtgtttcacccctgctgacattttatagagatgtcaacaacaatggctttcactcttctctgtggtttcaggagcaatggggaaccctggccagctgtgcagccgacagaacaatgtcccagctgttcctaaaagcagccctagtcagactctacctgctgtccacagctgccatgccagggaaaggcgcactggttcacaaggagttgcctttctctagagaggaaagaaaaatactgagtatttacagaaaagaaaattggacccttcagccttcttttagtggccatgcctgaaatggcagtggggaaggccaaaaatccactcaggcagtctcgacattaaggcatgattcatactgcccaggatggaaaatccagctagggaagcaagcgcagccaaaaaacctcccaggaggtcctttgccagggctgctgcctgctgtcctgtgagacggctgcatatgaatgaatgaatgaatgaatgaatgaatgaatgacggtctttctctctctctctttcttgcaccgtcatagttcatgaccaagaaccccaccatgcgcttgggcagcctgactcagggaggagagcatgagatcctgagacaccctttctttaaggaaatcgactgggcccagttgaaccatcgccagttagagccgcctttccgacctagaatcgtgagtgccgctgtaaaagattctctccctttttcttcagatgaccaaagtccaaggaaaagctggtgtcgcctatggaatgacagagtcaaggttggctgtcccttgctgcacagagagatgggctggttgtccctgagacaatgtctctccatgtgttgactattgatcacaaagttttcacctctcacttgtgctagctctaccctccctgaaactaaattaaaatttcccagtagctaatacacgtaagctgctttaaatatccctagaagaatttaactaattgatgtcattcttcctagccagttttctcctgttcttggggcacaatttgtgcctctcccaagccctaagatagtagagaagatgctaggtgctccttcactgagcctggcttcttgacatgcacagcttgtcactgctacagtaatagaggactcaggccagacaggcagagcccctttggagaaatgcagaggacaacaacggtagcaatctaagccaccaagcttgagagtggccacctcacagtcttcaagccaagctgtacttataagcatcaagggttccagagaaggcaggctaaaaatagatcaagactattgggaggagacaaagtctgagacaaggtggaggagaaacgtccttgaatcagataagaggagtgggatctctcacaatggttgaaaagaaagaaacagacctccttagtatgcttataaagatttcatttacccagttctttcaaacagagtgagcttagtctgtgccagcctattaaactttggatgtccagcagccagagggatcccaccagctccagcccagtggggtgtattgtttctgaccagtaacaggttatacacttttgctctaagcctggcagcaccgtcgtaaaacaacccgagaacctcttctcacatgtgcaaaatgtgtgcaaacactaagtgggctgagaatgagtttattcaacctctggccagatgttgagtgggcgtgcccctcagcaaggcctgctgggaaaccacacctcagtgaaatggaggctaatgggcaagagggtaataagcaagtctgggtggccatgttaactctttagccttacagttcaaggctgttccacttccagggcacagtgactagagggcagggcatgggatgagtaacttggcagttggcaaaggccatagtaatacacgtggtggagtggccatgaagcatcgcttaatcatggatatcagagtcagaaatactgcccctgaccaaggatgcaggccagatctccaaactcttgagaatgggctgagtcccatgcaagagagcaaagccccaagcacatgcaagctgaccacagtttccatttttctttaacagaaatcccgagaagatgtcagcaattttgacccagactttataaaagaagagcccgtcttaactccgattgatgagggacatcttcctatgattaaccaggatgagtttagaaacttttcctatgtgtcaccggaattgcaactgtagccttatggggagtcagaaccaaaggggaaggtggatttctccaggaatttcttctgtgggaattccctagcatccgccttagaacaccagcttcaccttcatggagcaaaatgttcacaactctgcaaagggcggagcctcaagagagctgctctctcaagtccccaggagccatggtacatttcagtaatcgatactgagataagatgttacaaagatgtgcactgctcaacccatgagtctccagggctctttcaggcttggaggaaaggacagaagccaaaggaagagatgctgggaaggatacaggagatcctagggattataagccaaacaggcttccttttttttttaacttcaagagacaaatctactttcttgtggagcactctacactcttctttaagccaatatttcagtctacaaaagattaaatgctgatgaagaagtctctctagggaaaagaacggcattctaagtagaaggatgcgctttgaagaaactgcagatgggcgtccttcaagctcccaacctaaacccagtgttgagagctgaggttggacaccacgacaaccgtcagtgtcttgagtctcttcctcttcctttcagtaactagatatttattgagtgtcaaataaaaaggtgccataatcttcagtagcgtacacagtagagtcatgacgcttttacacatcctggggtccacccaatggtgttcacgttttgggaaagtcctctccacattgcataggtctgtcttctttgtctcctgttcatagaagggccaccaccacagttgtgcggtcagcaggcaggcttctgttgcatgccacccgaggactggtggaagcgaatcacccgcacatacttcatctcgggctgactcgttggtgaagaactctgcactgttcccatccatgaacacgtgtgtggcggatcctccagtcagtctatttaagttatgttttcagagacaaagaaggttgtttgatatacacattaataattaacaatgggccttgcaaacaaggctgacgacaaaggtgtaccttttcgtgtgtaaccatatatacagttgaaaagttttatctggctgaaaataaaggcatttttgtagcaaaaggaaattttgtgagaagagtgatttgtcctctccctgactcagaggataggtttctaatcaaagtaaaaagcttttcacagttattagaactcaggactgtaggcaaactcctgagagaaggtactggcagaacattttgtatccctgaggagggtgtggtcagtctcattcattcatgtctgctctgaatcagtgcagtgacttctgggtattgctgtagcaggctgatcctgggaatcttagtagctcttcaaaacatccacttatccttcacatacagtacatgcccatggccctctctatcttctacctgtgccatcaagaaagtagaattcctaaggtccacagagcaagaagaaaagatggaggaggtcctcgtttgcttcttaaccacctcctcagaggaacatttgcaacctctcttgccatttgattggccagattggggcatccctaaagataccagtggcctagaggaattaggagatagctgagcagtaccacagtctccatcatcagttcttttgggcattccagggtgaaaacgatatttctgcattaataggaaagctatcggccttcctgaagatttgtctggcacaggtcagtagcttgtgatgccatgtctgggtagcaggcaggagtaaatacagtacatcttacatcctgcaagaacttgaggttattggtttgcaaaagtcttgatcttgttaaggggtggacctagatatacagcctgaagctttacattctaaccctgcagtctgctgggaaagattggaactctttctgacttggggattcttgatcattatgcttgttttaaaatcagtcgtacaaatttcaagcatatttacttattcaatgctcctatgaattgtgtactcccattttcattatacagatggagaaactggggcgcggagtgttttttttttttttttaaatagcttgtccacacaagtcacacaacaaaagcattagggccaagataggacccaagccattttatttccagaatccttgcttttagcccaaatgcataaggctttccatttaaaatcaatcccatttccctaacctttgtggggttctgagagcagttaaaagggtgtagtctggggttcacaggagcaggaaataagctgccagtctgcaggaaggccttagtcatcctcagccctgtcatccttgcccctgtgcagaactgtagatctgatggggagatggctcaatctgcaatcaagggcggtgcttctcgcctgattcagagaactggggcagacccaggtgacgcaatagtgacttcagtttcctcattgtccagaaaaggagagaaagaggaaatagtctgggtcacactgggtcccataaactccactcgaatcccctgggctaacctctgagccttaggagtttacaatcctctcctcctcccggaggtctgtctgtcttttggtaactccaagcctccttctcactgactggggctggagcaaaagccacagctgcagcgagaagcaggtaggtgtgtacagccaccaggcagctggtggtggcagctgcacatttatagccacaaatcccgtgtgacttgcctgcaaggagaagagcaggaaacactgtgtctgccacgtgttggttttcattgggtgtgcagtgacttcaatattccaggcacacatttatccttcaccatttcccaaggcagcagccaagacctttccccttatttagtcttggctatccggattgcttcatctggcagtgttgacttacagcaaacagaggccgtgatgccctggctttgtgggcacactgggtcatataattcttcctttcatatcatctgaagataagagtctgatccaagtcagacatttcaggaaatgagcctgctcgtcacaggttctcctggaaatgagccctgtggtcacaggttcctctgggctgggttgcaggttggcgggaacaaaccagagcacagctgtgaacagaactccgttgtcttcctttctccctgtattggattcaaaccaaagctgagggtgcccctgggcttcatcctatatccatcccacccctagtcctggtcagttgtctttctcttctcctgtctccccctatcttctcccccacacttggctttcagagccagttttccaatcaaaaatgacttaaaatcatttgtgtgcttattctgaaggttcctctggagctcataaaagtcagccacctttcccatgtatgtctgcctctgttatcgccctatgggctcctgccccaacatagactatctaagagagccacttctctcagccgtgtgaggtaagaggcccccaagttgagagagcatgcttagtggggtacacacatatggggtgagcccacactcacccagtgttcttaagcagaggaaattgttcctcagttttagtgttcttgtcagtgaagtacaaatgacacaaatgacagtggctgcctgccttgtgttactgcctcaggggcagatggaaagcatctagttagtacaaggacactggatgtgctctgtgttagctattgttactaccagctgcactgtggagcttggaatgtccatcagacagtgggcaggacagacccccacatacttcatgcccatctcatacagatgttgagccagcaccaacttaagaggattcaactcttctgcttggccccagagcctcctcagttgactaaaccttctggggagttttgagtcaagcccagatgccaaatatggatgagttttaagtgtaaaatacagctcaatctaaaacaaccaggccaagaattgcccatggtcttcctaattggcttttctctccaacatgataggaattctgtcgtccttttaggtttagctacaagattcatttagttcacttctgaccaattagcatgagggccacacccatcctgggcactgactgggcacatgcagcatgctgtgccaccagaagccaagatacccaagatattcagtaactcctgccatgtccaaggacctgaagccatggcagagcctctaccctcttctctttaaagcaagctctctggagatgtattgtggtaaaaagagcctccacaggcctgtagattcttctgaaaagacagccctagatgtcccctgccacatgtcatagctcttccagatccccacagttgcctgtcttatgccaccaaggcggttattacctgacagaggcttcattcttccagtggcttgagccgcagctagaagaatttgggtgagacaaagggaaggttgtgttaggaccaagtgtggacgtgttcaagtgggttgccagaagtgagaatctttatagagacatttcaaatttagaaaccagggacagtctagcagtcatttgaccggacagtgccaaaaataccctgaatgagctctcaaggttttccagccttgtgctctgctggctaagaataagtgggtggctgtgctcaatgggcctctctacccttactgataacgtccctgtcatccattgaaatcccagtcagatttgctctttgtccacctctgggcaatctttatgccttatctcatctccacatgcaccctgtgctctctcggtctcaagattcttttttagacacactcagatcactcattcccatagccatgtactcaccagcaccccttatccagctgcctttcctatttctcatgcttacccatgcgcaaaagggaagaaggaatggcaggctccctcagtagcagatgcaagcagagctgttgccagaagagaaaggactccagggtgcttgcccttcctctatggctgcagttctcaacttgtgggtcacaacctctttcggggggggggggtgtcaaacagccttttgacagaggtcacatataagatatcctgaagattagatgtttacattacaattcataacagtagcaaaattacaattatgaagttgcaacaaaaataacttcatgattggaggtcaccataacttgaagaactgtggtaaaggttgcagcattaggaaggttgagactcattgctctaagagaaggctcttgacagtgaagaaggtaaggtactcgctgatacgatgaactgtagcccggagacagggtgctaggaggcattcggatgaatgttggtaagaatttgtgagatgagaattatttcggcaatgttagttactgaaacactggaaggatgttgatcagtgggagaaaggctaacaaggcttccaaaagttacatttatgtattttgtcattgtggtgggggggtaggtatgatgcattccatggtgcaagtgtggcagtcatgggatgggtcggggaggttggttctctccttccaccatgtgggtttggaggcttagactcaggccatcaggcctggcaccagacacctgaacccactgggacatgtcactgaccctagctcatttctcctttctttgatgattcctggactggttgatcaaggataggtggtatactttctctagttgaattctaataacttaagtaaccaggtctcaactcatttccttgtggcaaatgtgggttaaaggagcaacggtacgcagggtgtgtcagggtgtgtcagttaacaggtaaagatcagtccgagacggtgatccttcaggcccaagacaaccctgctctccttggattaagacaattttttaattttatttttaattaagtatttatttcatttacatttccaatgctatcccaaaagttccccacacgctcccccacccactgcccccacccacccactcctacttcttggccttggcgttcccctgtactgaggcagataaagtttgcacgaccaatgggcctctctttctactgatggccgactaggccatcttctgatacatatgcagctagagtcacaagctctggggggtactgattagttcataatgttgttccacctatagggttgcagatccctttagctccttggatactttctctagctcttccattgggggccctgtgatccatccaatagctgactgtgagcatccacttctgtgtttgctaggccccggcatagtctcacaagagacagctatatctgggtcctttcagcaaaatcttgctagtgtatgcaatggtgtcagcatttggaagctgattatgggatggatccctggatatcgcagtctctagatggtccatcctttcgtttcagctccaaactgtgtctctgtaactccttccatgggtgttttgttcccacttctaagaaggggcaaagtgtccacactttggtcttcattcttcttgagtttcatgtgtttagcaaattgtatcttatatcttgggtattctaagtttctgggctaatattcacttatcagtgagtacatattgtgtgagttcttttgtgattgggttacctcactcaggatgatgccctgcaggtccttccatttgcctaggaatttcataaattcattctttttaatagctgagtagtannnnnnnnnnnnnnnnnnnncaatagctgactgtgagcatccacttctggtgtttgctaggccccggcatagtctcacaagagacagctaatatctgggtcctttcagcaaaatcttgctagtgtatgcaatggtgtcagcatttggaagctgattatgggatggatccctggatatcgcagtctctagatggtccatcctttcgtttcagctccaaactgtgtctctgtaactccttccatgggtgttttgttcccacttctaagaaggggcaaagtgtccacactttggtcttcattcttcttgagtttcatgtgtttagcaaattgtatcttatatcttgggtattctaagtttctgggctaatattcacttatcagtgagtacatattgtgtgagttcttttgtgattgggttacctcactcaggatgatgccctgcaggtccttccatttgcctaggaatttcataaattcattctttttaatagctgagtagtactccttcctttaatcttacttgtgacttcaagccttcagtatcataactgttagattacaattttctccattctctctctctctctctctctctctctctctctctctttctctctctctctctctctgtcccccaacacagagttaatgccaagaaaacatgttgaactatggtttgcatcctttcccctttcagacaagtttaccgtccaggccctagcagcctgtctgtcactccctcgggaaacctctaagaataagaaacccactttgtcgcagggatttgaaaccctttaccttcaggatgcctgccatgctacattctctccttcaggatgcctgccatgctacactctccttcaggatgcctgccatgctacactctccttcaggatgcctgccatgctacactctctccttcaggattcccatggtgtggaggctcctcttggggatttgaaaaggatgcactctcttatcattgaaggcctgagaatgctgcctgtggcatgatgccctgtgtcttttcatgcttgcccatgtcagtgtcatgtggctctttattctagtaaagcacctcgggagagcaagctcttgccacccccttcccagacacttgccgctttaagttataacaataactaaaaacaaaaaggaagtggcataataaagtactactttgtctccaaactatacatattcttccaggagattctgatacaagagccagtgagcctagagagtcatgcactaaacatattttttaagcttttatgttctttttatttatgggcatgggtctgcatgtatttatgtgcatatgtgtgcagctgtctacagaggccagaagagagcaatgcctttcccaggagctggagttacctgtgagccacccatatggatgatgggaactgagcagtgttctgtaagagcggcaagtgctgttcaccaccaagtcacaccttcagcctccaacttagattctttacccaaaccgannnnnnnnnnnnnnnnnnnncagctcccaaactgtgtctctgtaactcccttcccatgggtgttttgttcccacttctaagaaggggcaaagtgtccacactttggtcttcattcttcttgagtttcatgtgtttagcaaattgtatcttatatcttgggtattctaagtttctgggctaatattcacttatcagtgagtacatattgtgtgagttcttttgtgattgggttacctcactcaggatgatgccctgcaggtccttccatttgcctaggaatttcataaattcattctttttaatagctgagtagtactccttcctttaatcttacttgtgacttcaagccttcagtatcataactgttagattacaattttctccattctctctctctctctctctctctctctctctctctctctctctctctttctctctctctctctctctctctgtcccccaacacagagttaatgccaagaaaacatgttgaactatggtttgcatcctttcccctttcagacaagtttaccgtccaggccctagcagcctgtctgtcactccctcgggaaacctctaagaataagaaacccactttgctatcctaggttttttgttattccagacaaatttgcaaattgctccttccaattcgttgaagaattgagttggaattttgatggggattgcattgaatctgtagattgcttttggcaagatagccatttttacaatgttgatcctgccaatccatgagcatgggagatctttccatcttctgagatcttctttaatttctttcttcagagatttgaagtttttatcatacagatctttcacctccttagttagagtcacgccaagatattttatattatttgtgactattgagaagggtgttgtttccctaatttctttctcagcctgtttattctttgtatagagaaaggccattgacttgtttgagtttattttatatccagctacttcaccgaagctgtttatcaggtttaggagttctctggtagaatttttagggtcacttatatatactatcatatcatctgcaaaaagtgatattttgacttcctccttttccaatttgtatcccccttgatcctccttttgttgttgaatnnnnnnnnnnnnnnnnnnnntcaggatgcctgccatgctacactctccttcaggatgcctgccatgctacactctccttcaggatgcctgccatgctacactctctccttcaggattcccatggtgtggaggctcctcttggggatttgaaaaggatgcactctcttatcattgaaggcctgagaatgctgcctgtggcatgatgccctgtgtcttttcatgcttgcccatgtcagtgtcatgtggctctttattctagtaaagcacctcgggagagcaagctcttgccacccccttcccagacacttgccgctttaagttataacaataactaaaaacaaaaaggaagtggcataataaagtactactttgtctccaaactatacatattcttccaggagattctgatacaagagccagtgagcctagagagtcatgcactaaacatattttttaagcttttatgttctttttatttatgggcatgggtctgcatgtatttatgtgcatatgtgtgcagctgtctacagaggccagaagagagcaatgcctttcccaggagctggagttacctgtgagccacccatatggatgatgggaactgagcagtgttctgtaagagcggcaagtgctgttcaccaccaagtcacaccttcagcctccaacttagattctttacccaaaccgactcgacagcaaggcagcttcgtttacattactgcttccatcttgtcctaacttaattagctttttcagatacaaatgcagattatagtctacactgg

SEQ ID NO: 340 - DNA, 2176 bp, Mus musculus
tccgggttccccagtgccagccagcgcggccccctcggggctccggcagcagcgccggcatgtcgtccggcacgatgaagttcaatggctatctgagggtccgcatcggagaggctgtagggctgcagcccacccgctggtccctgcggcactcgctcttcaaaaagggccaccagctgctggacccctacctgacggtgagcgtagaccaggtacgcgtgggccagaccagcacaaagcagaagaccaacaaacccacctacaacgaggagttctgcgccaatgtcaccgacggcggccacctggagctagccgtcttccacgagacgcccctgggttatgaccactttgtggccaactgcacgctgcagttccaggagctgttgcgcacggctggtacctcggacaccttcgagggctgggtggatctggagcctgaggggaaagtgtttgtggtaataaccctaacagggagtttcactgaagccactctccagagagaccgcatcttcaagcattttaccaggaagcgccaaagggctatgcgaagacgagtccatcaagtgaacggacataagttcatggccacgtacctgaggcagcccacctactgctctcattgccgagagttcatctggggagtatttgggaaacagggttatcaatgccaagtgtgcacctgcgtcgtccataaacgctgccatcatctaattgttacagcctgcacttgccaaaacaatattaacaaagtggatgccaagattgcagaacagcggtttggcatcaacatcccacacaagttcaacgttcacaattacaaggtgcccacgttctgtgaccactgtggctccctgctctgggggataatgcgacaaggacttcagtgtaaaatatgtaagatgaatgtacatattcggtgtcaggcgaacgtggccccaaactgcggggtgaatgccgtggagcttgccaagaccctggcagggatgggtctccaacccggaaatatttctccaacctcgaaactcatttccaggtcgacactaagacggcagggaaaggagggctccaaagaaggaaatgggatcggtgttaactcttccagcagattcggcatcgacaactttgagttcatccgggtgttggggaaggggagcttcgggaaggtgatgcttgccaggataaaggagacaggagaactgtacgccgtgaaggtgctgaagaaggacgtgattctgcaggatgatgatgtagagtgcaccatgactgagaagaggatcctgtccttggcccgcaaccaccccttcctcacccagctcttctgctgctttcagactccagaccgtctgttctttgtcatggagtttgtgaacggaggcgacctgatgttccacatccaaaagtcccgtcgtttcgatgaagcccgtgctcgtttctacgccgcggagatcatttctgcactcatgttcctacatgagaaaggtatcatctatagagacttgaaactggacaatgtgctattggaccacgaaggtcactgtaaactggccgactttggaatgtgcaaggaggggatttgtaatggggtcaccacagccaccttctgcggtacacccgactacattgccccggagatccttcaggagatgctgtatggacctgcagtagactggtgggccatgggtgtgttgctttatgagatgctgtgcggacatgcgccctttgaggctgaaaatgaagatgacctttttgaggccatactgaatgatgaagtcgtctaccccacctggctccacgaagatgccacagggatcctcaagtctttcatgaccaagaaccccaccatgcgcttgggcagcctgactcagggaggagagcatgagatcctgagacaccctttctttaaggaaatcgactgggcccagttgaaccatcgccagttagagccgcctttccgacctagaatcaaatcccgagaagatgtcagcaattttgacccagactttataaaagaagagcccgtcttaactccgattgatgagggacatcttcctatgattaaccaggatgagtttagaaacttttcctatgtgtcaccggaattgcaactgtagccttatggggagtcagaaccaaaggggaaggtggatttctccaggaatttcttctgtgggaattc

SEQ ID NO: 341 - protein, 702 aa, Mus musculus
RVPQCQPARPPRGSGSSAGMSSGTMKFNGYLRVRIGEAVGLQPTRWSLRHSLFKKGHQLLDPYLTVSVDQVRVGQTSTKQKTNKPTYNEEFCANVTDGGHLELAVFHETPLGYDHFVANCTLQFQELLRTAGTSDTFEGWVDLEPEGKVFVVITLTGSFTEATLQRDRIFKHFTRKRQRAMRRRVHQVNGHKFMATYLRQPTYCSHCREFIWGVFGKQGYQCQVCTCVVHKRCHHLIVTACTCQNNINKVDAKIAEQRFGINIPHKFNVHNYKVPTFCDHCGSLLWGIMRQGLQCKICKMNVHIRCQANVAPNCGVNAVELAKTLAGMGLQPGNISPTSKLISRSTLRRQGKEGSKEGNGIGVNSSSRFGIDNFEFIRVLGKGSFGKVMLARIKETGELYAVKVLKKDVILQDDDVECTMTEKRILSLARNHPFLTQLFCCFQTPDRLFFVMEFVNGGDLMFHIQKSRRFDEARARFYAAEIISALMFLHEKGIIYRDLKLDNVLLDHEGHCKLADFGMCKEGICNGVTTATFCGTPDYIAPEILQEMLYGPAVDWWAMGVLLYEMLCGHAPFEAENEDDLFEAILNDEVVYPTWLHEDATGILKSFMTKNPTMRLGSLTQGGEHEILRHPFFKEIDWAQLNHRQLEPPFRPRIKSREDVSNFDPDFIKEEPVLTPIDEGHLPMINQDEFRNFSYVSPELQL

SEQ ID NO: 342 - DNA, 248999 bp, Homo sapiens
acaagaactcactcactatcatgagaacaatgtgagagaaactgcccctatgatccagggtggttgacatgtggggattagaggtcccttgacatgtggggattacaggtccctccctcgacatgtagggattataattcaagatgagatttgagtggggacacagagtcaagccatatcaactacatagtgggattttattaaattagtactgaaaagaagcagtaccttaatttacctactttacttgtccagcgttttgaataaacatttgctaaatttctgtgttcaaaacaaatgattcttgtgcttcagcttcctaagcagctgggattacaggcatgtgccaccatgcctggctcatttttgtatttttaatagagatggagtttcgccatgttggccaggctggccaacatattttacaccaaatagggtcatgatgaattacagtttgatagcctgcttttttcactaacaatatattgagaaagtctacaatggctactctagtaaatagctatggctacatcctggtaaaatagtcaatttaaagtgaagctctccatattggtccattttcatactgctatgaagaaatacccgagaatgggtaattttttttaaaaagaggtttaatggaatctcagttccacatggctggggaggcctctcaatcatggcagaaggtgaaggaggagcaaaggcacgtcttacattatagcaggcaagagagtgtgtacagtggaactgccctttataaaaccatcagatctcatgagattattcaccatcacaagaacagcatgggaaaaccttcccccatgattcgattacctcccactggctccctccacaacatgtggggattatgggagctacaattcaagacgcgatctgggtggcacacagccaaaccatatcactctccccccgcctcccacagctatgaaaaacataactaagaaggcctgagtgacctccttaacattaagatcatttgaattgataataaacattttgtgtattaaattttatcactataaaaactattcagttcaaaggctaaaagagtgtgtagaggttttcataagtgacctaaaggcaattccaaaggattttgaaaaatccaagtatgatgcccaaggacaagaatgaaattactgactggatggtcactgagtataccagagaatgccatcaagacctagagaaaacccagtaaagggtaaagagaatgatgctattaccgcaaaatagtcattttcctttcacaggcttcttacacaagccatacagtttaataatttggttatgacttgtagttaataactacttggcttgttaatggacaagaaccaaatgagaaaagttaatggaacaacctgaccattagctatattaataatagctttagagaaaatgattactattttaaaccatattcacatgcttctatcactaatccttttttaaaatgtcaaaaatattaagttctgcattcagaattaaagaattttaaaccattttattttgagacagggtcttgctctgttgcccaggctggaatacagtagtgtaatcatggtcggtgatcagcctcaacctcctagactcaaccactctgtattagtctgttctcatgctgttgataaagacatacccgagactgggcaatttacaaaaaaaagaaggtttaattggactcatagttccatgtggctggggggtgcctcacaatcatggtggaaggcaaggagaagcaagtcacatcttacatggatggcagcaggtgaagagagcttgtgtagggaaactcccccttatataaacgtcagatcccatgagacccactcactgtcatgagaacagcatgggaaagacctgttcccatgattcagccacctcccactgggtccctcctacaacacgtgggaattcaagatgagatttgggtggggacacagccaaaccacatcacgatccttctgttttagcctcctgagtagctgggaccataggcatgtgccaccatgcccagctaatttttaaaatttcttatagagacaggttctcgccatttgcccaggcttacattattttagtttgaaaagatatttttgcctcatttggtgacatgctagttttacgtgttagaagtggatacaaagaaatgtttgcagtgactaaatgcagttagatttggctcccctaaataatttatctcttcttttttattgtgtatgaagtcttttttttgtgtatgaagttttttttattgtgtatgaatctaaaaaactataattgggctgtcataaatctgtttcttaatagaatggcagcaaggttttccagggttcacactattgctagaaaggcacttagataatataaaggatttcaaaggaaaatattctaatatggatagattcaagtaggtgagatgtcaaaaaataaattagccatagaagagatttgtatttgttttgtttacatacataaaatatttaacctcactcgattttcctgttagaaaacagtggcagaaatgttttatgaagtcgttgctcttgatcaccaggctgtctgggcagttgtcagtacaaagtgttactaacttgactgctttttatgggaggattatttttatttgtgcttttctgttctgatctcaatccctggaatctgtcttacttaagtggacttttgaggcaaatagtcatcgaaggctcttcttttggggaaacctgaggaagggcgagaagctctccctgtctcctggatctgcttgccctcttaggacccttcccctttgggtttccttccctttattctctctctcatcatgagctgtgcatccactgacaccctaacagactggccgtcaggaccctttggctagctgaagtcctcactctctgatctcagccccccatgccaccccgccctgactttgtctctgtttcttcctccaagtcattgaagatctttcctttatccatcatgaagtctggaaacttcccaatgatatttctagttgtgggtcgttctttactcgttctgcccaatatgctgcatcattttcaatatgagaccagtgtttttctttcattctgagaaatattactatatctttgaaatatcttacattttctgttctttttgtcccatgaggaggacagtatggccccacttatttagatgtatctttgcatactcagaaatggatatagacaggcacttctaggacccctgccctgcaaaccactctctcctgcttgctgagagtctcagtcttcccctttgtactcagtgtgtagtagcggtagttttcaatcctactatccgttagaatcatgctgggatggagcttaggcatttatttttccaaaaattcgtcaaatctcagctctaccatgtattagctatgtgatccaattcacttaacgcttcaactctcggtttccttatttgtgaaatagagataataacatttcatttggttgtcatgaggatcaaatgaataatgtttgtcaagtgctttgttggctggtggatgctcaggaaattataatacagaagccaaggtaacagctgaagtgtaccatgtgcctggcaaggtatcaaatgccttatgttaattattttatctccagagtcctttaaaataagtacatttatttgtacaatgctctgaaaattgttttaatttacccgtgttgcattgttttctttatccttttgtatacatattttttgtacttcttagcatatttatatttcttactctagttttcaaatgttatttactggattttttttttttttttgagacggagtcgctctgtcacccaggctggagtgcaatggcgtgatcttggctcactgcagctcttgcctcctgggttccagctactttcctgcctcagcctcctgggtagctgggattacagggacataccaccacgcccagctaatttttgaatttttagtagagatggggtttcatcatgttggtcaggctggtctcgaactcctgacctcaggtgatccacctgcctcggcctcccaaactgctgggattacaggtgtgagccactgcgcccagcctctttactgtttttttctatgttgtttatcatatataattttagtaattacataatattccattaagttgctattctataatatactcagccattccaatatggctgaactggttctttaggcatagaactcattttactttgaaacttctgatgtacactgtcaaactgcccctcaaagcctgtgccattttatagtaacacggggtcacatttgacctggctgtgttattctctaaattctctaattctattaaatggaatgggagttgtgtgaaatgttccttaagaaattagaaaaatgacagtgattcaatcaagcaaccaatcaatttaaaaagcattttgataatgtactaggaattatatacagagaagtctaaagttatagtgtgactaagacaagaaacagtaatagtgatcatggaataaaaccctctagtctataaaaggacctataatacagatatatctatattgcaatagttgctatattgtatcacatacaatccattagtgatcagcgtgggatgtgtagagaaagggaaccccttgctcccctgctttcagggtcagggccagctctggataaaagttgttacataggagaagttggtattggcagacaattccttcttacggagaccttgtactgtgtgctgctccctacctgaccttatgtcacataacataggctggagacaattagagttttcctggagattaattttgagatgctgatagcaaagatcctcattctgctggggctgttaagctgggaatgtaggaagttggggctgttgatgaccatcttccctggctgtatttagggagccagttgcaggaagagaaaatgaggaacagggagaggggagcaaaaccaacaggtgatgagagggggaaggaaggagacaaaaagtgcttgagccagatggtgagagggtagcttgacaattaccacggtagcctgtattttgcctgtagccttttggggtttaaatacttcacgtcaaacgtgtgacttcaatcaggcaattttgggcggcaggctgagagccacaacataggtgtttctttttaactaaggcccatgcttttgccatgtcttgggtgtcattccctcctgcagtctcagaacgctatgatctctctcctcggtgttgcttacccattctaaacaagcccttcttctagtgattccatcttcttcctcagctctcactctccttcccatcccagccaaacttcttgaaagggtgcctacattcactctctcacacacttttcacctcaacctaccctaacaggcttccactcacaactccctactgaaactgttgaaagattactaaggacctgtccatgccaactccacatgccattctttttaaatttatttttatattttgtagagacagggtctcactttgttgcccaggctggtcttgaactcctgggctcaagtgatcctcttgcctcagcctcccaaagtgctgggactacaggcgtgagccatggtgccaagcccatgtggcgttctttagtccttgcctactacatctcttgacatcatttgacctagcagacaattcctccctgcttgaaaactttttggttggtttccataatacctggacaccacatcttcctggctactgcttttctcttacctccctggctactgcttgtcatcccacttgcctgcttctcctccacctataaatgttggagttgctggagggctctgtcctgggtccttctctcaagttgcattctcttcctatcttcccataaagagtctgatccactattctagcttcaattactatctgtataccaatggctcccaaatttgtctttagctaagagactgcccctccgagtgtcacaaccacatagccaattccccacttcagatttctgcttaaatgtatcaagatatatcaaacttgataagttttgaattgagctcttcatcctcccctcccacccccaactctttatccctgccccaatctcctcttgccatgtttctttctttttttgagacaggatctcactctgtcacccaggctggagtgcagtagcatgatcataggtcactacagtctcaacctcccaggctcaagtgatcctcctgcctcagcatccgagtagctgagactacaggaacctgccaccacgcctggctaatttttatatttttttgtagaaacgagtcctcactttgttgcccaggctgctctctaggctcaagtgatcctcctaccttggcttcccctgtgaacacaggcacgtgccctggctagttttaaaaagtttttttttttttttttttgtagagatgagagtctccctatgtcgcgcagggtggtctcaaactcctgggcttaagccatccccccaccttgtcctcccaaagtgctgggattacaggcatgagccaccacaccttgtctcatgccgtttcttaactccctaatagctccctagtccacacagttggctcaagccagattctgcaagtcatccttgataccgtcctcttcctcattcccttcaatctgtcatcaagacttgtcagttctacttctgaaacacttcttgaattcatctatttatcttcatctccatcactaccacctgagtcctggccaccatcttctcacctctggactttggcaacagcttcataaactggtctccccacactcgtgctgcttcttccaatccacccccgagagagatattttattttactaaaaaaataaaatgggactacaggcacatgccaccacatccagctaatttttttagtttttattttttgtagagacagtcttgccatgttgccaaggctggtcttgaactcctgggctcaagcagtactcctgcctcagcctcccaaagtgttgggtttataggtgtgagccaccttgcctgtccccagagaggtattttaaaacacaaatcctcatcttaccctggctctgcttaacagccttcagaggcgtccagtggcccatagataatgtccaaggctttcctgtgatctaccagtctggtcagtgtgaccacctttgcaagctcatttcagccactctcccctcaccttcctcagctccagccacgccttcctcagctccagccacgtagggtgcttttggttcccaaacaggccaacccatctgtctcctcaggagctctcaatgagctgatctctctgctatttgctttttcaaggaacccttccctgaccacccatccagttataatacatcaccccttggcaccgtgggcttttccttcactgcaccctcttctattagttgtttttcctccttgtgggactgtaagccccaggagggcaggcaccatggctgtctgacccactgctctgtcaccattgccaatcctgataggtactgatagggtgaagatggagtgtctggtatcgtcatatcccagtcccaggacagctgtgtggccacctaccatttggggactgttttctttttaaaatttaaaaaaaaatttaaagtctacaccccatgattctgtatggggactgttttcttttagccccaaagtccaacaggagcaaatcctttagtggctcttaaagctagagttcagctgtttggaggaaagggtgacagagctgacccacagggtagatgcgacatcttcccctggagcactaaggccaaacaggagccccctggacgtttgggagcaggctttacaagccctgcctaaagctaagatgtcattagagtgatgcgttgcatccctgccttgttctctaaggaagctttggtgttttcaagacaggccctctcccccctggcccattgtccttacttgttttcattctgtatagtgctgttattacgggtcaggcctccttgcactcatgtgaaatcgttgagaacctactcaattagaaagttctgaacagggccttagaggagtgggggctagaaagatgaacctggggccaggcacgggggctcatgcctgtaatcttaacactttaggaggcaggggctggaagatcacttgaacctgggagctggaggttatggtgagccatgatcacaccgctgtattccagcctggatgacaaagcaaaacccagtctctaaaacataaaagaaagaaaggagggaaggaagaaagaaaggaatgaaagcaagccgaatctgctccgagggaaccagtatagcaagacagaatgtaatcaagtatcttaagagtggcctaggcttggctgggtgctgtggctcacgcctgtaatctcagcactttgggaggccgaggcaggcgaatcacttgaggtcgggagtttgagaccagcctgaccaacatggagaaaccctgtctctactaaaaatacaaaattagccgggcgtggtggcgcatgcctgtaattccagctactcgggaggctggggcaggtgaatcgctcgaacctgggaggcggaggttgcggtgagccgagatggcgccattgcactccagcctgggcaacaaaagcgaaactccgtctcaacaacaacaacaacaacaacaacaacaacaaaaagtggcctaggctttttggggaacaaattggttgtggctggccctcagggagcaagctttgcggcatagcagcgtaggctaaaaggtcctccccggagacaaaatctgcagggaccacggggtgggaagcatcagaaggctgcccactctgactgcaaatacaacaagctggagtgttcctagaagaggcaatttcttccgcgtgtgtgttggggacagcctgtgtgtgtgaacattttctgcccttgccgcgcagggctgggtggaccaggaaccacccgcagaggaagagacttattacctcttggccatgtctgtctccagaagaaccgacctttcctgctctatgtgcaacaagacacaccttccgaggaaggaggcgaacaggatttccatcattactactgccctattaaaacacacacatacacacaactgtgtaattagcctctgcaggaaaggcgcacaaacaggatgcgttcgagctgaccccgggatgagccatccctgtaaatattaggaaaaagaacctccccgccgtgcccccgcctccggccagggcctcttggggatggccctgcagggtcaccagcccaccggggaggttgggagagagggggcgggcgactcctcgccgcgcgggttcctggctggagcgccctcctctgcgtcctcccaaccttccatcgctccccaggtcagtctaccacgcctcaggtgtttgctcgggctgggccacgaaccctttcctttttggcctgcgcccggggtggcccctaacccgcagcgcacggccagacccagcgctacaaggagggcgcgcagggcggcgcaagcgggcactggcctcccgggggcttgcgcggggatccacccaccgcagggccgggccgcggaccgcgggccacgcccctggggtccggaaggcgcgggagcggacgcgggggttctgtgaacttggaacctggcggtgcgaggttctcgccggggatgcggcggcggcagctgcttcctggtttgaagctcgccgagtgggggagagcgtgagccttcggaggcgggggcaggaggagaagcaagaggaggcgggggaagagacgcttggggctggggctcaccggacgggtaggtccggctctccagggagaggagctgcccggccctggagaaggggcgagtcctgcgcgagtccccgggaggcgccgcgcgcttggaagggacggtcgggcttccccggcccgctgagggctcggcggcgggctcccctcctttccacctcgggagggagggaaggaggggagggaaaagtcccacggaggaggcagaatggccagtcgaggggcgcttaggcgctgcctttccccagggctgcctcgactcctgcacctgtcccgagggctggcctgagacgggactcccggttctcccgctgcgaagcagcgcggccccccggggccggggcagcggcgccggcatgtcgtctggcaccatgaagttcaatggctatttgagggtccgcatcggtgaggcagtggggctgcagcccacccgctggtccctgcgccactcgctcttcaagaagggccaccagctgctggacccctatctgacggtgagcgtggaccaggtgcgcgtgggccagaccagcaccaagcagaagaccaacaaacccacgtacaacgaggagttttgcgctaacgtcaccgacggcggccacctcgagttggccgtcttccacgagacgcccctgggctacgaccacttcgtggccaactgcaccctgcagttccaggagctgctgcgcacgaccggcgcctcggacaccttcgagggttgggtgagtagcggtgaccccttccctttgtgtccacccaacccccgttccccttatgtttttcaaaactcacccgggtcccgctttcccatcgctttgtggctgagggaattccctccagactttggtcttcgtccaggtggccgcggcactggtgacgcgaccgcggtgggtgtgtgcaggcgcaggtgtgtctccaggaagccggcctggacacgatcccctttcaggacagcggcttggcctaacgggaagtcgggcaggggtccagggcggtcaccctttccgcccagtctttgggtaaggagctccaactttcagcacgcgagtgataggtaggaaaggcagggaaggagtgatacaaaagggacttgatttgggtaaagtgcttcaagcgctacttaggagaaagccgtacattctcgcgagtattattcataatgtttatggatacatgttggttcagccgctcagacgtgcacacgtgtttcggcttgcacatcccagaggtacatgagctacactggcagggaaatgagcgcctgggtctgcacgttggcagttttattatttagcatttttccaaggagatgagatttacatatacttgcaggtaacttagtcagtccgaggtgggagtcctgcagtgtgggtttctgctgctatgggtctgagaagaggctgtaaggactcctcaggaggttgttaactgtcttccctccccccatcaccagcctgtgttcctgggtattgacgtgtagctacccgcagctctccccttgcctctgcttttcacatagttcccatgaggcataatttctgctgtaaatcaattaaaacttctagagcgctctacacggtgctaacatgcttttactgcctaatcctcacactgtctttgtgatgcaggtgtcatcgttcccactttgagatgatggaatgataattataataaagtagtctggtttggcaaagtggagtacgccatttgaagactctcaggagtttaatagtttaagttctggagggagtcagttttgaacccaatatcagtattgaaaatgtttgaaatttacaagtggtgaaatcagatggatggtgatgaaggctcatttaggtatttattttatactttgtggaattagtaattttaccgtatattttctaaaattaaagatggcttgtggagctattcctttcttttaaatagaagtacaaaaaccataatgactaaccttaatcgtcaaattatattgagttaatttcccttcagcctaatttactttgtggtacttagaagtggggactagagaggaattgctaaaatacagttagatatttacatttatcctgtgaatttctggaaatgaaatagaagtgagtgtaggcatccagatggaattgttgagttctattagtgtctgattaggagttaggtcgggcaaagctctagaggaactaggttctgaattatggtggtgcagattggccagtggccatgagaagcatctcttcctggagatagcctagactcgtccttctcaaccataatcttcccacttgaatcacccagggacctttaaaaaatccccacttttaaagattctagataggaatctctggctgtgggaccccatcatccgtacttttaggctcaccaggtgattccagtatgcagtcgaggtggagaacctgcagcctacatgaagaccaaaagatgaggacttcttggtgtcataagtgtaggaagatccacgttatctgactaggtggcatgtacagagctgcttattgttccactggatgaatattcaatgtaaatcagatatcgatatttataatggtctgaaataattacacttagatgtttaatataacccactggtggtgttttggaaaacgttgagtggttggtagggagggtcagcatttaaatgaccttgaaaccagcagtttttcatgcgtttgcatgcatcagaaggcagatttttttgttgttgttttttttaaaaaggttttgggtatttcagaactgtaaggatatggaacataggttgggcagagtgttgtttcttttctttttaaagaaaatcttgttaaaaaaatttggaaatatatggaatgcatgcttttttaaaaaagtatcctttataggttcaaaaatgctttaaaaaaatagagatggggtcttgctaccttgttgaccaggctggtcttgaacttgtggcctcaagccatcctcccacttcaacctcccaaagtgctgggattacaggtgtgagccactgcatctggcccaaaggtgcttttgaagttcaggattaaagaaatacttatttatctttagtattttaaattgacatgtagtttattcagagagttaaatgtggaataattgaatttactccataataaatttatggttgcaagtggaactacagattactgacttaaaaaaaaactattgaagttgcaggttcaaaaaacccccaaaacctagtgacttagtttttgctagatccagagaagctcttagctgtaggttatggatgagaggattcaatatggttaagatctcaattcttcccaaagtattcaataggttcagtataatctcagtcaaaatctaagtttgttgtagaaattgacagactgactttaaaatttatatggaaatgtaaagtactgagaccagtctaagaatagttttgaaaaagaacaagttgggggacttagagtatctgatttcaaggctaactgtaacatgaccgtaatcaagataatgtggtattggaataaagagagtcatacagatcagtggaatgaatagaagagagtctaggaatagatccacacatatatgacccactgatttctgataaagctgccaagaaggcaactcagtgggggaaatgatagtcttttcaactaatggtgcttgaacaactggatagccacatacagtaatatgagccttgacacttacctcacatcctacaaagacattaattcaaaatggattatagacctaaatgtaagagtttaactgtgaaacttctataagaaaacaaaattgtagtgaccttgggttcagcaaaaaatttttagatagcgtacaaaaggcaccaactataaaaaaatcagtaagttggactttatcaaaatgaaaaactattgcttcccagagaatgtttaagaaaataaaaacccaagccacaaatgggggaaaataactgcaacacgtaaatgaaagatgtgtaacatgaatatataaaagaactctaacagcacaataataatgagaaaaatacctaatttaaaatccaacaaatgacttgtaacttgtcaaatatttcaataggcactcaccttcatgccaaatagcacattaaaagatgctcaaaatcatgagtcattaaggaaatgcaaattaaaaccaaaatgagatctcagtatgttcccactagaaaggttaaaattaataagactgaccataccaagtgttggtgaggaagtggagcacctggaactctcatatgctatggtgaggaatgtaaaatggtaaatcatgttggaaaatagtttggcagtttcttaaactatcaaacatatgcctactatataacttactgtttagtatttactaaaagaaatgaaatcattcatacaaaagcttgtccacgagtgttcatagcatctttatttgtaataacccccaaagtggaaacaactcaaatgtcaacagatgaatgtttaaacaattgtggtttatccatacaatggaatattactcagcaataaaaaagatgaactattacacatgtaacaacaggaatgaatctcagaataattatgctgagtgaaagaaactagacaaaaaagtacggtttcatttatgcaaaattctagaaatgaaaaggagtctatagtgacaggaagcagatcagtgggtgcctaaaaatggagagtggaggtaagggaggtggattacaaaggaggcagaaacttttaggggagatgaatatttgtgttattctgattgtggcaatgatttcacagttatatacatatgtcaaagcttattaaatagttcactttaagtatgtgcatgttactatatgacaattatacctgaataaagctgtggggaaaaaaaccaatcagcgcttatccatattttactgaaggtgttaagtaagatgctagtaaatgacagaatttcagctgagccaagtctgactcttgaaaactacatttcctctttagtgcagaaaatatttatgagaatgggagcgtagaaaaaatgaaatcacaataaaacaaattagtttctgatttttggacacggtctcattttctaaattatcactgtcagttttttttctgctgcttctagaacatgtttattttgcataatttctctggcttccaaaatctgaagaattgcctctgtttaaactctattttcttctttcgtgtacttgctcttgatttgctgaccttctaaatggggaccagcatctaatgcttaatgcagagtgctggggacatggggaggcaggaggagctggaggctgcgtcatggaaagaccttggcgccccctcaggaaggaaggactggcttggcaggatcccaggctgttttcctggttcagccctcccgaagacattgtgttctctgcagccctggagggcctctttctctcaatttctcagtgaggtacctgttttgtaatcagtcctgtcaggtgaagcagccatgttactactggacaatcatggattatcttttcccttccttcctggatccaggtgtctgaatttataccaccaaaattcttccagattttctatctagtggttcattctcttttgtactttgtagtgccgttgtttattctcatgattgatttttttctgagccaattggaaggaatgtctaacactgactgatcaacccacagtgtttaagaggaaaaatatattttagaatcttgagggagttttatttcagtgtatgtgaattgtattggctatgtagcgtcttcattttcattgtaagaagaattttgctacagtgggaccggctgcttctcatcacaaacaggttgtggctcagatattttcccctttggagagcattttcctggtcatattattatcttgttgtctttcgttgcactcattgctctctgagatcattttgttaatgaatttgcttattatactttcctcctttagattacaaatggcttgagagcagggacccacctctcttattcactgtcctaaccctgggacaatgtctcatatgtagtaaacattaaatatttgttaaatgaaattttatgtgattgggggacaagtaaagtgtaagtactttgggagcatctttccatctttctaaaagaaagaaatgaaaatagttgaggagttactggatgaacagtattcctctgttaaatcaatcaatgacataccaatatgtgcttgaaagactgggcctgggccgggcgcggtggctcacgcctgtaatcccagcactttgggaggccgaggtgggtggatcatgaggtcaggagatcgagaccatcctggctaacaaggtgaaaccccgtctctactaaaaatacaaaaaattagccgggcgcggtggcgggcgcctgtagtcccagctactcgggaggctgaggcaggagaatggcgtgaacccgggaagcggagcttgcagtgagccgagattgcgccactgcggtccgcagtccggcctgggcaacagagcgagactccgtctcaaaaaaaaaaaaaaaaaaaaaaaagaaagactgggcctgactgctatattctttgaatatggtaatggattgaaaaccttgtgtatggaaaattccctgctcttacgtcattttaaaagactatgattttaaaacttgtaatacgttataacgtttttcacttataattttcacgcccaaaatgttaaagtcagggcagaagcaagacatcagcatttaaaaggttgtgcctcagccttggagaggaatgaggttggtgggtggaacgtgaatcattttatcttatgcaactcttagtgaagttttggtatctagtaagtgttaagaatggtgattagtggtgatggtaaaagtgtggtgcatttttatgagaagagtagcatttgcgtagaataatagaggtgcctgggatttttggtagtccttttttatttaataaagcaactggggccgcgtgctatggcttgcgtctgtaatcccagcactttgggaggccaaggcaataggatcccttgggcccaggagtttgagaccagcctaagtaaaatagtgagaccccatctccacaaaaaaataaaattagccaggcatggtagcacatgcctctagtcccagctacttgggaagctgaggtgggaggatcacttgagcctgggaggttgaggctgcagtgagccatgatcatgtcactgtactctagcttaaatgacagagcaaaaccctgtctcaaaaaaaaaaaaaagctgaaaaaacagtcaactagattgtgttccccttttgtgttgacttcttagctccactttattagaatgtgataaaaatgagacctaagtggaaacaatccctgtccattgttttccactcttatcattactgtatccaaaatagtctttctcaattgccaaaccaatagtcatttctttatttaaaactcctcctctgtggttctccactgctcttagataaactcctgagtcttttttttttttttttttttgagacagaatctctctctgttgcccaggctggagtacagtggcacgatctcggctcacttcaacctccgcctcccaggttcaagcgattctcctgcctcagcctctcagtagctgggattacaggcacacaccaccacgcctggctaatttttatatttttggtagagacagggttttgccatgttggccaggctggtctcaaactcctgacttcaggtgatccgcccgccttagccttccaaagtgctgggatgcaggcatgagtcactgcacccagccaaagtccagagtctttaaaatggtataggatgttctccatgatctgtaccctgtgttcctcttgagccttttctcttacatttccccaaattacaatgagcatctttcagttcctcaaaaggaggaacacttcgctttgctaattcttccttgtgcttcaggtctcattatgggcattaattacccagacaactgtccctgatgtgccagtctgggtttggtcctcctcctagtgttccctcagtatcctgagatctcttttgccgctgtctcctccaacctgaaagaacggacgtatgaatggattggcctctaatggaagcgtgtgacactggtcacagggagttcagggtgtagttgtttgaatgattgactaagattcatccgcttggctcttgtagtagtgactctgacagactattacatgtttctatttgaaatgccaagccctaggtgagcatccagccaccaatgagcatgtactaagtaccaggcattgtgctctatcctgtaaagtcaagtggacaggacacacatgacccattctttcgtagggcttgtaattccaagggggagggagattgggataaaaagcaaacaaaagcaactagggaattacagaagtacttacaggcaggtaagcccctggtttggggaggtggggaacatcttcctggaggaaaaacaaagagctgacttttaaggacccagcctagagagccacagcctgcttcagttaaatgactgtgaacagtctttgctcaaaagaagaaaaggaacttctgacctgataatgtttcccagagggacatcgcagatgcccttttgaaaggtaaatgttcctgacccacagaaatgtttccatctttggaaagtttgggagggaactgtttccatgcttgtgaacagatgacctgcaaaagaacttttgactccacaaaggcagaaagtaggaacactatatttgaaccatcaaataccttaagttttgtatagatcataaaataatcatagatgttgaagcaggatgatcatctaattcagaacaacaacaaaaagcctgatagctcttaggcctgcagacagcctgtaggtctattcatttggcacagatgtttttaacattgaaactgaaggcatttggtgctgtggtgctccagtttgccacagacccctccactccctgttatgaaaccaactctcttgactcattacttgcttggacctgggacattttaaattttgtgacactatagctcaagcctttgttttctgaatgtgggaaccaaagttccagccaaatcattactgttgccctaacaggggtgtccaatcttttggcttccctgggccacgttggaagaagaattgttttgggtcacacataaaatacgctaacactaacgatagctgatgagctcaaaaaaaaaatcctcaaaaaaatctcataatgttttaagaaagtttacgaatctgtgttgggctgcattcaaagctgtcctgagctgcatgcagcctatgggctgtgggttgaacaagcttgccctaactcatgagaagtgtaatatacatacatttaatatgtattaatatctatctaatctatatctacaaaaatacagatatacttacttagatttatttagatatgtaataatttattaatttataaaatgcattagtttagatatatatttacttagatttttacttacataaagatttgtgtcctagtatttcagagaaagctagcttactagtaaatatatggggagttaacttttactgcaaattagtattatattaactatccaatttaaaaagaaagcaaactctgccaggctggtatggtggtgtgcacctgtagtcccgtgtactggggaggctgaggcaggaggattgcttgagcctaggagttcaaggctgcagtgagagctatgatcgagctgctgctcctcagcctgggcaacagagtgagactttgtctcaaaaaaagaaacaacaacaacaacaaaaaaacccctctttttatttcgttatacaactcccagcaataggggaacactgtactttaatgggtgtcaggagaactgggttcaagctgtgaccttaggcaagcgtctgcttatctgggtcccatttccccgttatattgtgagggggctgcactaaacggtctccaaagacttttatatctctaaagcctctgcttccatgtgttaggcaatcacataatttcttcccttttggagtaattggtttggtttaaactgtcaaaatgaattatgtgttatcaaagttagtaactcctaagaattaaattggtccaaatctaaattgcttagagttggagaggatttagctcccatctaagtgacttgtatagcatcgctagtgatgttggtattattttcttggtttagaatcagccttaaggcaatacatttcaagccatgcagttgtatttcttgatttatgctaacgcactccttgttctatgggatggttgtaagttatgtccctgttacggcaagtcagagagagactgagaatcccactgttttgctagaagccattctcactagtttggcaattacagcattattgtcccaaagtatctgtagctaccagtctatgtatccacccagggtgatgacaaatactacaaatcactgtaggacagacattttaattagagggaggaatgagcccaagggtattgactatggtagtgtttaagtgctgtgttaaagaattttatgagacaggaaatttttgttgagaatcatggtcctatctggagatatttatcaagattattatgttagtgtgcttctgtagcaccagtaaattagagcagtatctgtcaaagcacataggacttttgtagtagaaagcccacttaataggaagcttaccagcagtgcttttattatgtactgccttcccaaaagttcctttgattgcgtataagttttacccttgcacgcctttgacctcacagggagataaatgcttaaaagttaccaaagatgtttagtttgtgcttgtggtaaaaaattaagaaatttgccagagcataaaaccatggtcaacatgatccctgtcataattgcattaataagtcatataggccagagtgagcatattctatacctcgtcctgtatttccaatttcagacctagcctctgttctccatgcacttagacaaaaaccgcaaagctgcatatttattcgtaagtcacatctgtcccttgtactagcatagctctgtctctccacctctcgtgtcgcaagcccttaaatatgatacactctttccttacaatggactttggtttttgcgtctgtgatgttggagggctgggccccttgagctctgtggtccttccggtgtcagagttttgtggttctggtaatggttccgttggacaatggaaattctgctcccttctgaaatatattcaggagacttctgatactcagatttgttctgggctctgaaattattttgggaagggcacccaaaagtcatacgtgtattagcctaattccataaacagaatacatttatttatttgcaagctgtgggcctcttagatgctttaatatagattactgttgtttaattatggtacagaagagttgagagcagattccatctaaattagtgcttttgaaactgttgtcgagccctagacccttttagagatgatgagagctatggagctgtttctggaaaaatgcacatatgtgcatattgatgatattctgggaacaatgtcatctgattagtagccctcctaaagcctttcctaaaccttaaggacacaggacctcaggttgagaaacctcagttgaaagggttcaaaaataaggcttttattaattcctaacattcagggtgtggttccagtgttttcctttgtatttgaggacattttcacttcaattaattatagaaaatagttacttagtagaaaacaggagctaggagctataaattttagagaaaaagatgttcttaaaaatgtgttctcacttacggcttctggtgaaatatactagatgatgacccattttaggacctatttggttgtgttatttaggtgttttcaaaagcctctatttttttaaagagtttctttgaggtttgcagtagatgaaaacttaaaaaaacaaaactaggacagtttgagtgaccctggcttggtatcttttgttaatataaacttttcccttgtaaaaagaaataggattcatctttttcatacgctttttcttaaaacattcaccctctttttgagctgcagtgggcattatggtgttctgctgtgttagtctaagacaaaatgatgagattggtgaggcctgcctgatcctcttaccctttgagccccagtctcccatggtctgggtccccgtgacccagcagattttttggtcctctctggaattccagttcactcagtcagcatcttacagacaacccgatgttggtggaaactgagctgaatggagactgtccacagagcagccccctagctaaaggtaaagtgagaatccagctctctagacttcaggccaagattctttcccgactccacctcagtgtgtggtggaggcagcagggtagccatccagtcagtcattcataggtgtttattaagtatctaccttgtgcctgagcctgttctaggtgttacaggtagggcagagaacgcaagacccagcatctcggctctccagcactgccgccctagcacagggaggtggataacaagcaggcaaacgcacgatgaagaaaatgacaaatgctgggtaggtaccaagtagagaatcaaagcagggtgacttgattcagtgtgacaaggtggctgctttatctggagtggtcactgtctgcgaaggacaggtaaagcactgtgcagcagacttgctgcacagagcgggtgacaattcagctgaggcctgactgacaagaagcacacagccctgtgaagattagagaaagagcattccaagcagaggcaacaaaggccctaccgtgagaacaagcttggcaggtggaaaaacagtggagggtggcagaaagagagtcggcttggtgtcagaaagctcggggcattgtcccagatctgttgcttcctaggagtgtgaacgatgagcaagtccctccatctctgatgattagttttttcttttggaaaatggtgctaatgtttgctaccttataggcttggtgtgaagattagatgaactacattaaacatgcccagcacaagataggcactggagaaatgctagctttgggtgctttttaaattaattaattaatttatttaatttttttagatatgggctcgccatgttacccaggctggtcttgaactcctgggctcaggttatcttgcttcagcctcccaaaatgctgggattataggcaagagccaccactcctagcctggttgctttttttattttaatctttaacaaaattatttatttatttattttttgtaatcttggcaggcaaagctttggttgcttttaatttcctgaggaaatgaatatttttgacaagggccttctgaaaagaatcgtactggctgaggatagacacccacagggttgcctcttagaaaagagggtggtggtatgaaagtttcttaggggtggggtagggtatagtcttgttggcgccctcaaatgacatcatagaagcatctagttatctctacccccttcagtaacatgttttctaaagagaggatggggaaaggaaacaaagactctgaagtttattccgtatttttcagtttctgaaaagtgtatttgttttctatggactcataaatattaatggaaagtttcaataatttagatggacaggataattgcattgtagtggtataactgatagggccccaacttgtttttatttgttacaaaactatacatttatggctgagaattaataaacatactaacagtaatcataaaggaaataaaacctcagccattgtaaaaaataaaaataaaaaaaaccacaacccccccatctgccaaaactagatataattgattcttgcttaattctgaaagctcatttactttttggattataattttgtgaactaactctggataattttgcctattttgaatagttttagataatgcctattttggcatctccctgaatatttctgaccatcccttcaacatttatttggtctgtttaaagaagacacattaacatttgcctaagtcacatgaattaggatgcagaatctataattatggactaatgatacacaaatacaggctttgaggagtatttattggacaactaccataattatcagtgcatcatagtgtgatggttgggtgtcagccagattggggttcagctattcattctgcctctcattagcagggataatttaacccctgcaagcctgttctgtcatccacaacacagtacctgcctcacagggttacttcagaacacagtgaggacttatgtaaaccatctacacagggcatgacatatactaccgcagaaaaatgattgttgatgtcactttcattaccaccactctaccctcagcacttcaatatgaagtgatgggcccagcccttttctgaagttaactttgaaagcagtaagatatttatttacatagaattcaagagaagggatttttgagtacaacttcctcactggttttgcttttaatgtaggattctggaatgtaaatcagtaggagatttctagttactggtggaagagaagatggcttccttatcccggaatcacagggattgggggtaaattctgtacataggtcctctctggaagttcttgcaaggaatatgggaaaatgaagctggaattattatagttacaatgttggctaaagttggttcatggaaaccttgaaattaagtttgttggtttgcttattcaatattggacagcagagggtctgagttagtgagaaccaacaaaccagaaataaatcaagttgcaatatttagctgcaaaggacagaaagaggcctttgaaaagctgaagtgagtacttttattgctgtaattaagggaaataatggtaaacaggctctttcaattggcattaaaatatattttccttggttagtttgaatatccaatacaagttggtggatgtgaattgttctgtcatgctttcaaggaggaaaactctagttttaaaagtacgtcattagggccaggtgtggtggctcatgcctgtaattccagcactatggggggctgaggtgggcagattgcttgaggtctggagttcgagaccaacctagccagcatggtgaaactctgtctctactaaaaatacaaaaattagctgggcttggtggtatgcacctgtaattccagctacttgggaggctgaggcatgagaattgcttgaacccaggaggcgaggtggaggttgcagtgagtcgagattgtggactccagcctgggttacgaagtgacagtctgtctcaaaaaaaaaaaaaaaaaaaaaaagtacatcgtttgaatatggatttatagatgtattcaaggacaccaacaattttttttttttttttttgagacagggtctcactgtgtcccccaggctggaatgtagtggtgtgaacatgactcactgcagtctcaacctcctgggctcaagtgatcctcctgcctcagtcttctgagtaactgggaccataggcgtgcgccaccaagctcagctaattttttaatgtagagacagggtcttgccatgttgcttaggctgaacatttgatttggcttgcagaaaatatgaagtactttttttcctatgtggactcaattaaacaaaaaattttattttacagagataggatcttactctgttgcccagtctggagtgcagtggtacatacaatcttaactcactgtaaccttgacctcctgggctcaactgatcctcttgcctcagccacctgagtagctgggactacagtcgtgcaccaccgtggttggctaattagaaaaccttttttcttatagaggtagggtctcactatgttgcccaggctgctctctaattcctgacttcgagtgatgccacccttcatggcctcccaaagtgctgggattacaggcatgagccaccatgccccacctggggactcatttgaaggtgatcatttctacttttatttgtttactggacacttgttctgggacctagatctttcacagttgattttaagtgaaaggtttctgaactgtatatatacaatatttcagaacagtaatttcctttgcttcatagtacggcacaacagtgtttgcacttgatgtttagcgtagccttggttttggttgttcagaagcctttgttagctctttggttgtgccaagaatatattgtttttgagtctccttgccgggcctcctcgccttcttgtcatgcacatcctgtacctgggttgtggttgtattgatttgctggggcgctgctgttgcaaatgtctggagtgaatgagaatgtgtttgtgggtgtctgccctcaccttggccactgatctgctttcagccctgaagtactgccatctgcatgaacattagggacccccagcctcccccaccacttagtaaagtaccctgcacatgtttgggattcaggaaatgtttgtagaaaggaaaaattccttatcattccttaccattctctgtcttgagtctgagtcatgattcaaacacttttgctaaaaggttttcgcttgaaaaattcatattcaggtacagatttacttttttttggtgtgtgtgagtttaagagctgcctcaggagtagtttagagagaatgaatataccagtatggtttttattcccttgattacttaaataagtattaaaggtgtgtgaaaagattagctgaatcctaggttcctcaaacaaaatgttaacttttgtttgggtggtaagagatggatttcaaaatgggaaaaagcgagactgaaaccatcatccagcacacactatgtcaggaatgtattaatgacagcctgcgcttgataagaacaggacaccaacagggggcataaacaagatctaggtacaactgtgaccttgaagtgaccttgagtttaagttgccatttaaactcattttccttaaactgtccttttctggcaaaataagtgactcctgaagttgcctcattagaactccaatatgcatttttctctctgaactgtttctgatgggtgttgactccttctgttgtcatttggtcctataggaccaaacttgtatatgtagaattttattttaaaataggaaaaatcatgattctgaaaaattgtgcctgtcaagatattaaatgactgttcccattaatattattgccattaatattttgaagtcaaattacatagtgacagctctctgcctgaatgatacttacgttaaaaggaagaaactgtctgagagaattggaagagatgataatgaggcctccccaccactttcccttttaagcccctcacctatcacctactcctccatcccctagacttaagtaggttcccttacttttcttctgcttgggccattgtttagaaaggtctgagtcttgggatgagctggcctcctgttcaggcttagccctccacctgctctgcctgggtcccctctgtgttctccctgggccaggccttcccttctgtgttttcatcctctcctgtcctcctgacaccttcatttaattgtaactttttttttttttttccgagacggagtctcactctgtcgcccaggctggagcgcagtggcgcaatctcagctcactgcaagctttgcctcccgggttcacgccattctcctgcctcagcctcccgagtagctgggactacaggcgcccaccaccacgcccggctaattttttgtatttttagtagagacggggtttcaccttgttagccaggatggtctcgatctcctgacctcatgatccacctgcctcggcctcccaaagtgctgggattacaggcgtgagccacccaagcccggccttttttttttttttttttttttttataattaaagttaaggttgcagtgagctgagattgcaccactgtactgcactccagcctgggtctcactctgtcatccaggccagagtgcagtggcgcaatctcagctcactgctaccttaactcctaggctcaagccatcctcttaccccagcctcctgagcagctgggattacaggcatgcgccaccatgcccccagctaattttttaatttttcatagagacagaaaggtcctctaggttgcccaggctggtctccaagtgcggggctcaagcgatcctcttgacttggcctcccaaagtgctgggattataggagtgagccactgtgcctggcgaaaccttcattttaaaaacatacccaaatctttctgagcactcagcctttcagtcctctgttggccttgcccactatccttttgaggtggggcacagtgttttcctttcccttctcagcctcttccctgacagctgtctgcagatgcccttccctgccctgttcatttttcttcccggtgcccatccccaggagactgcgctggcgaagcccaggagtgacagtgtagtcaggtcagttcttctttgtcttgttggctgctaccttcttcagattcattgctcccctgtttctgtgtttttccaatgcttactgatgtgtttttaagtttctttttgtatctttcctcatccctcaacctagtaaatattggtgttccccaggtgggagggggcggggtggggggcgggggtgggtgggaggtggtttgtctttaccttcttttctttgtcatggcgcatggtctcgtcaacttttaagtctcaacaatattgcccatatgccaaggacttccaaagctctgtctcttgtcttcccccctgagcccaactattgcttctggaactggggcaggcttaggacaaaccactttatactccgtctcctttaatcctcacagtagactgtgagagaggaggagtgctgtggcacctgcatttctcacccgaggaaactgtggcttagacaggcccgatatcaggtccagggtcccatgtctgatatgcttgctggacagacctgcttggacatcctttaggcatctccaagtcaacatgtccacaattaaatatcccatctttccccttgacctgctcctcctcccattttcccggtcagaactggtcttgccgttgttcagtcacctggccaccattctagacttttctttctcctttacctctttccccacctcagttgattgccaagtcatgccagattggcttggtaaatactttctgactcaatttcttcttttccccacaattaccacactcgtttgtatcatacatatggattattgtgatggccttggaactggtttccatgaatctagttgtattccctcaaatccatcctccataaactgcctggatgagctgtctaaaactcagccctaacctccctcctgccagaagtcgtttaaaggcttcctgtgccctataaagttcaggctcctggggagggttcccaatcggctggccctgccttccccattccatcttccacctctccttgccttccagtttatgagctaagtactaatggacagactaggttttcttgcctctgctcatgtctaattcaccttatttacaataaatgttggaggaggaaggaagatactcctttgtaatttgtacagaaggacttgtataacattagaaaagatagggttgaataagttacatagaaaaaatatgtcactctccatgtaactacaaagacatccataaacaggcctgagcatgccacatgcacatgtcagcacagttcacagcattcactgagcacttgctgtggccagagaccacagtagatgctgggggtgaaaagctcaaggagctctccctgtagtgagggaggcagcagaaacccacagtttcatcatagggtagttgagtttaggaataggaatgggtacgggatagtaggggattgtgagcctgagtattcagggaggacttcttggaggaggtgatgcacaagttctgtcttcagggaaagtcagtagtaaccaggtcgaaggtagtgtaaattccttttctcctttttcctctttgggatttgtatttttcccatggaattttacctgtacaggtcattttacactggactaacaatgcttaagtgctttttaaaagcaaactgtgccagatttatcccattggtaggaactttcttcatgagttcagaggctttgtcttggttcccgttgtattgccagtgcatggcccctggtaggtgctgagtaaatgttggttgaattggatgccttgaggtgaggcatgagaaagggttctcctcctccccctgaaggtggtgaagatagttgtgacagttgagacttgcatggggctgaccttgtgaggtcctaagcctggtgaccagcctctgcagtgtaactgggctgtctcatgggaagggcagagcctttcctacgtggccaactctgtgttctgaacaggagtgccaaactcatttggaggggaagggagcgcccttttaaagcctcaactactaattaaattcaagcagaagatggtgaaggtggagctaactcatttattagcatataatatgatcaacctaactcatataaatgtagattaccttggtttgtcttttcctggctgcagaaaaggcttggagaggtgccttggattgtgagttagtcagtgagcagctgcttaaagatttgaaaaatcctagaatatgtcatctctgtaggctttatcctttaattaattatggatttttatctgcatatatgtgaagctaatgattgacttggttcggacactgaattgtcggcttaaacctgccattccactgggcttcatcactatgttctatgggtgtgaagcctttgttttttcagagacccatttccaccagcgggtttgcactgtaagtgtttccacaggaactctgccctttgccagtgtcactgttgtggctatgcagcagaacccacagggcggaggtgtttcagccctcactgaaaatgcaacagatcttaacatctcttgctgcaaattttccagtgtgttctggtctaccttggtatcttaaaaccaggctcactgactaccacatgagaaatgacagtggggtgtcttaaatgatctgttgaagaccagcagccaaaaagattgcccttagtgtttctctctaccggctaacattagacaatgccatgtagaagctgctgttagggtttgagaactgtgtcgcctcattctcaagatagccaaggaagtgtcatctctggagaaggcagttctgtctctttcagtttctccatggatccgatattgttctgaaagaggtggttttaccaattcgtctcacacagacttcttgcctttacttttatctgactgctgacagggtgggctggaatataatcgctacttaactggacttgactttcaaggcctgattggcgtttccagtatagcagttgcctgagtcatctagttttggaactgataaatcaaaggactggcttggaggctagtgtcctgtctggagaatgggcttaatgtaacttcagttaagaaattaatgaatctgaaatagttataacccaaggaagagattttcctaaagaatgtccctttagagaaataatgaccagttccctcaaaaaaaaaaaaaaaaaaaaaaggaaaaacagacactagactggatagaaaagacttacatgttgaggctgatgatttctcttatggaactataaaaggactggactctaaggaaatgagggtcttcaacttcattggtgatatttccagttgttctggagctgtgatagaaccaggactagagaatgcagggcacgatgatagatttttttttatgtagcacttttaaacataaaaaatatatatctaatgtgccaatgcaagacctggcctttttgtaatcaagtaatattttgagtaataattgattgcacaacatcctgtgacacactgtgaaagagtaaaattggcttaaaaattttaagtacaaagacatttcagaagagttttgtccataactttgttagactgaaatgaggaattacatttggcaccaggaaatggatctggattatttagaacaaatgttttccaggtttgaatcttctatgtggaagtacagcctgacttctttgccttttccctggtccgggatcctgacagtcagttcttcagctctgtgcctccagaatttcatgtttatgctgcacaaggcctgtattttataatggtggctcttttggacgatgacttcctcgatggtgaaacttccagtaatctccctcatcatactgaaatgatatcagtatatcatcagaacaccatggagcttgtcatttgagggacacagcttgcttgtgtgcttgggaaagaagaggtttagcatggtttcaggtcagtgatgagtccaatgatctctgcaagttcccttagctctgagaattctgatgtcatatgcacttctgccgccagagttgctgcttactggatgcgtaagaagcaaggaaaataaatgtaaaatgcctggcgccactgaggaagtagggtgaggagttaagttagacagtgactggcatttcccagccacactagtacagaagtgtcctgtggtacgaacggaggcaggctggggggttccattgtgtgccaggtgtttccatgaaaataaactgttgagtgccaggtatggcagctgcaaacagggatttggggggcaaaatttaatctttttttgtgatttgttgaatgaagtgcctaatgtgtctcagtaacttacttgagaggaaaagagccacaagcaaggtagtggagagtgctggatggttgccttgtgaccagacctgttcttttaaggcctctggagccagctgtgggacgatcaatccagcagctgcaggtacgcctcgggtgacacttgggtctgtagtcagcggggttgcctgtgactgagagtggcagagtggacccttgcactgatgaatcctgaccctgctgatctttgcttgggtgatggctgtttgtgtgctatttctagaagttcctcccgcctgcctatgtgacctgttttcaccagatccagattgctagccccttaaagcttgaagaaccttaaaggtcatctggaacaaaagatttatttatttttagcccggtggccaccctgaaccccccagttgattgattgaggctagtcttgagcgtgccctgcttcacatgctagttttccagtttctactttgggagaatgaccttatcattaggctggccaagagggcttctttctgttcctgtcacagtactaggctgtatactcattcaccctcagttcccttttctggtatatttcttaacaaattatttccctctttccactatttttaggggtaacaagtctaagatatttacatataaatggctctcccttttcaaacccttttctagcaagcactttctgggaggacagtgtcttaccaggatcttctgtcactgtggtccctttgagggtagaaagaatagattgttgtgaagtcttttgtcagcctcttcatggttataaacgtacttagttttccagactatgtaggttttagacttcaagtgaaaagagtatacgttgttatgcagcaatagaaaacaaaacaactaccacaaaattgtattttttctccatccagaggctttaactttcaacatttgtatatggaggcaaggctgacagccacagcagtaatttcatgatggctgaaatagctgtgaactgtgcattaacttgttccttctctcttaaattctgctgcagtgttggagcagggaaggcgagcagaggagtgatgaatagagtagcaagtgggataatatacaataataggagatacacaataaggattaattaggtgtcaggctaagtatttcatgtgcattaactaatttaatcctcagaataccttcaagatattcagattctcttattatcctcctctttgggaggcaactgaggctcagagaggttaagatacttgccccaaataagtggtgaaggctgggcacggtggcccagcactttgggaggccaaggcaggaggattgcttgagcccaggagtttgagaccagcctggacaacatagcaagaccctgtctctttttttttttttaaagttgtggagctagagtttgagcacctgcatggaaccactaagctgcattacacctgcctcaggtggttgatatgaagaaaaataaaaatttttcagatggactctgggtatttgccttttaaggctatatgccttttaattctgatgtaaagtggtagagaaatgattaaaggtttaagagttgatagggccctgggtagcagggacactttacatgtgttgtgtgtgcatctgcagcagatgacagctccccaaatggacatgcctcccttgttcaagaaagcttgtcagggtggcaccaatttttttttagcaatttaatgaatgaggtatcaaatgatcacataatacaaatttgattgatctccttttggatatatctccccttaaacattgtgctggctacactatccatttctataatacctttgattttatcctctttactcctaacagtgaattcctaggtaaagtcacaactgaatttatcagcacaagcatgctgcatcatgttgtacgttctgcaaacagtaacttgagatagtgtgtcatttcccagttcttaaggctgtggcctacaccaatggtcttattttcccttttgattttttcaaaattaactgttattttgccaataagtttaacatttcattgcagcaattattacgtgtctggggttatgcaacacatgggatgtgcagaaataaaaagatagtttccctgccctcaaggagcttgtcttataggggaaacagatacataaacacttctagggcacacagattttcatgtatgtgtgtactatggtgttaatgcagaattctgtaaaggaataaagcttccatgatcaaagcaagcatgggcaaatgcttcacatctttctgcctgtgttttgcgagcccattctgtttaatgtggacttgatttaaagtcgacctgcagtcctggacttcaaccaaacagccattatagtaatgaacatttaaaggagttatttttccaaagcattatagtttttcacatccatcttttcattccctcattagctaatgatgttgatgtcctcacaagcattgtttaggaatggcttaggaattttaccgtatgtttactttggcttgtctgctgccccttgctttgtaatctgttcaccggtgattcagttgtttctttgagtccctttgaaattgcaagttgacgggtggggactggtggggaaagaaatccagaatagatattcctaaaactgtgaagtgaaaattcaggagagactgtcataactctgcttatttaaggtggtttggtttgtgccaagctaaaggagggaatattgattgaattacttttttaaaatgcaattaatttttatttaattgttttccctggagttgtggggttgaggtattgcagtttaaagcagtttggatgtgctgataatttttttctgattatcttcaagtctccatggacagtgtcactgcaggtctattcatgctttcgttcctcctttacctgccttcatctgctttctctgggcattggtacccatacccaggtgtggtcagttggagtaactcctgccttgctgggcttaactgtggtgtttctgggcctaaggcaattggaacatctgtagtttatttcctaatcccaattttgtggaggtttgtgttctagctttgattcaattactcctaagtagtggcccgtattaagtagaggctgtgtgagacaagacacttaatgtaggccccttggagctgctgggtccttttcatcagaatttggctaatgatgcctctctcttttttacacactaaagcctaatataactagtaatgaacctcattaataatttgtattggcagatgtgaggtgtcacacattaaaactgttttacaccatgagcattgacttcattcggtcagtgagggaggatgcaaccacctttgccaaaataggaaggaagagaagacccagagttttcagggaacggaattaaatagcactttaacaagcttggcggaggcagtggggtgaggagaggaagttaataggcctagggaggagagtatctcactggtttctccaagctgattcttctgggtgccaagagagctgtggaaacccacagaggaatgccccggttcctttccttccttctttctggtaagggtttagatctatttatttgatggtcagccttccagttttatcagcaccggtctctttgtacaacttcccaaatgtacaaactccagacagatgagtacagttggtgttttccggggagggtgttgctccctgtggtctgtcacagccagagagcagggggccagagagaggactgattgcccatatgttccacatgagtcgtcagtggtgcacccagttttaaaatgctctgggggtgtgtggccatgaagtggattttgaatgaatagaaggaaaaagctcgtggatgaaaaccatgagccatttgaaccgtgtgtggtgtctggaaaaacaggtggtctggcaaaactgacaaagtttgcttggggaaacagaagctttgcctccacctctgatgcttgggctgggatgaaataagccacttttctgtttagactgtgtttagatggagggaagcttcttcagttctttattgggtgcagtgaatggcagaacttttattacttgcattcttaattttagttagccatgctgagctgggtttacacccaccttggtatgtaatttctgtgacctgttccgcttccttctctcctgtcacagtcaccaaaagccactatgggtagccatttgttaatatcacctttattaggagtcctccaggctcagttaaggtctccctccatctttccacccccactattttatgccttcgtagccactggcactctgccttgcggcacttgcacatatttataatcagtgagtcaccctcctagactgtaagcaccatgagggcaagatctgcagcccaccagcagcctctgcttccagcacagcacttggcacacaggaagcactctcttagtatttgttgtacttgtcagtgtttgttgcctgaatgacacagaagtgttccctgctggagaagggattcgagttaaatggaatcatccagagaatttgataaaatgatgatggctatccgtttatgctcttaaaagtatgcacttgagacctctaagtagatgtttatttgtttatctctttccagggttcatgtgtttatcttgtttccttttgtatgcattttctgctttgcccctcacatagtaattcttggaagcaagtagatcattgtttccatttcagttgagatcactttaggggcatgtcttggacttgatgacagatcttccactatcttatgctccctacctcacatttattgagtacctactatgtaccaatccttaacatttgttattccagtttatcttccatcagtcctgttgaggtagatattgtgccccattttacagatgaggaaatcaaggttctgagagattagataatttctaggaacatacaaccaataaaagggaaaggaagagtctgagttcaaacccagttctttggtgctaggggtacagctgctgtctgtagggcatgccagatgacacctttttgactcttttggtaggaaatggggaggaatgcttgtcaccttagaaatgctgttcgaggttgctcacacctgtaatcccagaactttgggaggccgaggtgggtggattacaaggtcaggagttcgagaccagcctggccaacatggtgaaaccctgtctctactaaaaatacaaaaattagccgggcatggaagtgtacacctgtaatcccagctactcaggaggctgaggcaggataattgcttgaacctgggaggcggaggctgcagtaagctgagatcatgccactgccctccagcctgggcaacagaacgagactccatctcagaaaataaaaaaaaaagaaatgctggtatgtccaagtctgtgttcactcttatgttcatggttgttttacaaaagctgtatttagcaagcactcaatggcaagttatgccagcactgtgcttggcataacttggatatataggtgaatgaggcagccatacagagaaatatgacaagagtatgttttaaatgccccaaagaaggtttatggaaggtgctacaggaatgtggagctgggaaaataaccatcatttatatagcgctttatatgctgtctcttgcttttatatttgcccccattgtattgtctttctctctcacctttcctccacgtctcctcccctctccggaatttcaggatttggatgcatgtgtacatttaagatttgttctaaatacttgaaagcacgcttgcttgttagttacctgtccaaagcctgttgactgctgggccccagaggaacactagcatgtgcccttgccccgcctgtttctttgtatacaaacagtatacaaaacatagagaagagaactgacagatatttagatctatgggcttttatagaaaataagaattacttttcttctgtaaggtcagtgtttacaccttgtctgcttgctccatactcctctagagactaaaacacctcattgcttctcagaatcatttctgaaactgaggctagaaattacaacagagactctcttctcacctcttcaccagcatcccttgcctcttaaagtcactgaaagaatatcccccctcccccatggaggggtcataacacttttttgtctgtctattccaggaagctcgagtgctttacaacgctttacccagcatccctgggggcaggatcggtgcatgtagatgtttactgtgccaaccccttaaaaggccttctcttagcttagaccctcatctaacccagactaataataaaaagtccccaataactttgctgttatagatcttacagtgctcagagattggccctttaatatccatggttggcaaacatttctgtagagggattgtaggttattttgactctccttgtaagtgccagtttgtcttaagtggcctcaatcaaggaaacaagtagttcggctgcttcctctttatggcatccttttgatgaagcaccacttactttactttgcatattagggtcccaggatacatgggtacatgtatttttaatctatcaatcatttcatataacgttaagtagaactgatttaggaaattgcagaagtttcataaaaagatactctactaaaaagctttaagagagctattgattcccaaaaatagttgattgggccatagcatcaggtgtgctgatgcagaaccacatcgttgtgatttatttctgctgtctttgtgaggggatggaggacacaggcttctggaagaacatgtttataagtcttccttctcccagatggcgcttccagctaaggtcctgcagagttgcattctgccacccttcctggagcctgagagatgggcgaggagtgcaggtggtggtgttaggtggtggcatgtcaaggaggcaggcaggaaaaggcagactgatttttggtagcattagtctttcttctgtccttctctgcttttctttattctgaattttaagatttggatgcatgtgtacatttaagatttgttctaaatacacgaaagcacgcctgcttgttagaaggacatatttgagggaactaagtggtgttcggaggcacagtgacgattcgagagattctggaggacgcatgttgggtgttggtggttttccagttggtatcatagtgtcatattctcttcaattgtaggtttagctctttgggacccaaaaagacaagattagtcaggatagtgacatgcacttggcatgctgtggcttctgttgaggaaaaagtgacccaaatttgaacatccaacttcaattcttagtaattggcaatggctccttgcatctctttctgcttgactataaaactataaaatgctgctattaactttgaaggctgccacttacaaggctaggtgaacagacttttatattaacaactcagactaaccctgggaagcatctgtgctccctaacggagaagttgctttcacgtttttcacggtcaacctgggtggccctcaccatcaggagtgtggaatctcaagagtaacagcacaaaggggtggcaacttgaacccctgggttctagtcccaggtcagctgctaactgctgtatgaactcaaggaagtcatccaatgggatcatcttttgacaaaagaatcaggccattaatcaccaaggtcttttccacctctgaattctgtgatctctactcttgtaggtttcctccctaataatttctgtaggtctgctttttgaactatttcccttatttatcctttccttaaaatcaggtttgttctcattcttctggtcccacccacatccacatggctgttaaagaacacagtgaattgatgcagaaagatgtcccagatataggccgggcgtggtggctcatgcctgtgatcccagcactttgggaggccgaggcagatggatcatttgagggcaggggttcaagaccagcctgaccaatatggtgaaaccctgtctctactaaaaatacaaaaaattagctgggcgtggtggtgtgcacttgtagtcccagctactcgggaagctgagacaggagaattgcttgaacctgggaggtggaagttgtagtgagctgagattgacagagcgagactccatctcaaaagaaagaaagaaagaaagagagagagagagagagagagaaaggaaaggaaagaaagaaagaaagaaagaaagaaagaaagaaagaaagaaagaaagaaagaaagatgtcctagatatattgttgagtgaaaaaatatactaacagagaggcatgcctggtatgacctatttctgaaatgagaatgataatagtatcagtataggcctgcatcgttaatttgaagcagtttaagtcagatgtgtttctgaattcaggattttttcagttttacataggacaatgtattaaatacatttactattaaataacacctccagtgggggctggggtggcatctgtaatcaaaaacattaatacttctgtggcaaaacatggatattcacactaagtggggtaaataaagattacacattgccttatgtcagttcaggtaagattttgacaacaaatgttacaaaatttgtttgggttttgaaactttttgaatattgggattgtagataagagatcgtggtggacctgtatagccaaagtggggaaaaatctggaaaatgaagcatcgagcacttagcaatacttttcttgagtggagaagtagggtggaattatgggggactttcatttcccaagttatattctttactagtaagcatgtataattttataatcagaaaaaatgattaaagatacttatgagatataaagatttacataaagtagctggaaacatttaaccaatctgtagctgtttgagacttatttatattaggacaactaagacttgttttctcaatttttcaaacttttgtaatgtgattatatttcatacacacttaaaattttttgtaggtgatagtattgggaaaaacgaaaaggaatatgtgatcgtaattaaaatgtcagtggataaaaataaggcccttggagtaccctgtgggaaatcaggagccacttcctcctggatgctttatgtagcacattatactgacctattaaataatgagaatcaggctgggcatggtggctcatacctgtaaccccagcactttgggaggctgaggtgggaggatcacatgaggccaggagtttgggaccagcatggacaacatagcaagaccccatcgctacaaaaaaaataaaaatataaattagccaggcatggtggcacatgactgtggtcctagctacatgggacactgagacaggaggactgcttgagcccaggagtttatggttacagtgggctatgattgcaccgctacactccagcaggagcaacagagtgagaccctacctctgaaaaaataataataagaagaatcacatggatgaagcaaatgatgataaccaaaatataatgtatgggagatcactttataaagatgtaaggctatacaataatttaacgtgtttttgaagtaacattgcaattcctaaggggaccaaaatgaatggttggtcttaatgggctttgtctgaaaattgactggaacaattgcttccaaacagaagatacttggaatttcatatatggaatatagatgagatggttggcatttgaccatttaattttatcagtcaatataaaatgatctatattattcttaattttcacacttttccatatttctaatcctaatatactcatttgttgccttttcccacttaattgtataattgcagttcccatgttgcttataatagctgcataatatttcagtcactggtttacataatttaccatcttcttattgctgtttctatttgtgtgtgtgtgtgtgtgtgtgtgtgtgtgttacaaataacacttccgtacctatagctgtttctttttcttttcctttttttccccctatatttaggggttgttttcttagggaatatttttttctgaatgcgtgaggaacttaaagtttattctataagcatttattcagcatctactgtgtacagggccctggagatacagagatgaattttagaacctgtgcacaagctgtctccatttcctggactctcttcctccctctcccttcacctgacgaattctccatttaaatcccactttgccaatgaggcctttatgtattccccagagtattttaggcttttctgtactttttcttctcatttagtcacagttatattgtgtacatctcagaataactaagattacttcatttttgccttcctcattagactattaaacagtaaactctgagaacaggttttatgtctgatttattttccttggtaccctcagtacctgggacattatgtctggcatataccaggcacagaaattcaaatgagtacttgcataaatgaattagatgaacaaatatttgaatatgattcttgccttgagaaatttagattagaactgaaaaatggattcaatggataatttcgatgatgtgtaagtgctttatagaaaatagaaaataaaccttttcctagctattatcttttcctcctttacagtgaatcccttggaagaggattcaattccagcaagtcatttaatgtcttacttttgcccatactctgcagcagaaatgggcttgtcttattttctgctaaaactgttgcttttctatgcaaatcctactttatttctcattgcactgaacaccattatcattcacctttttcacttctttttgacatgttggttatctttgttttttttttcttattattaaaaatcctgtttcttcagcatcccctttttcctggtcttatctgatagctgtacctattctgctgtttatgaccttttaaaaactgttagctccttgagggaagggatagtgtgatcttttggtaggagactttaaaagatccactttcttatattttagtgtatcccttgggtcaaatggaggatttttttttaaaggatgatcatcaaataaatattttaagtaatttgaccaaaatttatcttcttacctttttactaaaaatatacactaaataattttaagggaagattttatagtctcatattcaacatggaaatttcttgattagtattgccctgactttattggttgcttcacgggtggcttctgaattcatttcttggaatgttactattcagggccaactttgttagtattgctacgttgtgatttaattttttgccacttacacattctagccagtctggaagttctccaccaaaacacctgtatagttcagtctgaatttagaagtgtcacttgcaagagaggcagcaacgtcaggcccgtgagactcaagagaagtctctttccatgatagatcttcttatacttggtagaaactggcaagtgactcaccaggggtggaagcctggaaaacagcctgccgaggagggtagtctttctggtaacacatcgccacccctttgaagcatccagagaaccggaagagcaggaactgcctgtcagactgactgagcgcttggcattctttcatggaaagatgacaactcatccagggtgaaagaggaagtggaggggggtggcagggaacaggagggtgaccttacatttccattgttttgcaggctgcctggtcgagtgcagtgggttgtttgggggttgggaggaattggaatcatgtacttctattgttgctgtccaaagtggatgtcctgtgctgtgttgccaaggaggggagcttgtacccattttatccttgtgctccttcgtaatccagatggtttgtgatctgatatttctttcgtgcttagccctggactctatcggttagaatcctagtatcattttaagaactgggattctcctatgccaaatttctgtgaaatctgagagccaacagaccgacatatttttccgggctatctctggctttgacaatggcatattttgagtgtcagttgatttttgtctcagtttattggcttaagtagtaagagtcaagggattgaactgcagcagtagtgttattttgataatttattaagtgttgtcttgggagatcttggggggaaaaagagtttagtttagttctttcttataggaaattttgttttgttttgtttttgagatggagtctccttctgtcacccaggctggagtgtggtggcatgatctcagctcactgcaacctctgcctcccaggttcaaacgattctcctgcctcagcctcccaagtaggtgggatgacaggcacctaccaccacgcctggctaatttttgtatttttagttgagacagggtttcgccatgttggccaggcttgtctcgaactcctgacttcaggtgatctgcccgcctcagcctcccaaagtgctgggattataggcatgagccaccacacctggccttatttagttctttcttactatggctagaaccctcccaagagtaaaataaagacttcagtggacaaccagtggtgagttcactttctagagaatggcaagtcatcggaacactggtcagtactcccaattctatggcatatctgcacatctgccatctttggtcagcaaccctccaggactgccttcttcacacctgtgcgtgaacttccaagctatactgggcaggttggtgctgcccgtttctcccatgctatttaacgattactccatgcagttactgttcttcttaaggcctctccacccgcctcactcttttaacatatgactttgtatctgactttactaagcaacttgaaacttcttagaatgagctcctccatttcctgtcctgatgcctgcaaacttatgtgtagtcacagttatcttcatctggttttctccaggggtatcccatctgctcctgcatcctcctaggccttgctctgttagtcattgtccctccctctctttctaattttcagccacgtttatttactgtctgtttctccctccaatgtgttactgtctctttctccttggctgtcaaatgttctctgcgtttcccatttttgtgcttctcgtacctactaatgacttacctatttgtcaactccagtggacacgctatagtccttatctttctggagcttcttcttgtatttaacccaacatatccactctcttctctagaagagtttttagcttctgcaaccgtccatgcttctgttctcttgctgcctctatgtcttgtatctccttggtgggcttctcttcctttgtccacctgttactgttggagtttagttctgggagtgttgcttttctctcctcatatatactctggccttgggacttcatctgctctctaggttttcactctctgtgtgccagtgattcccatgtctctgccttgcactgcctggtgaccagattctgctggttgtcatgtgagtatctgaaagcctccttaaattttccaggagctgaatgcatgaccatttctcctaaacctccccttcttttctgaatttagagaccatattatatatggtggttaagattagggctctggaatcagatttggatttgaattggggctctgatacttcctggatgtttgagcttgaacaagtcacttaattccctgaccctcagtgtctttctttttaaaatggggataaaaatactatccatctcagaaattcttatgaggtagattgtaatgcatttgtacagtgcctggctcagaataagactggaataaatgttagctgctgctgttctctttcagtttccctcatccacggagacatccaagccagaaacctgggagtcatctctaatgccattttcctttagctccttaatgcctgttttctttagcttccatacatagccagttacccagtgtggctgatttctaatcactgtttacttcttccttctggacatttctgagttttcctttctcttgattcccattaccactacctgtgtgaggcctttatccttactttccaagatgaagccacagcctcctgcctcctttatgttcctgtgatcctccctccagtgtgttaccaggctgcctctctgtgtctaacagggtttccaccctggttgaagccctcttgtgatgctccattatatgcaaatcaaaggccaatctccttagcatggtattcctgggtgtcctcctggcccttggtggcattctagcctcccttttaccacttcctgattccggcttcatccttgagcaacacagtcttgctgtgttccctgtgcaggccctgctctttaggctctttcccacctttgttagcgacactgcttggaatgctcccttccctgcttttgacttagtaactcctcatcctgaggactcagctcagctgtcacctcctccaggaagccttctctgacccttccaggataagttaggtaatcttccatagagtcctgtcattctctgtgcccatgatgcacttaccacgttggatcataatctatttatgtgtctttcctcccagcctcagtcctgaagggcagaaaccatgtgtcattccacctcatatttttgtgcctagctggatgcttgacatgtagtaagtgctcatgaaatgtttgttcattgaataactgaattcaagaaccagtagacctcaggatgaccctggtttcctgtttctgtggaccacaatgctctggggcagtgctgcgtatcagaggttcaagccatggctggagcagccacccctgaagtagacaccctaatatccttcccactgagttcctagttctacatgctggagtgaggctgtcaactctgaagtgtcagagtgtgtctgaaaatgattgctgtgaaaaataaaatatttcacattgcaggcctcatttttaagttatttttcccagagaacattttcatattttagaacttatggtaatgttaacactttctatttgcataagcacttccctgttgggagatactgcaggtgtaagtttttctgaggagtgtcataccaccatggaactattttccatcgatctggagatagggaacttcttgtatactctgagagagaacttctttgagatgtaaactagactgacctactttagaggctgcctgtatcctaattttctgttttaaaagagtgatggctgaacactgaaaagctcgggacattttagaactgtgctgcccaatatggtggccactagccatatgtggctatttaagtttaaattgaattaaaataaaatgaagtggaaaaaattaagttcatcaattatattagccacatgtaactgatgactagtggctacctaccatatatagaacatttctattattgcacattattctactggacaatgctgttttaggatgtagaagtcctgatggataatatcaaagccaccttaccacagacagagttttacagagctgtgaagtaattcttactgggaacaccagatacttacttaccattttatatagcgtatgtggcattctctcatcttatcattagagcatgcctgtatctttagcgacaatagcattcaaacaccaaatgttatattgtctgtctggaaatgttttcttatacaactcaaaggggaagagaggaatatgtcgtgagtaaatggaattatttttctctgcaccacatcattataaaaactcgaagaggttgggtgcagtggctcacgcccatgatcccagcactttgggaggccaaggcaggtggatcacttgaggtcaggagatcaagaccagcctggccaacatggtgaaatgctgtctctactaaaaatataaaaattagacgggcatggtggtgggcgcctgtaatcccagctactcgggaggctgagccatgagaatcatttgaacatgggaggcggaggttgcagggagccgaagtcgcgccactgcactccagcctgggtgtcagagtgagactccatctcaaaaaaaaagaaaaaagaaaaaagaaaaactcgaagaggctaaaacgtatcctggaactaaatatttacatttcttaaagccatgtgtgttttctttggatgaaaggataacaaatgatttgtatcgttggataatataaaaacacttcaaaaagttaaaattgaaagaaaggcaggatcttctacttttctttattttcctccccagttacccaacccacttggcttccaggagcctgagaagttgaagaagtaaacagaggtttagttcagctgttaaccatgctaggaagttctagctatctggtaataccatggaactcaccagaatctttcatcatggaccagctgctttttacacttggataccagtaccctagatggtgggagagactggaaggatcgttcaggtcaggggtgatggacttctgcagtccctctcacatacactgttcaagttacctacagtagctacgcacggaaagtagggtgtgagtcattccatgattgacaaccccagtggaccacaggtgactcccacctgggtggcttcgggaactcagttcagaggctgcagcaggtgggatattttttggattatggagagctgtttgatttcacatcagtgggttcttccctcaaccttgttcagatcagtgcctgagtaagttctaatatattaaccttttctgagagaagagatgtgaggatgagggtggagggtgtgaatcttgttttttcaccatcctgttactcttctgcatgcggtgtccccttactgaggaacagaatagaggagctgtaagttggggtatagtgtggcaaggtttgtgagagacttaagaacaaagggtgtttatcataggtaattatcacagtgttgttagagtgtaggcagagcagctttctaaccaacattacaagtttattttgctagtgaaaccttttatttaccaatgaagcattagaatttcagagagttaattgtttgtgaactttgttcatggtctttctgaaactttcaactctctgtttagttacaataaggctcattttatagcctttattgtcctcttttgagaagaggcagtataggtagataggaacatgggcttgggatcagatagactgggaatagaaatccatgcctgacgcttggacaaattgtttaaacttctgaatgttaatttcttaaccagtaaaatgggaataataatgcttaccttacaggcaaggggacaatttctttgtgtggaataaaaaaaggaaggtaagctgactcattttcagaaagatctttaaaaattaataaacatgccatattccttaatcttatttatgattacatttggtttatttaagttttaccatgcatatctacttagtgttatcaaactataaggaggaagggctcttggtaaaatcagtgagataatctcagagtctgtgctcttaggaaattaataaaaaaattaaatctgataaaaaagatctgttttaatagcaaattcctttttaagactaattgctgtattatctaaaaggaaacaagctgagtgcagtggcccatgcctgtaatccaaacacttcgggaggctgaagcgggaggattgcttgagctcaggagtctgagaccaccctggtcatcatagcgatatttcatctctatgtttttatgttaaaaaaatagctaagtgtggtgctatgtacctgtagtcccagctacttgggaggcagaagagggaggatagctttgagcccaggaattcgaggttacagtgagccaagattacatcactgcattccagactgggcgacagagtggcatcttgtcttaaaaaaaaaaaaaaaaaaaggaaacaaggggccaagggaaatggggagactaggaaattcaaaggattatttattggcaaacagcaaaacccttgattatttgaatgttttgctattttgagtaatgttatttactgattacagtgcagtctgagtaataacaaatccatcatccagagagtttttgaggctagaccactcagttttgactgttcacatacattattacatatttgtaaaagttgagtttcatgtgactgacacagaagaggtggagtaatcaaatgttcctctctaggatactatgcagtgatcataaggaaaggaaatgaaggttcccttttccctaatgcctatattgctcaggccagcactcctgaagatgcttgttctgttgaagctccataatgtgtcgatgaccctctttgcatctgaggctgggttaatccccagaggtacaaagacaagtcagggatggcatctgtcttggagatgaggttatcctgaaggggatgtggacattggcacaggggatgccagtatcaaatgattggtgttgaacagggagctgggagatcatagaaaacagcctcttccctcatgtgagaagaagggaggttagggcaagacttcctggagaagtcgcctagacggagtcttgaacaatgggtaggacttagatgatgaacgggtgagagagaaggaggaaggcattgtaggctaagggaacagcatgagtgtcagtgcattaaacagtctgtgtatgcttgcaagggcaagcctttccatgtcaatagcatataaagcataagggtgggaatcaaggactataaaggggtagttgggggcccagccatgaaaagccaagtatactctatgaaggcttagagcatatgcttctagctgatggggaactgttgaaaaattttaagcaggggtgtaaatggccagattttcctggtttgctatggcagctcattgagtcatagatttgtggctggatagcaggaaccgatcatgataggctcaatgtgagatgatgaatatgtgtaagaaagcagtgaaagtcagggctggagaggagaagatgggtttgagaagtacacaagatttggagttgatacaattttgatcaactggctacggggagtggatgagatggaagagaccagaatgacacttgaagttctggtggccattttgaacctggggaatataggaggaagaatgggtatgtaggggccaaggtaatatactgattttaaaaagtgtccatctggcaattgaatgtgagtctgacgctctgggaagatggcgtctggagatgggaatctgggagccatcacctagaggtggtagttagagccatgtgagtaggttggtgcccaaagagaactctgaggatgaagaaggcaacgggcaggggatggagtccaagggaacaccagacagaagtggagggatggagggaagaggaaatttctagaaaagactcagaagaatgggtctggaggtagaatctgtggtgtcacagaagctggggcaggggacagttttatttttaataaaaattttttacatatatatgtaaaaatatgtaaatatataaaattttatatatatacgtgtgcatgtgtgtgtatatgtgtgtgtgtatatatatatttgtgtgtatatatatatttgtatatatataatatatatatatatatttgtgtgtatatatataaataaattgcccaggctggttttgaactcctggcctcaggcgatcctcctgccttggcctcccaaagtgctgggattataggtgtgaactaccatgcctggcctggagacacttttaggagatttatagctgagatagctaacccaagtcacccttagtatttgatgaagtagcaggcaagatagaatgggattgggaacttgaagagaatggagactgtttggaatatcccagtcactgaaggaaatgggagatgagatgattgaggaaaagtaaaagaagtgtgaagagatgctgaggctcagctgagattagaaactgaatttacagtggcccaagtgtgtgtggctccccagcctgtgtgtcagaggcagcagatactgagactggtccagggtggatttttaccagtcagatgtggcagaaagaaggtgtgaggacgtgtgtatgtgtttgcagggggtgcttttaagaataggaatggccaggtgtggtggttcacacctgtaatcctagcactttgggaggctgtggctggtgaattgctggagcctcaggagttcgagagaccagcctgggcaacatggtgaaaccccatctctaccaaaaagtacaaaaacttagccaggtatggtggtgtgtgcctgtagtcccaggtactagggaggctgaagtgggaggatcacctgagcccagggaggtccaggctgcagtgagccatgattgcaccattgcgctccagctcgggcaacagggtgagaccctgtctcaaaaaacaattaaaaataaaaataaggaacaggaaggagtgtggctaggagggacctaagaggatagaaggaagcagttcgtagacctggatggcttgtatggttaaaaagcagatgtaatagaagggcaggaggcggtagggtgatgtagtctccaaggtagagcagtttgagggagtggccatgggaatggctgagagaagtggcctggaagtgaaggccagtgaggtagaggatagcccacagggaaacctttgtagaaatgggacttttattccacttgtaagattcacactgaattatagcattggatgtgtagaataagaaacttcattttggtgtttgagaacacagtagataggtgtgtgtcctaaatgttttgagccatatgcaggggcaggtataggatagtgtatctgaagatgctgttgggattctattgtcatttatttatgatgtggtaaaaagtctgactttgtgtctctttaaaggaaagttttgacaatgaatataacttataataatacttttatgtatttacacttttcaaagtcatttcataatgtttgctattcagtttagtttagtggctctgggtaatctatttaaagtccattttcagtttgttagtttctgtagactacaagtgtagagggaaaatgtatttcacgtatttcactgggtaagagaatggattattagcaagaacttaaatctaaaatttaagcagtttctagtgctgagggacacgatagatttatgctgaattgtatatttctgtatttgatttttttttaaactgcaggcatctgtgtcttccaaggtgagaaaaaacgttaaaacatatcatgtattttctggcctcctactatgtaccaggtggtatgaggacataaagaggcagaagatacgattcttgcccctagatagcttcacatttagctgaagaaacaagacataaacacaggaaaagttagctaatcatgcagggtttaaatagcaaggcatgacatgactaatggggagatgcattgtttaggcagtaattcctacaggagttcagaagaaagagattattttaggctgtgacagtaaaggaagggtgtaaagacttaaaaggagaaaagagaaaaggcttatgtagaggaactgaaacttgggaatgactgaagccttgttctaccacttatgccttaccttgtgcctcaatttcccaatctgtataacataatgatgatgtgttacctcccagactgtcagaagatgagacagtgattgcagaaaagctctttgcaaataatgcctggtccctccatactgtgtagacagtaaaaatcgtacactttttgaaagtctttgaaaatttaggttactagggtataatttctgtcgttcaagtttgccaagtaggattttttaaattagcatattgccagaagtttgactttcttctttttcccagtaaggagagatttgtaagactctgaaaaaattttaagcaagcaattagacacattattactttgggaaaattgcttttatggccaggcatccttttctgtttctttatttccttgagcaaagataatgattgataaggaagtaaaactagaaagaagccagatccaaacttagaaggaaaatattttgtcacgtatggaagttcagtggaggttgcaggttggctgatgaccactttgggtgaacccagcctgacactcagcattttggagatgatagtctcagagttcacaggtttcctgtgtataaggaaatggatgtcggtcatttcaactgtactgttaattgctttgggaaaatgagtggtattcattaggcaaggaagcttgtagccagccctgtaattaatgtgaaaccttttcatacagccagtggctcttcagcatctctgtactttatgtttatgtgtatacttaggcttgcttcagtggccagaggcttcaaggcattcagggctctgggggctcttattataatggtaatgaaaattggaccctagaactttggacctccccagccttaaatccactgagaggagctctctgtctagggatgtggctccttctgctggcttcttcccttctctaagatagcagtgagatgcactaaacatgagatttctaaaacaaatacttcgatgagtaggaaagtctgttttcctgaatatatccactttcctacatattccattgcttgtggaagcaatgacccaagggttatatgcaggactttttcttactttggcagactggagacccagagctcagagaaggcagaaagtgtgttaaagaacaataggaaaagtggtgagagacaggcagatgaaggaagcatgaactaccatcacagagaaagggtagagtcagcaggtaattctcaaagggatgtgcatctgcccctaacccaatctaaatgcctgactcaatgtcctcagaggacacgaaccctggaaaacaagtatgagatgatactactcaggtattgcgtgtgtgtgtgtgtatgtgtgtgtgtgtgtgtgtgtgtgtcagaggtcagccctgatgtaattgccaccgaggtcaccgtggatgaggtcattgtgggtgaggttacagtgcaagagctgtcttttggtgctgttctggtcttgtgatttccctattttcagcacccagtaggtaggtgctcaataaatgtttgttggaggaatgggtgctggggccagccccctaactctggcctctgttggacgttttgtgacctggaatcattctagaaggaaagagactgcccagagtggatttgtgtcctgcttgtgactttcttggtaacaactacaatgaatatgctccccaggctcttaatctggagaactcctttttttttttttttttttaaacagtctcgctctttcacccaggctggagtgcagtggcgcaatctcggctcactgcaagctccgcctcccaggttcacgccattctcctgcctcagccttccaagtagctgggactacaggagcccaccaccacgcccggctaattttttgtatttttagtagagacggggtttcaccttgctaaccaggatggtctcgacctcctgacctcgtgatccgcctgccttagcctcccaaagtgctgggattacaggcgtgagccaccgcgcccagcctggagagctcttgatctgtaggtgaatcttagtatgagggccttggaggagcttccaagtgtctgagagcctcatgaaatgggatgcaaagttaggaatttctaaggagaaagtcagaggagcctctgattcccagccggctgctaagcccttccttaaccaaggttcaccctcccatgttgcctgctgggctgccttacagcagcctctagttccaacatctgctgtagatttctgacactcacagtctacccttcacctcttctctggctattaccagtacttcctcactatccctagtcatgggaaaaaaaaaaaagagaaccgtgtccccaagatgatcttgcctttgagccttgtgtgtttcctgacagggaaaaggccctgtactgccatgtcctcccctctggctgcttcatgccgggtcttctgcctaatacctgacacaaggagactcctccagactgaactgcgaggaaaggctttacaggcagaacaggctctgcagagttgctgctcagtaggccaggggtcagcagacttcatgctgtgtgccttaggccacatgagtgatcctcctgtagatatttcccatcagtgaaaacagagctggcactgatcacctcctctcttacagactgcggagctaaagtgggctgctggttggaatgtgctgtgaaagttggaatgtttttgcaaattttattttattttttgaatttgaagtagaaagctgtttgattataaatggtgacttttcccttctaaaatcatttaaaatttttgtaccctttgaaaatgacatttaattataggcactcaaagtgcagttgacaattattgttatttttggggaattgtttaaaggatgttcattcatgcatgcatttttttcattatttacttattcagaaagatgtggaagtctaatatgtgccaggcactgggaaacagtgatcctgctgctcatatttccattctacacccaagctgtgtacttggtcatgtggcttggatctttgtaaatctcctttaccctctttgccctgaagaacgttattagaacttggtatgcaaaatacaccattggctgattgttggaatacttttgagcaggtttgtaaccactttcagtggatgctgtgtgaagacccactaaagcagtggttctcaaggtgtagcttgcatcagtatcaccgggagggtttgttaaaacagcttgctggacccccatgcccagattctgtttcagtccctgactgcatttctaacaagttcccaggggatacttatgctgctggtcttggggatcacactttgagaacctctgcattagagacatttctttagacctaagggctttgaagtctcttctcctgagaaattggtgtggtttcattagggtttatcgtgaaccttgtttgtgaacctggttttctttttgtttgctttgcttcgcgtcagaaattcagattcaaatttgtagctcaactttaagaaaattttaacagttacatcttaacttttcccagccttgatttcctatttcattttccccattctgattttacatgtttacacaatataagttcctgtatactgactgttttgtggaatgtagtatatattgagaaatatgattgcagtcagtgttcttttcttggacatttgtctttcgaatcaactctaaagtattacatgttttgactgtttaatgcattagttatgggagtagattccccagaagaattatattattaatagcaactaaccaaaggattggaaagaaaaaattgggaagaaagtgacagaaagttcttggtaaaaaacagaactttatttttaaactattgatgcatagatagtatctacaagcagtaatacatatgcatatatctgtatgtttatatgtgtatatatatgtgtgtatgtatggttttttatttttatttttatttctttttgagacagagtcttgctctgtcacccaggttggagtgcagtggcgtgatctccgcctcccaggttcaagcgattctcctgtctcagcctcccaagtaattgggattacaggcgcccatcaccacacctggctaatttttgtatttttagtagagacaaggtttcaccatgttgctcaggctgcctcgaactcctgacctcaagtgatccgcctgcctcggcctcccaaagcgttgggattacaggcgtgagccaccgcacccggccatgtgtgttcttttaaaaactgagaaccctaatacataaacaatatactttctttggttgttggagaaaaagcgaagggatgaggtggtgatgagaacagtgaaggcaaactacagtggttgcccaactttactggagtcacctggagtttgttaagtgcgatgccagtttgctaggcctgggggtggggcctgcatttgtaataagtgtatcaggaaattctgacccacgagaggtgggagaggtttagcactgggtagaaaaatgaaaggcccaatctgtattaaacctgctccaaatctttgtatccatttttggatgaggagttcctgttcagattttctgcaacttttcctgaaatcagagtgtaatgggcacaatatcattcatattagtcagtcttagctccagaaagtactcattatgttagatgttcattggaagtagtttgtagctgatttttttctctttcttcgctctctgtatttctgtcttctacttctgtttttagttgaagagaagatactttaccaacagcttgtctgaaaacaatttgcagataggagtactcatagaaaactcttggggttctcactgtgggtcttctccaggggtgtggataacaccaaacactgcagtatggaaactagcgcaaaatgggatgtgctgtgacactggccagctggagacagttgggacaggggatgacttaacgttaacatgggaatgttacatacacagtctagaaaggccagatattcttttgcactgctgcctctggctctcttttcatctatttagtgaataaccaaatttatcacctgtagtaatcagttactaatttagaatttaatttctttaagagttacctggatttagggctcagtgaaggcagtttttatttaaaagcattttcttgaataaacattttagaacagttttagtattacagagaaactgtgaagatagtgcagagaattcccatatacccaacagtcagttttctgtattattaatgtcttaggttagtatgctacattgtcacagctaatgaatcaataatgatacattattactaattaaacttcatagtttatcagatttccttagattttacctactgttccatttctgtgttaggatcccattcaagataccacatcatgtttatatgtctgcttaggttcttctagtctgtgacagtttctcagactttccttggttttggtgagcttgacagcttgacaagtcctcgtcaggtattttatagaatgtccttcaaattgggtttgtctaatgtttttcctgtggttcaagggttttgggaggaagaccacacaggcaggcatagtaccacatttcattccatcatgtcatatcaattgcataattagcttttacatgcatacatgctatcaaaacgacctatcactgttgatgtgaaccttgattgcatggctaaaattatgtttgtcagatttctcacataaagttcctcttccccttctttccatactgtactcttgggaaggaagtcactgtacatagctcacactttagttgtggagaattatgctctacctccctgagggaggtagtatttagagaaattattgggaattcctctgcttgggagatttgtctattctcccccatttatttattctatcatttatttgtatcagtatggactcatgcatattttatattttaggttataatctaatatcacatgattgtgctcctcaaattgtttcagatttggtttttgggagctgtttcaataggctcctgtgtccctttgtgacatgccacccatcctggtgggtttttgttgttgcatgtgtgctttttaaaatcacatccttattctttctggcactaaaagatgcccctggctcactttgtatattctttgccccatccctagaatcagttatttctccagggaccctggttccttttgttggagaatggttttagaaaccaagttctgggcactgcgtgtccttgttgctactgaggtgtcattgcttttaggtctgttcagctgacggaacagagaaataggtgtatactcacccttgtatatacacatatctgtaaatatttctatatgtatccatctgtatctatattaagttgaacatgagttcatgctaatgttttcaactccgatacagtgttacagacctttttttactagcctttctcccttgtctgcaaactcctgctctaacagtgaaaaactggttcctaccacccaccatccatttacttacatgtatagtggtttcagaattgttaacttgtatcccttatgagaaagaactttattggctagagttcagtggttatgtgaaattcgttatgtaaaattcattttgcccttagatctagagtccatactcatttctgaaggtccttaagccagcatcttttccctcacttctttcagtgaggttatttcatgcattttgatacagttgattctcatgtcatagtctgcatttcatattccaccccaggatctcttgataccctaactttttaaattgcatatattcaagttctgtgtgctataaagttctatgggttttaacaaatgcttagtgttctctgtctaccattatagtatcatagagaacaatttcactgccctaaaaaaaattctctgataggcctcaactcatcatttggcttaacagtcctgctgagagagtcctgccagttgcatctgagagacagtcctgccagttgcacctgctgagagagtccttcagttgcatctgaaaccagtctggtttttaattttacctgatgttcagaaaatgctctcaggctgtcaccgggctgaagaactagttgggttgtagctgtggctgtgaatctggttcccaagaactggctgtattagtctgttctcacactgctataaagaactacttgagactgggtaatctatgaagaaagaggtttaatggactcacagttccacaggctgtacagaagcatgactgggaggcctcaggaaacttataatcatggtggaaggcaaaggggaagcaagcagcatgacggagcagggtagaaagagaaagggagagtaaaggggaaagtgccacacactttcaaccaaccagatgtcatgagaactcactatcatgagaacagcaagggggaagtctgcttccatgattcaataacttcccagcagcccctcccctgacaggtggagttacaatttgagatgagtggggacacagagccagaccatatcattccgcccctggcccctcccaaatctcatgtccttctcaaccaattatgcccttcccaacagtcccccaaagtcttcgtttttgtttttgtttttgagacagagcatcagtctgtcacccaggctggagtgcagtggtgtgatcttggctcactgaaacctctgcctcgcaggttcaagcaattcttctgcctcagcctcctgagtagttgggactacaggcatgcgccaccatgcccagctaatttttttgtatttttagtagagatgggattttgccatgttggccaggctggtcgcaaactcctgacctcaagtgatctgcctgccttggcctcccaaagtgctgggattacaggcatgagccaccatgcttggcctgtccaccaaagtatgaactcattgcagcattaatgagtccgcaatccaaagtctcatctgagacaaaggcaagtcccttccacctatgagcctgtaaaatcaaaaacaagttagttacttctaagatgcaatgggggtacaggcattgggtaaatgctcccactgcaaaagggagaaattggccaaaacaatggggctacaggccccatgcaagtccaaaacccagcagggtagtcattaaatcttaaagctccaaagtaatctcctttgactccatgtctcacatccagggcacaccgatgcaaggggtgggctccgaatgtcttgggcagttctactctgtgcctatgcagggtacagcccctgcgactgctttcgtggcgttgagtgcctgtggcttttccaggtgcaagatgcaagctgtcagtggatctaccattctggggtctggaggacaatgtctgtcttcccacagctccactaggtagtgccccaatggggactctgtgtgggggtttcagccccacatttcccctttgcagtgccctcatagaggttcaccatgagggctccatccctgcagcagacttctgcctggacgtccagatgtttccatacctcttctgaaatctaggtggaggctcctaaacctcaactcttgccttctgtacacccacaggcccaacactatatagaagttgccaaggcttgaggcttgcaccctctgaagccacagcccgagctgtacattggccccttttagccatggttgaagctggagtggctgggacacaggatgtcaggtctcaaggctgtacagagcagtgagggccctaggcttggcccccagaacaatttttctcttctaggcctcccagtctgtgatgagaaggggtactgtgaagatcttggaaatgccctggagatcttcccattatcttgcctattaacatttggctccttgttgctgatgcaaattcctgcagctggcttgaatttctccccagaaaatgggtttttcttttctactgcatggttgtactgcaaattttccaaacttgtatgctgtgcttcccttttaaatgtaagttccaatttcacaccatccctttcttcactcatatgagtgtacactttgagaaacagccaggccacatcttgaatgctttgctggtgaggaatttctactgccagttaccctaaattatctctctcaagtttagagttccacagatctctagggcagggccaaatgccaccagtctctttgctaaaacataggaagagtgacctttactccagtccagtaagttcctcagtctccatctgagaccacctcagcttggacttcattgtccatatcgctatcagcattttggtctcaaccattgaacaaatactaggaagttacaagctttcccatatctccctgtcttctgagccctccaaactgttccaacctctacctgttacccatttccaaagttgctaccatacttttcagatatctttatagcagtaccccactcttggtaccaattttctgtattagtctattctcacactgttatacagaactacgtgagactgggtaattcatgaagaaaataggtttaattgactcagatttctgcaggctgtacaacagcatggctaggaggtgagggggaagcaagcacgtcttatcatggcagagcagagagagagagagtgaagggggaagtgccacacactttcaaacaaccagatctcgtgagaactcactgactatcatgagaacagcaaaggggaagtctgcctccatgattcagtcacctcccagcaggccccttccccaacatgactggattacaattcgagatgagatttaggtgtgaacacagagccaaaccataccacgggcaaaaattgattttataagaagtgagagaatgagacaggtgaatattttgaaggcttgtgtggcaaatattcattagccaggtttattaaaaactcagctacttgggaggctgaggcaggagaatcacttgaacccgggaggtagaggttgcagtgagccaagatcatgccactgcactccagcctgggcaacaagagtgaaattctgtctcaaaaaaaaaaaaaaaaagctcataaatacattaagattttattcacagtgtggtgggtgtggtactcaaggcctttaatgggattttaataatccaaacctaattcagtctccagatgactgtgcaatataatggagataatgctgctttacttttccttactcagaaggtggttgtgaaggtctgctcagggtagccagcgtgcctttcccaacacccttctttctgttttgctggttctgctttctctcattctctaaacatggctttggtccttgattctttgctctttgaactgtacaattgttccttgagggtcagtcagctgtcttgtggttcagttattcctgtgtggatgactctacctgcagcccagccctttattttaagtttcaggtcccatttatctttttgtcacacatttctaatctccctacaaatcagtatttttaaaaaccagagtcatcccaaaccaactgaccctctagattgccttacttcttgcagatttagtcttaccgtcttccagatactacagctgcctttgggcttttcatcatcccttatccttagccaccaagtcctgctgagcttcttttgtaatacttctctcctgcctcctccactgcacacttgtaccactgagacagtctcttaattctgcccagcacctccagccccatctacacccctctagtttgtcctccagcatgttgttttaggactgttgctagcctaattatttgaaatgaaatttcagttcttaacttggcatccaaacctttcgtccattgcatttctagctttaccttctaatttctagctttaccttctaattcacttaaatgagatacaatttaattaaaccatgtattccttgcagcttctgtgctgttttccacatctgtctctttccccatgttggcagggtaaattttagaggtgtaatgaaatttgcaggtggaagttatggggatatagattgtctttagcttaatgtaaggatgacctttccaacagaattgctaatgatggggtgggtatcatggaagaagtctacctgtcatctcccaggtcatctactgtcatctcccctttaaagacctcatcttccatatctgcacatttggcttctcctctcttttgaagctgcttgtttccatgtcccatgatgctaaacttggggactcctcccacctctcagattgtattttctctggttctttctttcactcctttagtgaatttgctttttcttttcttcttttcctgtgctctttcttgaaaaatttcactgctcttagacttagtgtttaccttttgagaaaaattcccaaatgataaccccagccgtatgtttaactacatgatttgtctttatttccaacatcttgccagatatttctatttgagtacttttgtgtccaaatttaaactcatttctttccctttaaaacatgttctttccctgagttccctggctgattagtggcaacagagatgggcagatctttctgtaaagggccagagagtaatatttttgtcttcatgggccataaggtctcaatcacagctactcatcttgtagataatatgtaactaaagggttgtgactgtgtttcagtaaaactttacttatcaaaataggcagcagctggcattggcctttgggctgctgtttgctgaccctgatctaggatacccaggccccaaactccatactcctttggcctttccactgcttttgtttgctctcttcacatgattattaattttcactgatttcacccttagcaaaccattcatacttctagaccatagctgtctgtctattcattcatctagtagacaaaatcttccttttacatgttaatctctatcattttacataatcaaaaacctctagtggctccccttggcctgcaatctaaggttacagttctctgggtgtagctctttctgtgttttgcctccagccttctctcttactcctgtatggacattcctccaatgacactgatcaagtgtgtgttctgatattagttctatcacttctcacaggttgctcctgactcagaatggtctcacttcccactaattgaaacttgccttcaggcctcaattcagggtctcacttcccaggtaaagcttcgccctagcccagtgattgctcctctcctagggctttttttttctttttctttttctttttttttttttgagacagcatctctctctgtcacttaggctggaatgaagtggtgtgatcactgcagcctccaactccagggctcaggtgatcctcctgtttcagcctcccaagtagctgggattacaagcatgtaccaccacatctggctaattttttttatagagatggggtcttattttgttgcttaggctgttctggagctctggcctcaagtgatcttcctatcttggcctcccaaaatactgagattacagatgtgagccgccacacccagcactgaatagtgcttttgatgttgccactgacctattcagttgagaccgcattgggttgtaatttgtggtgttcctccctctccatctgaattttcagaagctgttaaggacagcccagtagatgctcagatgtcataggtaaaggtcatacattgaactctttgtctttcctccagttctgcttcccccttggagtccctgtctcagttaatggcaccagggatcatcattgccttgtgattctgactccttctctttcacctccaccctacctgcatcagttacgaaaagtccagctgctgctccctcctatgtctttctcctatctgccctctcctctccatcccttctactgctgccttagctcaggtcaccactgtctttcactcagaccattggacttgccttgaacatgaattcccaccaccagcttctctcctcttataatcccaacagttatgtatcgggatctgacatgtaggtatgaccttgtaactttcctgattgaaacccctcagtggctccccattgccctgggataaggaccagcctgccagcatgtcgtgaggccattattgattggatgcactttcctctgcagtcctatttctgacttgtctcatttacacagcttacatttgatcatctgtaacccctatacatcttctgtgcatttgcacactccccgtctctgtgtagatgccccccctccccaggtccacttggaaaaccatcacctgaatttctaggcattgtacaaacgttccctcttttgtggagctttcgtctccttccctccagaagaccaagaggagtaaaggtgttatcatagaataactgttgggatagagatataggcttcatctattttctaatgcctcctcagattcagagtcttccaaagtttccctgcagactgagcaatgaataattaagcaaacaagtctctaaaacatcttgaaatgcttatgtatgctaaatatgtagttttgagttcttgttttggttttgctggagcttttgccttcttcctccattacaatggatgatgagaatcaacaatgtagaattattctcggttagtttatatcttgtttttaacctggtatcttcagtgtgttaagacatttttcctttcttgtgggggttcccctgcaaagaaggaggctcacttgtggggccgatgaccactgtctctaggcaacccagagaggtgtgaaagaaagaagggggctgtgaggctgcagggagtatattccccatctccagccagggtcacacctgtcacttctgtttagtacctcttcctagtaaggagaacgtatgctccctttctggaagggtctacttagcagaaacgaggagtggcgagctcatgtggaaagtgcttttttgatgtgttctttcatgtaggggacacacggtgtggaggggatgcacaattactcttctgtggttcctctttcttactccagggtctcctttgccatgaggtccctagggacgtcttatcagaggagaagaaaagtaccttcttagttcttttttgttttgttttgttttgttttattatggggtttcactttgtcacctgggctctccggggtgcagtgttggaatcgtggttcattgcagccttgacctcccaggctcaagtgatcctcccacctcaacctcccaagcagctgggactacaggtgcatgccaccacacctggctattttttattttttatagagatgagatctccctgtgttgcgcagactaatcttgaactcctggactcaagtgatcctcctgccttggcctcccaaagtgttgggatttcaggtgtgccttggcctcccaaagtgttgggatttcaggtgtgagccactgcagccaaccccttcttagttctggagagcagagtcttgcctggcatcctggtgctataccaagagtcctctcctggtttccagagaggacatttgacttcttcaggagaactcaccccactccttttggtccattaggagcaccagaagctttggacctgatgggctgggcttggtctcttcagagcctctgtcctcattcacagaggaggtatcaggtaggccttccagcacagaattacattacctgggaatttaagtgggaggaattgcagtggagtattttgaagatcctaaggcatccttcatttaatttacattttcgattcttcagatattggaatcaaagattgagacacacacataacactagagcacacagtagaccatttctaccttgagctatctccttgttagagaaaaaatagttttgactgtttgtgattttttactacgggcagaaaaactttgaaaaattaatttcaatgtaaaagagttttacttttgccagatgataacacttcctatgctagaacctgggggtactgggatctgacttgaagtaattctaagtttaaatttatagcaaccatgtgggtctgttcagctgggaggggagaaatattgcgagccataaggatgtattttagagagtttctttagtagtcttcagatgtctacttgccctgtacaaagttcagaaactgtttaggacttggaaccttagaatatcagatagaaaaggattgacaggcttagtctactctgtttttgagatgccgaagccaggtgacttcccctagtggcaggtaggcaatgtcagagttgtgatcatggcctggggctcttttccaacctgctctctgacctcacataggatccggattgagcagggtaaagggtggaccagtaaaggctttaatcagtaaagtaatgacagtgttttccttcatttgaaaccagtcagatttgatactacttttctgttcagtttttgccatcattgttttctggaagtttttaatctgtaatacctcttagtatgctttaacacataacacctagtgtcattgttatagagatgaaagtagaaaattagcagggatgtagtatttgcctattgcaacttcttttcctttaaaccccttcccatgtcggggggataccttgtgtgtctgcagcatgtgatgctgactcggactctccaggcagctgactaacggcacctaaactgcctgctgcattttccctgccccagcacagacttgcttagcagctcccgcctcgggccctcattgagaaccatccagcggcacatcaggctggtgccactcccagtggccttggcagtgaggaggtgaggcgagagcaccctcaggtgctagtggcacgagtcttgcccaggctcccaggggaatgagtggtgtgatgacctcatgtgccagaagccagggcaggcatgcttgaggctgagagaaagcaacagatggacctcaggcagaagcagtcagagcagcctcaagggaggctggtgcggcaccagcgtggcatcttcccagcatctgaatgttggcttgaccttcgctgtttgtgtgacctcacccaattcagtaacctcactgagcctccctttttccatctgtgcaacggtgatggtagtacttcactctgcaagcggtggaggtgagagataatataggtcaagcatttagcagttggccaagctaaagacatagctgttgtttttgttattagaaacacagcctcagccaggcacagtggctcacaccagtaattttagcactttgggaggctgaggcaggtggatcactggagctcaggagttcgacaccagcctgggcaacataatgagacctatctctacaaaaaatacaaaaattagctgggcgtggtggtgtacacccataatcccagctacactggaggcttagttgagaggttggcttgagcccaggagatggaggtttcagtgagctgtgattgtgccactgcactctagcctgggtgacagagccagactctgtctcaaaacaaaaaaacaaaaacaaacaaaaaaaaacaagaaaaaccaatacaatctcatttttcctgttaggttattcatacaaacctgttggaattttttttctttaggaatttgaatgctcatttttaagccagacagtttcaggtggaagagaatcatgaaatgctttatcatgtttttgttatttatcgctagagtaagacttaggaaagctatagaaaagagccatccagccaagaatttgaattttgtcaacttctctattacagaggtttgctcaaagcccatagagtctagatgaaccttctacctttgcccccaaaattgcttttttcttttaatatgctagatccctttgcttattccaggctgaaatgaatgttatgtagctagaagtttcctgtctgtgatcaattctaatggcttttgtgaagggaaatggttgtaaattattaccagttaattaaatgagtgtttctcttgagtcctttgtgtaggcttttatccaagcctgtttagaatcatggaacattacagctagaatatttttagacaactcttgtttcatggacaaggagacttaaccagtgatataagtacttgcctaactcctgcaaagtgatgccaaggaaaagcaaactttggctgagggtgtaggagtggctgtgctggggatccggtgggtacatcaagctaacagagtataatttctaagcagtgagcccttgtcatccatatgtcaccggtattccttggagccatcttggagtgcttttattttttacaaagtgctatcttgtaggactattctatagtaaatattacctttcctatttttataggtgaggaaattgaggtggtcagatgaccttatttagctcttagatcaactcagcagatatgtattgagtgtttacttggttcaaggaactctgcgaggctccttgggaacataatgtcagatcctgctggaatggaggttacagacttattgcaagtgatgagatatgtgtatgaaaatgtaagtaattgttcaaggtatagataagtgttaataatagttgagatgtgaattttgagaccggagggatcaatgtgaatatcaaatcctggcaccagtttcttccttctgctgctcatgaagctgtgtcatcttctgtgctcggtaacccatccaacctgtagccctaggagctcctctggggagtcttgagtaccttgcagttgtcccgaccctgggagtcattcaataaaggttcaaatgaatgaatagataggtgcggtgaagagagacaggttttccaagcagagaacacggcatgagcaaatgtgtggctgagtgatagagccaggagaggggcctgactaggacagcaggttttaaaaagtgatttttttcttctttttgtattttaactttctaaagtgacaatggaaggaagggaattttgaaaacaaagtttggatagattagtgggaaggcagcaaaaggggagcccaagtggtcctgaaagccaggtggagcagggtgttttattctgaagactctcggagaccagcggaggctttagagggggaagttgatgagatcagcactttagaaaaggctgctttgtttttggtggggtgttccatgactgcaggagaaaggatgagggaggaggcctgcagtgacagggatcctagaatgatggagggaacgaagggaaaaacagatggtcacggtgcctcaagtcggagtggctccaggattttaagcctgggaacgcagaagaacagtggttctagtgattcagtgatgaccactggaagctttaggaggaaacatgggattggagccctttaaagctggaattggccccttagagagaatctggctcaggcttcccagatggtggtccgtggtctggctatatcagagttacctacagaacttttaaaaacagcagatgcctagaccccgttcccttgccccagaaaatttaaaatcagtagatcacctgtggggtctgggaatcttatatttaatccctttctgtgattctttggcaaagaagattgaatggccttcctgatgtcgcagattggtcaggacagagcaccaggacccaggtcttctctagcattgctattactcagccacaatgtgggagataggggataagttcagatggggaggtatagtatttgaggcagcgctgattcatgtgagttcaacactgatggctctttgaggaaggggttacttggcatgagaactcaagggttagatggctctgagggtgcacgttgggaatcattcagtcaagaaatgctttcccgagtggctgctgcaaaccaggcataggatattttcagtccacttcggggactcaaaagtgtagaacagagtagtagaaacaacatagagaaccctaaaggctgaagttgtgtttatgttttcttctctgagctgttttgagtaaatttaggtgtaagttacaatgtatgggttgaaattcattattttgggtatggatgtcccgttgttctagcaccatttgttgacactgagtttttatacttttgttcatttgtctatttgtatagaagaatcacatttttttaaagaccactgttatctgggtttcaacaagggcccaggagttgttctttttaccaagagaagtggtctgtaggggagggggttagtgtgtttattgctccttgaatgactgttatagtaagaatgctaagtgtgttcatttctatgtggggctgccctagactctgacctcagctctgttctattagacactctgtcagtgcattagccaatgacataggtagcctgaggccctgatttggggagccataaaactgagaaggggagtgaatgaactgactggatttgcgatccagtgaacgctatgacctgggacaagccaaaatattgcagaaaaaaaaaatgaagcacttaggtttttatgaaggttttgagcctaaccactgcacgagcacaggatgtgggaagcaaagccttatggcagctagaaaagatgcagaggttttagttcattgcaagctcagcctgggtcactggggcttctcagagcgcccatgtattctcgctgcattggtaaagggcactgtcactgtcaagatcaacgttaatgataatcttgctcttgctggtgaaagtcaggtcacacactcagcctgacttcaccctttaatgggggtgtgaagaaattggggcatgtcaggaggaaactgactagaatggtgaaggaggagaaaatcatgtcctacatgaagttgctgagagtttgagatacccaggtctattttatttactcatttgttccacaaaccattttctgtccccttatatgcaaggtagggtctcctttggggacagggcataatgactacaacatgatgtgggttccagcagtagtcttcataacaggtgtggagttgcccacctgtctgaaagaggtctggaaaggtccccctatacaggtgggtcttgaattgatggacaaataggagttggacaagtataaaaaggaagaaaggagtttccagccagaaagatcacataccccaaatcactaggcaataagctacagatgggtaatgtgtaattttcataattttgactatattccccagtatgctgcttgatccataatgcgtttggttgctctctcagaataaatgaaataacatacctccctggagagtgtacaagaattaagagatggggatactggttgtatgcagctgcagtggtgggaagagcttaggctgaaaggtaggaaggggtttagtgtctagggctatgtgctgtgctaaagaatttggaccttatcatggacaggagaggaaacactgacggtttctaagttaggaagccacatggtcagattttaatttttgaaacatgtcactggcagcagctggaggacagtagtctggaaatagaaggcagctagaagcccgttcagggaggccagatgaaccacggcagtaggagtggagcaggggtagatccaggagagacttcgagagtggacgtgttgggatctgagagcgattcaatgtacctgctgaggagctgggcttctggcgtggcctactgggtaaatacagggctcaggagtgagaggagggccaggaaagggtggtgtcctggaagtaaggaatgagagattcatgaagaggaagatgtcaagatcagatgcggcagagagatcaactgagatgaagacagacacatctttgtatctgacagtaggacttcataaaagttgctggagctgtttcagtgctggtgggaggcagggaggcagacggcaggggatagcacggatgttagaaggcatagagggatgtgataattgttgtcgaatatttgacctattctctttggctgacaatttgaatatgttttttgagtgcaagtgatagaaacccctactcaaactggctaagacaaaaggaatttataggctcaaataacaaaaaaaaatcccaaagaatcaagcaaggcttgatctaagggtttaaatgatgttacgaagagctgttctctttctgtccctcagctctcccctctttgttggcttcattctgtagctcagtggggggacaacacaggtgccggacactcccaagtttgtgtccttccagattgaagtttagcagaagcgagatcttgtcccttccttgtagatccaggattcctagttggacctacttggatttttgtgctcaaacctgaaccagtagatgctgataccgggtagggagttgtaattacactgatagccagagagaaggaatgtgcctgccccaggccagctgtgcagagttcagtcagtgctctgatctgctaggcctgctcacatgtccactctggagttaggggcagaatcccagatgagccatttggactacatgtgagggaggagtagttctcaaataaagctcaagtgttattcccagaagctgggatggatgtactagctagagacagtgtccactggagctgtagagggcgaaactaaggtaaatgagtggaaattattggtcttgctgcgtttgtattcatagagaaagatctgtctatattgtacaggaatgaaataggccagctgttaaggtagtgaattggttgtcactggggggtatctaagcaactaccgtgaataaatgataacagcccatcagcagtgtatagaaggaacaaataacctccaaagccacatttttcaaactgtttctctgtgacacagtaaggaatacatctttacattaaaacctactgtacccttttatatgtatacaaaactacacacaaaagttgcatgaaacagtgcttttccttactacctgtagcatgttcatattttctgttctgtttttattctactttgaaatccctattgtccgctgggtgtggtggctcatgcctgtaattccagcactttgggaggctgaggtggacagatctcctgaggtcagaagtttgagaccagccttgccaacatggcgaaaccccatctctactaaaattacaaaaatcagccaggtgtggtgacatgtgcctgtagtcccagctatgtgggaggctgaggcaggagaatcacttgaacccaggaggcagagattgcagtgagccgagatggtgctactgcacaccagcctgggtgacagagcgagactctgtctcaaaaaaaaaaaaaaaaaaaaagaaagaaatccccattgtgtgcaacccactaagttgctttcatgtctctctaaaaagtttcaacctgcagtttgtaaaaccctgttctaaggtccagtgtcttaccacatctgccctaggtggacaacacttgaagaccgtgtttaaatccggcttttccaccacagtgggtgacatgggtcaaaaatgcggaaggaaacctgttctacttgtgagagctcctgcttctaactggtggaatctcctgctgtctgtcagagtagctcctgacccatcttggggtggaaaggcctttgtgggccctcagggaagtgttgaagggagtttacgggctggctgtgggctgcaggatggcggaggcggccaggcagcaactgtgcctgtgccagcagtagtttatgttgtgaggtcgaatgtatgtgtatgtatgtattctctggcaggcctttatattgaagatgagggagtgtggcttttaaaaataatgtatttttgacttgaaacaagtcaaggcagagagtggagacaattagaggctgatatcctgtttagtcatctctctagagagctctattttcagagctgttctataaaggttcacaagtggtattaagatagttaagaggatattgttaacagtagtcatgatgcaagtagctgatttgaacagggaggtgatttatagtgtggtaaccacattggtaacaggttttatgcagagaaagggtgggttgtaagaataggttgttatacaggttaagctttctgaatctgaacaaagcaggcatcttttattttgaaaaagtatataatcagggtgtggtggtgacctagggtaagtccagtgcatttttgggggctttgtcatgggtagatacaataaattttaaaaaagtaaacagtactgttaagaatctttgagattggctgggcatggtggctctcgcctgtaatcccagcactctgggaggccaaggcgggcggattgcctggtctcaggagttcaagaccagtctgggcaacatgcctctctaagccaggcatgatggcatgtgcctgtggtcccagctacttggggggctgaggcaggaaaatcacttgaacccaggtggtcgaggctacagtgagtcatgattgcagcattgaagtccagcctgggtgacagagggagactctgtcttaaaaaaaaaaaaaatctttgagatcatatgtggaggctgtgttagaaacgctaggccaatgccaggcacagtgactcacacttgtaatcccagtgacttgagaggctgaggtgggaggattgcttgagcctaagagtttgagactgggcaacatagtgagaccttgtctctacatacatacatacatacctagataagcaggcaagctggttatggtggcacatgcctatagtcctagctacttgggaggctgaggcaggagaatcgcttgaggctgggagttcaaggctgcagtgagctatgattgtgccactgcactccagcctgggagacagtgagaccctgtctcaaaaaaaaaaaaaaagagaaaaaatgctaaataatgatgccatagacttttcagattggaagagtgaggctcagtgtggtaaaggaccttgcccagggtccagaaccagctgtgacagaatcagactagagttcttggcctggtctagtaggggggctctttccactgtaccatgtgactatttgcagcttattttaaatttaatatttgaccaaaaatggtcattcgtatctctagtgaaacttctctatatgccagtcttcctcttcagatgaaaggtcaaaggcagaaatggagccacagccaaagaaagagaaaaataaaataaaaatggagccatgggcagaatctgaaaagatttatttaaggacaattgtaaattcatgtatttgagtccacaagagcctcacaatgcaaggcttagaggtgttcatggatagtgaagttagcatccggtaggaagaggggagtccgcccacctaagctagtggtgatcagaacagagccagaggtgctgttcatcctgggcgccatgctgtatggggtctttcggaaactggactatatgcagaggacgacaccatatgaaaagacttcaagctgcattgcttgcagaatgcatgtcttgatatttcagctgataggtaacttcaaggtatgttgatactcccgtgactaattaagagtagcagtccgacacagtgtctcacgcctgtaatcccagcactttgggaggctgaggcgggaggatcatttgaagtcaggagttcgagaccagcctggccaacatggtgaaaccccatctctactaaaaaatacaaaaacagatcagatgtggtggcacacgcctgtaatcccagctactcaggagactgaggcagaattgcttgaacctaggagatggaggttgcagtgagctgagatcatgccactgcactccagcctgggcaacaaagtgaaactacctctctctctcaaaaaaaaaagagtagtgaatgcaaggctcctaaacttccttccctagtgcttccttaagattgaccagactttggtggaaatatgtagcagagactctttatactttttactccataaaactaaagatttgcagttgaccaagccacatgtgttcattaccttgtatgttgccgttatttctctatttcatattcttgccatgtggtttagtaaaatgctgctcttataagccatatgcataagatatggaggtctcaaaaacaattaccaagtatgtggatgtgcctgtctatattatgacaagccaaaaatgggagagaataaaattcaagaggaaggaaactgataaaatgtggtttcttttcagtctttacagttttttgagctttcacttgtttccctgccactctactatttaatgaaagacttagatttatttgatttgtggctgtgatttacacattaggcctctctgtgatgaattgtttaaggcccacaaaaatattttaaaactaacatataatatacatttttttttctctttgtaggtggatctcgagccagaggggaaagtatttgtggtaataacccttaccgggagtttcactgaaggtaagaatgagttttgggtagtttccagaatacatgtaatcttggtttacactcagtaggaatttctatcatggacattataaaaaagagcatgttgtaagagatgcttaaaaaatcactttcataagttgggctggctagtattttgttgcccagtggtctattggttcaggttgccaaattaaatatatttgctaaatctggcaatctcacgtttcatttaacacactcaatgagtttttgtttttagccagtgtcatcgtagctgaatggtttttgcgtctttttggttcatgactgtggaactctacgtctttggttttgtgccatcttttagtttgcctgtgaatgtctatgaaagaaatttagggatccagttatcttctttataatctctatctcatttgtgacctgtaagggattctgttcttcatctgtggctaccgtactccctactcccccatccaatattttttttacttgaggtaaaatttatatgggggtgaaatgatagatcagaagtgaacaatttgaattttgacaaatgcatacaactgcataaccagcaccccaatccaagatacaggacatttccattattgtgaacatttccctgtaccctttttcaatcccctgctcccagaggcaataagtaaagtgctttatttcaccacaggttagttttacctaccctagaagttcatatacatggaattatacagtatattctcttttatgtctggtttctttcactcagcatagtttttagaagattcatatcattgtgtatatcagtatttttttcattttatttctgagtagtagtatcccattatataaatgtagcatccatttgtttacccattctcctcttggtggacttttggggtttttcctattgttgtctattatgaataatgcttttattaaccttcttacacataaatttttctggacataacactttcatttatcttggataattatataggagtggaattgctgggtaataaagtaggtgtgtgtgtaacttcagaagaaacttccagatggtttccaaagtggttttattatactcccaccagcaatgcatgagagttccaattacttcatatcctcattaacactttctatggccattgcttttcatcgtagacattctagtgggtatgaaattatatcctgtgggtaaatttgcatttccctgatggtgagtactttctcacatgcttattggtcatttgtttgtttatttgataatttccagttccagtcttttgtcctgttttctaaaattggatttgtctttctattattgatttagaggagttctttgttttctggatatgagtcctttgtgagaaataggtattgtgattactttttcccagtctgtggcttgccttttcattttcttaatggtgtctttgagcaaaagttttaaatttctatgaagttcagtttattaatctcatcttttgtagttcatatgttttatgtcttcagagatctctctgtcataggatcactaagatattctcctgtttctttttttgttttttttttttaagaagcaaatagttttaggttttatgtttaggtctgtatgccttcttaaattgatatttgtgtgtgatgttacagaggagttgaaacattttttttcaatacacgaatgcagttgttctagcaccatttattaaaagtctcccctggccccttgaatcaccctggaacctttgttgaaaatcaattgaccatataatgtgggtctgtttctggattatctgttctgtcctgttgatctgtttgtccatctgatctctctttcttttctctacattatgccagtattacactgtctcattactgttgctttatagtgagtcttatggttacatagtatgagccctccaactccgttcttttttgtatgtttaaggttattttagctattctcagtattttgcaatttgatatcagttttagagtcagcttatatatttccagacaaaatcctgctgtattttgaattgaaattgtgttggatctatagatcggtttgaggggaattaacatcttaacaatcttgagtatctttaaacccatctgtagtcaaattagtcaattctgtagtccgtggacatggtctttgctcgtaaggcatagccagtgtgaggtttcagtagaaatcccaaggtgttttaagcccattaattttatggcactcaagcttctaactctttctcctatgggtgggaaacagctgaaatctcagttcctatctttcagcatcctagctcttgctcctgtctggacctcttagagtttcccttgcacatgcacagtttaggaagatgtgagggcttgaagagtttacatatgtggaggttcttctttctgtggccccatctttccaggttttctcccctcaatatccagtcatctggtaggcttgaattttgtcaattctgccttcaagccaataaaactgtggttccatattgagttctatttacccaaccctgcacaacctggggaataatctggagaaaagccctacaaatgtgggtctcgcctaatgcggtttccctccttcacgtgtcagattctctctagtttgtatgtgtttttggttgttctctcacatcatcaactagttgtttaaaatatattttccaggtattttaatcttttggtgggagggttggtccatatcaagctacttcaccattactaaaacctcatgaagatttttaagcatgtggcttaattgtttgtatttttggtattggcattttgcaaaattggttacactttctttgagaaatagttttctccactcctttcagccaaccattcccattcatatgggtgaattgttttaatgttaaagtttttcaatatatcgtctccattattaaatcttgtctttttgcacaaacctggatttagcagaaacctagaatacttgacataaaaaaaaaactgttcaggttacaatttgggggggtgttctgcctgctccaaggtctttttgctttgcttggtatcttttatgtacagagaaaaatgagtctgttcctagcctagtcaaataaaatcaatgtagtattatggaacattgttgataaaacattctcatcatgcacgtagaacatggatcagctatggtagaaagaaacacaacagtgagaaagaggtcaggaggaggagtgggtaagattctctctcattcgagctgaatcaactctctgcattaagttacaagggactggcgaagtaaagcaatgcatattagaccaggtctgattgtgccataatcattacatgacttttttagagccatgccaactctctaggactaaatgctcaccaaatacatctgattgttctcattgtatttatttcttagtttcagtgataataagaatgaaatggtaagtcatactagaggtgagttcttactaggtcattgcagttgtgtctttcagagctgaccctgggtaaaattgtgagatgagttgagtttatctttggtaattccatctttgctttaagctagtcctttgtctctgcctacagttgtcccttactgcagcaagaagcccagtggtccctgtccagaaagagttgctgataaggaaaacagttaattcataggctaattcacactacagtgatagagattgatgtcatagtactctattcctcttaggtgtgtttgcatattttaaaagatgctggaagagctgctttatccatgagaaatagacttttaatgctaaaattttaatattgaaatctacgggtggggtatattttaggaaccccatatctgttctctgtgtctctgtgcgtgcattgctttttcattttggctcctagactggggctcagcttgagcttgcacgttgctgctgcctttaaaacaccgctcccttgtcacatgcagaggacgtgatggctgcctgtctgtgttaagtaagaaggaaatggagccccccccccccccatttgcctgccacagctgtggcagcaacctggacctggcactgagagcatgtccctagcttgacctcgctcctggaagccaccttagattatgtccagccataatatgacaggttggctggtgcaacatttggagctctagttcccatcttggatactgaaagccttcatggaaaagcagtgtaaggtcaggcctgcccagtgtgttttggactgtgaaaagggcattgtcctaggatcctggaggcactgtcaaagctcaggaaatgttggctgatcctcagtctgtctcacatggttgtcttgaaggtcagatgatataatatatggggaagtgctttgcaaactataaagtactatatgaaggtatgttagtgggattttcatttccatgttcctattgtcacagcaaggagatcccagtcatttcccctacccctgccctgggaccatcttgtatactcagcaggttcgttttatcttaacattgactttatggccaggcgtggtgtctcacacctgtaatcccagcactttgggaggctgaggcaggcagattgcttgagctcaggagtttgagaccggcctgggcaacatggtgaaacaccatctctacaaaaaatacaaaaattaaccaggtgtggtggtgcacacttgtagtctcagctacttgggaggctgaggtgggaggattgcctgagcctgggaagtggaggttgcagtgagctgagatagtgccactgcactccagcttgggtgacagagtgaaaccttgtttcagaaaaaaaaaaaaaaaagaaaagaaaagactttattttatacaagaagcctcaagaatttcatggacagtggctagcataatgttggcttatctccatgcctgttttcatgatctcctatgcgggttctgccataagctcagattctataatctcaaagcactcctttaaaaaaaattacttaaattggacggtggtctgtgatgtacaaggctggtattggggctactgactgctacttacctcattttttaatttttcattaattatactgaattagctcaggcaaaactattttgttaaatgtaagacatgattgagaagtgacataagaaaaacctgctgggtgcagacctgtaatcacatcatagatgctggagagataaagatgaacgagacatagacactctcacaggagctcataggagggaaggcagatacatattatgtatgcaatgcagggagccaggtcccatggcaggaataagcccagtgcatagtgttggcacatgggactacataatcaatttggccaggagggtttagagaaagcttttctggggaggtgatgtttaaaacaagtctgaatgataaataggactgtgcctagaagggaacagagttcaagagagggagacagtttgtacaagaaacgaaaaggagtgtggaggtgctaaaggtagggggtgtggaggtgctgaagattggggagtgggatggggggatgtggccagagatttcggagggcttatgtgtgggcttgcccaggacaggctcagtttgttggttacaccagaataattatacaacagcgccactgttcactttcaaaagggtgccaggtcagacaataaattgcatgttcacaccacttgtaggctaatagaaatgataagataccagtgaagggttttaagcagagatctgatttggtggcagtaagttcaagggtggggaaggggtgttagttgataagactagatctaaggtgtggagaaccattatagagacttggaaggttgtctcagggcaagattattagggcctgaattaggttggaatatgtaggggtggagaggagggggacagctttgagagatgtctgtgtagtaaaatcagtaggaattagcaatccactggatgtggaggatgaagaaagaggagtctcagatgatgctcagatggtgcctcagagtcatttaccagggtagaaactgggagaagatgatgaatccagctttggacaagtggagtttgaggtgcttgtgggaaatctaagttgcaatgtctgggagaaattggaaataagattccggagtttggcaagatgcctgggcctgagatgtagctccaggtgccaggtggaagacaggcacatggataaagaggcccattgagaagatttagcaagaaaaccagcaaggctgaccagcagcagaactctgtggagcatcaacatttaagtactttggctcatgaattatagtttatcaaaccaaccaaactatgctgaaggtttacttaatgaacacccattttgctaagatattacttgtgaaatagtatctgagtgcttgctgtatgccagggactgtttcaccagattgtttaccgtcttccaaattggcaccaaaatgtttgataatgaagttagaagaaagaacagaacacaaaaggctttgaaaagtaatgtttgcattggtggtaacagtggtttcttcgaagtttgatgatacaatgtgctgtgtgaaggtttatgcctaatgcgggggtaaaaagaacagatgaacctactcaaaacctgcagtgaggggtcttcactgaacttagatagagcaagaaaaactcttttacattcattgctttgtggaagtctctcacagagctcaaggcgtataaaattatcaactggatcagaaacccctcaccactgttcatcttgttaaaggtgtcactctgcatctgtgcagaattcccctaggcactgaggcagaagtagaagtgatttattattttgaaaaagctgcctaatgtcaatctttattctaactaagccttcctgaagctaagaactggatctgaagtctgatcaaattgaaatttattatagtgatgaaacagccctggatttttaatgcagccttcagattccatcattgttgccatgtgtgtgattgtcactatgttggactaatttttgtctggaagagtggagtagcaaaaaaaagaatagattgaaacaatggaaactgaggaaaatgcattaaactaaattcataactgctttaattggaagagaaacaacagaaagaaattaaagtatgacatcatcttatgtgaggacaaaaagatgtagctggattattatgctactaagaaatatggtgtaagattttacgatttgaagagaacatagtttgcagtaaatgaagtttgcttggactcagggaaccacaaacttaaatggttggcccacaaatgaaaaaccagacatgatgtgtctcctgatggaagcccacacaacatcgtgatcttgccaaaaagtagaggtagttttgcccaaaactcaagccttagaccagtcaggcttccagatccaaccaccagttaagaggaaatataggggacagaggagcattttaagttacaccatgggatgtaatcagcaaaatccagactgtggaaaaattttacaggaaaagagacttggtttcttctaccaaacattggaagaaaaaagtaaaggaaagagaaccaaagtaacaagagagaggcatattaatcatttgcaatatatgggccacattttatcccaattcaaacacaaattataaaagaaacattaactcccaggaggcaagtgaagaaatggaaaccgtgcctggatctgtgaggatattacagaattgttgatgttatttaggtgtgattgtggtattgtggttacttaaaacaaaaagaacatccattagaaatacacttaaaaatatttactgatgatatgatatgacatctgggctttacttcagaataatgcagaggtgggcagaggagatgggatagaattgaaacccgattagccatgagttgtttactgaagctgggtgatgattatatgttgcatgtggtttattatagtattctacttttgcatgtatttgaaattttcattaataagttaaaaagtaaaataaaatgacaaatttcaagaatatctgcttcttaaacaaaaaccagaatctgggttatgacatcaaaatgatgcttgaacttgaacattttacctctttccacttacaaattaaagctggagggttttttaatgtatatgttttatccatgattctcagtttttatgtatgatgaaaaagtaagttaaaaattttaaatgactaaagtactgtgcttcagaaagacttttttaaattgctaaataaataataagctgtgagtcaaaaactgcaggtaggaacaggtgagtaagataattccttttgttccgtcataaagttctcactcacagtgaatgacaagtagattatctcctactaacaattacataacattttgcagttgcgaagtttaattttaaggtagtttcctaaaagaataaagtaaatcagaaggattaatggtagaagtatctttataaagatagtaagaaaaaggttcttagtgtacttgtttcttccccagagttcccaaggcaaatataaaggtattctattttgtacaagtttttggggaaggaaaacttcctcaaaaacaaaaccctgacaaagaacctgttatttgtgaatttgaagcttgtttagaaaaaaaaggccttttacttctgctaaaaccttgaattgttccttatttgagacatttaatatgtaacttggaaaagatatacatttgtcctggggagacaatggaaaggcacttgaattttggcatctgctttttctctctactaaggcagtgcacaatggtgcagaataagagtctgatctttttctttttgtcccattgcctcagtttttagctcacatttcttgtctcaagcccactggtttacaaataattacgttctctgctaagtcatgtggcacatggaccatcaaggcagatgaagcatgtgttactgctttgaagctgcagcccacagttaccccctgtatcaacacttcagatgcatgtcatttttaaagagaaaaagtgatttctggtggtagttgatttatagcattcctttctcagatttcaagcctggtgacaagttgttgatttaatttttttaaaatgtagctttaaaaaaatttattcttttggcatattagcttgaagaatgagtgaccactttagtttttgtgtttgttttttgctggtctaagcaattgtggctatcaggttgaagacagggtaggagagaaagaaaggaattgagggaatgggagaataggaactggaaacgggcgaatgatgtttttaaaggattgagactaattgtcccttgtcatagatgctctctcgtcttctccataatatctagctcatttgttgaatgccttctgaggaccagacactggagttggcttgtaatttagcaaatagcaatgggagccctcattttattttctggtagcaggataaactcttacctagtaactgagtacctctacgtgttcataccatgctatatattattccattttctctctataacaaatttctgaggctgttgtaattctcagtatgcaaatggtgaaccagactcagagacgctaatttactatggtctttcctggatagtaagtgccagagcccagacacaagctcagattgcaatgctgaggtccaagatctttctacaccatccagctatctgaggagttgggggtgggggggcagcattttagtttttttctttattccatcttagaggaaaactgtcctcaggatagcataatcccaccctccagagagtcttgtcttttgggatgatgtctttttgcaaggcttcccttgagttcctcctccttaaactggaggaccaacattcacccaggaaaggtgcagcattctcagacatcaggcatggatgggccagaaagctctaggcagattgagtttaagatttgctcaggttttgttgtcagtaggttctcttaatgtacatcttaagctagaactcagaagatgaaaatacaatcagtgagttcagcataggtatgatagctctatttgcctttttataccccagtcatcattggcttcactgtacctacttctcttattttgactgactgtaagtgaaaaaactaggtggtggctttgttggaaattttaaaattcattctcaaagtgtgatcctgcagacttctgagagttccagagacattttcaggaagtctgcagttccaaactgttttccttataatacgaagattttattcatccttttttccccactgtgttgacatttgccccaatggtgcaaaagagaaatggtgggtaaaagcatggcaccaaactataaagtcatcattgtattcttgatggccacgtagttgcaggaggaagaaatctagtttcacttaagaatgtctttgatggaacagtaaacattattcatgttattaaaggtcaatccttgactatatacctttgtaacattctgtgtgacaaaatgggaaatatgctaaaagcattcctgcttcatactgaaatactgttgtgtctcaaggaaaagcacttgtgtgattgagttgttagctgagctagccactttttgcatggaacaccatttttactttgaaagaatgacagacaaaccatactatggaactggcagatttttcagacattgtctaaaaaacgaatgaactgcgcctgttacttcagggaaaacaactgtaagtatttggtgccagtgataaaattagagccttcaaaacataattcgaattttggaaagtttatatccaccattgtgagcttgacaacttcccagtacttattcttttctcatgagtttgttgttattaacgattgtaatttttaaaaattgtgttatgagatatgtcaacatttagaagatgacttccaatgattcagtgaacacgtattttcacaatggccagtacgagatgttataaaatcatttatgggtcaaggatctcttgaaagcgtaaggtagactcatgtatattaatttaaagtatgaaaagttcattgatacagttttatattgcaaccaacttttgagaaactacgccttgtttacttttgtgtggtattaaagaagaatatctgcaattatctgaaaaatctattaaaattatatttttaaattactctgtgtgaggctggactgtattcatgtacttcaactagaacaacattacagtggcttgaatacagaagcagatatgagaatctagctgtcaggctgggcgcagtggctcacgcctgtaatcccagcactttgggaggccgaggcgggcagatcacgaggtcaggagatcaagaccatcctggccaacatggtgaaaccccgtctctactaaaaatacaaaaaaaaattagctgggtgtggtggtgcgtgcctgtaatcccagctactcgggaggctgaggcaggagaatcacttgaaccagggagtcagaggttgcagtgagccaatattgtgccactgcactccagcctggtgacagagcgaaactctgtctcaaaaaaaaagaaaaaaagaaaaaagaaagaatctagctgtctttttttttaattaattaattaatttatttattttatttttatttattattattagactttaagttttagggtacatgtgcacaatgtgcaggttagttacatatatatacatgtgccatgctggtgcgctgcacccactaactcatcctctagcattaggtatatctcccaatgctatccctcccgcctccccactagctgtcttcttttaagtcagacattaaagagatttgcaaattgtaaaataatgccactctctctatctttggggggatgtttgaaaatgtagttatattttattaaaatgtgtatactaacatgtaatggaattgttattgtttttaataaatgataaatatttttaaatgtctccatttaaatttctaatttgacaaatatcagtagaatccattcaaaggggtacttggaccaaaaaattttacaatttctaggttatttttttcttacattctttcaaaagcccagtgctttaaattttaatgaccacagggagaaggaactgacacatatttgtgtatgttataatcagaaaaaaatatgtacagttaggtgatacaggtgacagaattgtcatttttttgaaactttctttttgtttctgattatttctgctgtgcagtgtactttttcagccagtttttgttataagcctgttctcataaaaataaggtcaggaagtgacaccaaaacaactcagaagcctgtggtggtttctaactttagagctgcctgttacagatagcttcatgctaaacctttgcttgatttgagcagaacaaggcagtcacgatacttctgaacaagtgatcagtgctgtgagcactaaaagctgaacctcaaaaacagctcaagatccatggacagagcctcaggagacacatttctatggcactcgcttactgactagcattctccttttctaatcaaggttcttgaaaaacagaggctgactcgtttgttaatttttttcaagctttattgttttttccttgaaattatagtgatgtggtattctctctatggaactgaggtttgggtaaaacaagaatgatttaattttttgatagaaaagttaattgctccagtgtctgttttcattatacttccattttatttccagcaaccccttatctctctgctctctttgtttcaaatgaacaagacagtagagtttgttttccaggccacttgtgttggtaacccttttcctaagctttccctaataacaccctgtgtcagtggacaggtagtaggtaggaagacctgcttcttcccttctaccgtgaaactcgtcttcagcatcattctttcatcctgatggctgagagttgtgttctggtctcaagtcagcagtggataacccactgcatgaagttgatggggagtgtggggcatggacaacagtggcctgaggttgcagatacattctttgtatatgtaagagaccaccttatattttgtaagtggaaacttagttctcataggattttggagaaaatcagttgcctcctctaggaattttcatttgtttacaaaatgtcctgggtcaagcaatacttttatgttatccccacttaggtttagtggatccatccatccatccatccacccacccacccacccacagagtatttatgtagaaaactatgtaatggatgtatatattcatgcatgtgtgtatgcatgtacttagtaatgacactggtttgttctcacagaactcaaaatttggtgtgtatgtggagacataaacaattagaaaggttaacataatatgtacctccacaggtggtacatgctatggagaaaataaaacagagtaagaggacagagatgggtcctatgtgtatgctgttttgttcaaatcagatggtcagggaaggcccctctgatgaggtatcatttgagccagaggtctgaagaaagggagggagtggaccttgagtctgtctattgggatggggaacaggaagtgcaaatactgtaagggttgcagcagggagaggagtgtagctgggccttgaggtcaggggaggtgcccacatggttgttggcacaactttggtgccctgctaatgtcactttcctcttcaagaatacccttgtcacttaagtgatgttcacttatgcttgctgctggcttaccatttggctcactgagcacgtcttttcccctttggttaggggcttgaagagcacagcatcacatctatttatgacttgatgtattttgctaatgcggaaaccattccaaattcatgataacaactttctccagttctgtgaattccctcatggtttctttttgttctaagccaaattaggagccaatccccagcttaataagcattaaaagttcaaattgactgtctggaaatctataacaagtccatgcactcctaaatataattagctgtaattcagttctagttatggattattaagaaattactcttatttgagcacctcactcatcaaaaataaagtcagaaaatttaggcgcagctggaatcttctgctcttttttttttttttgagacggagtctcactcttgtcgcccaggctggagtgcagtggcgcaatctcagctcactgcaacctccacctcccgggttcaagcgattctgctgcctcagcctcctgagtagctgggattacaggtgcgcagcaccacgcccagctaatttttgtatttttagtagagatggggcttcaccatgttggccaggctggtctcgaactcctgatctcaggtgatcggcaccccttggcctcccagagtgctgggattataggtgagcgccaccatgcctggccaaatcttctattcttgaacttgtggtgaactatcatttgttgaggagttttaataagtgttagtgatagatctctactaaataactggagaggtaagtaggttggagctcagtcttggtaccttatagggacttagtatatagcttttggaaagttaattcttactgaattttgatgatacttcttgtttcatgtaaatgtggatgcttccgttatgtgagtcctaagatttgggatttaccaagtactgagaataggaccttcaaaaaatatgaaatgccaagaggatctgttttaaagcaatggaattatttgagaattttgaaaaatacagattctcaggacccagtctgaatgagaatctctggggaagaggccaaggaaacagaattcaggtaagcaccttggctgcttccagtggttggccaatttggatatccctgttgtgtcctaaattatacctaatttgattaaagttttggtggctgggaggtttgctagttgaaaaacacatacaggaaaaaaaaaatgtacaggggagtgtattgctttggtgtagtcgtttaagagttgacaaaaaccccaaatgtattcttttaagaaccttttaaaatgctgcgacaagggtcaggttacagtttttgcgttgttaggggggcacatgagactcagcagctacaggccttgttaatgtctgcaaacactcagtgctaatgtggagactcaagccaggcttgaaagtgataaaatcaggatgggaatgttggctttgctgcccatcaactgttagactggagacaagttacaggcatttccttttttgtggggtaactgagaccaggaaaagacaattgaaagtggttccagttaaaatgggagccacagttttttcgtagtatatatctttaaaaaggtttgattaatactgttcttaaaatgacaacaacaattgtgaaaggaaatttcattcatcttatatttatcagtgtttgggttccagtggcacctgtgtgctaattcttagaaccaagaatggatcacataactcagtaggtatttctctgactgatttgaaagcatgataacagcttccacttcacgctgactttctcagcattgtgccgagcagagttatttttgcaaaaaggtttgaagatttcatcagtttttccagtagacaggcatggctccaccagtgttggtctcctctttgttggtgatgaactcgacatccgagatttactctgtcaggggtttgctgtgattggagtagtgtattagtcaatttcatgacttcccgcatccactacaagatctcactttttgatccggggctgatttttgtggcacagtttgtattatgggatgtatctgctactcagaaagggagaacaacagccatttacatggtgggcaggaatagggtagttttaagcaaggaggggtgttagagtagggactgatttaaaagtggtcattctgttcatcagagactattctcatgctctgaccatttagtttatctaaatcttaggattatagggattttaataattaatactcagatgatgagttcaggtgtctctgtaaaatgaataatgcatttattattaagtctaaataccctaccattctgaaggcgggactgcatgtctaataccaccatcttatctaatggttccttgggatccacccaggcacaggagaacataacaatgcttggaggggttctaacctaggacttcagaaagaattcatcgacaaagactgaagcttaactctaggagggaactgtattgatttccttaaacatactaaggaatggcaattcagtaggactctgctgtccccttccagcccctcctcagtgaggacctggtggggacactcagccagagtgtgaaaggaacagcttcagggccctgctcaaatgtgtctgggagctgtcactttttccatgcctctttctcgggtgttggacgtcctcatttgagacttttaattcctacattcttggtctttgcctctctgaatgcttgaaggtcacacttaggtacagcctttatagaaccttttgtctgatatgcagaatattgactgcatgctggctgtgtctgtctgtctgtgcctctgtctttctctagccagggattacagactgcccatgggctgaaatcagcctgcagaccagttttgctttgtatgcagcatggaataatgcttttgaggttttccaacttgagctcttcagacagggcagggttctccagtgtcccacatcccctgttgtctgaatttcctctgaattcacacctctatgcctccttctctggcctcagtttgcaatcctgaatctgagcatttgtcccatgtgtttactgggcagtgtgcagtggccttgggggagactttgaaacatgttttagtgagaaggatcacttctttactggagtcaaaactgaaaatactttcccttcgtggaataccatacaggcgtctctcttgcactgttcagcatcccatcctactcagtggcattcccactctaggttttgggtagtacagagtctcactgctttggggagcttttgggggcatggtggagagagaaatctcttcattttttcaatttgtttggatcagaagattagcctgctttcaggtaataggtctacttttagtgatgcctacagttccctgaatgccccccaaaagttaatttctggtgtcactgttaatccttacagtcaaaatttcctgggaattgctattggggatctgtagctgtgctggagataggggcatgggtaggggaggaccatcagttttggatcagatggacttggttctgctgcctgtccttccttgctgcgtgaccttaagcaatggttgccttatgtgtaaaacaaggggctaatgatacctaaacccagggttgctgcaaaggttacatgagcttatgcacacaagcacacacccacaaagtgtagcattaggatctgatgcagactatgttcccacccacttgggaaggaaatccgtgccccatttacttccatgtacttggtggtgaatcatctaaaagatactggaaaaatgtgattacagatgccccctttctcggccattgcttcaaatcctagacagctattgaacgtcaccggatagacgtcatattctaggagggtgtcaagtacatacaggtctgtgtttctatgtgctttttgtaggagctatcaactataaagctgtgggtatgagaatttcagggcaaggtcgggaaggtgtaggagggattcactaactctggggaaagtgtgtgctgctttgtcagtttcctgttcgctaggccacagggaatatgttggctctttctgaatctgcccaccagagccaatgtcataccttttcccaagccactgcttgagggtccagctaattgatgccaccgcattgcctctcctggtgaggaccgactgtgccatgggggtggtggctgtgggcgtagacagccctgttcatgggcatgcacactgccatgggtgctccatgggaatgctggtagatagcagaacatggatcaggagttctactctccaggatagcatgacccagccatgggctcaaggaattgctctttgggatatgtttgaaactcatcccctactctggccgattctttcagtacagatacagaaatgcaatgagaaccttctccctgtagttctgttaagataaatgagtggtagtggctcatacctgtaatcctaatactctgggaggctgaagcaggaggattgcttgagcccaggagttcaagaccagctgggcaacatagtgagatgccaggcatctccaccaaaaaaagaaaaaaaaatccaggcatggtggtgtgcacctgtattcccagttacttgggaggcaagaagattgcctgaacccagaggtttgaggctgcagtgagccatgattgtgccactgtgctccaacctgagtaacatgagtgacacagtgagaccctgtctcaaaaaaaaaaaaaaaaaaaaaaaagagttaatgtttataaggtgtttctaggtcccaggaaaaagaaatgttttaaaagtagattgtatatgctacttgttattaatttcttatctctagagattgaatggtaaaagccagggccagcattgtacattgtcaggcagcattgcccctgtcgtctgccttttcctcctgttactaggagcttgttaggtttggtcaccagcctgatgacctgatcaaatgttgcctgtcaacttggagtgactgtggttgtttattttgttatttattcaccaataaattgagttggttcactctgtgtatttttacagcatttggccttttcccaaatatttgccttagtttattaaattagcttctcagttataagttaaagtgtgtgttgacttttatgattttaattttacaggcttggttggctttgaatgaccagatggcatctcttgagtctgtgagcaggttttgtttcacttaggacttcacccccaccccgttcttaaaaatggtgatatgttaaatccactttaaatctagtatttgattattaattaaaatatctcttatgcattttgaaggtaaaattacaattttgttccatgtgaaatgggagcatgtgttgacaaaccgttgattaacttgagtggatttgggttaatctttttactctgctccatgctgcctgcctgtagggtaatataaatccgttgggctgttgctaggctcagctgcttctgagtagtttgacaggtttcatcctgttaaaggctctttttctctaggccctagattctaggggtattggggtgatgctggtgaatggagtctaactgcgtatttgcttcttgcttccagcaccaattgtggccaatggagtgaggcaaagagcactggtgtggctaaattactccttctgcagtccccagcatattattggatgctctttttccctctcccagagctttccttatcttctaatttcaaagataagcgttacctgtaggcaatgcacccgacctctatccctgttgtggtagctacacataaacatagccatcatggccaggtcccttgggtggtcacatttcctactgttctgatcaccttccactatcaacactgaccagtgtgcctggctaattccaaaccgtgcgaatggctgtgttgcctgggctcatgaagcctgtcaggaagagctgtggacagatgatttttgaaaatgagggtgattgcaaagggacagaaagtatgagacatcgtggatgctgtcttttccttaggccttcagtcatttgaagtcaggacttccaagcctggatatccagtgggcttctggggaaagtggatcagagctcagcaaggattgagccccagcgacttccaacaaaccatcccatccaacagaggctgtcttcactatgcagacctttgagccacctcagaagacaccagccttcatgctcatcctttacacgtctctttggttcatgtaccagtcccttgtcctcctcggtgaccaagataggaatggtgtcaacggatgattatggcatgacatagagtaactctttgcataaaagagtggacagggcaggcacttaacacttgaggacccctgttccagtcagccacagatgtatttattaggccttaaactgatgggatggttcttggatttttcagtttaaaacctatagggggactttacttttggccaaatgctgaaacaagtattggatttatcttcccatgtgaaaaacaaaatatggacaaaataaatgaaacaatgatttgtaagacactggatacatcagacaacaaaggccaatgattcctgagagataggaaacaaatgaggtgagacctctgagttttttcaaactgccttaaaagagtttccaagctatagcacaggaaaagggaaccatgtggagcccagcagactccctcagttgaggattggatctgagagtccagagagactaaggccactagagatcatgggatacagtactagagaagagacagctgcaccaagacataactctggaggtgtacaaagttctgagaactgatcagtgtaaagaagctgcctgagtctggggaaagcaccattcaaaaggagcaaagataactgtttctggtgctcacacggggccagaaatagtgcttctgccaccaaccagactggaaaacttcaagagtcatggagcattgggtagagtagagtacatagaagggccttgcttgcttagtggggaataactaacccaactgagcatggctttaaatctaaaaagcaagatctgatagggccgaactatttctgagtaacttagctgtgtcccagatcaaagctgattttatagaaatacaaaactatcactcaataggcaaaaaccagtgtctggcatccaaccaaaaattaccagatgtacaaagaagcaagaaagtacaacccataatgggagcaaatcaaccaatcaaaactgacccagaattaacgcagatgttacaattagcagataaggacattaaaatggttattataactatattccatatgttaagcagaaacatacttgtctttaaaaagacaagtagaaaagtgaaaatggagaaaataaacaaaaagaccccagttggatttgaaacatgggttgcttttctatgactccatccttatgttacttcaaccgaacccatatgacctgaacctggcccctgctaatttatctgaaccataagctcctacttatcttctcagtgctctctctagcccagactgtggggtcatccctgcagtgctaactcagtgatgcccaggggtcacttgaccctttaatcttccttcatgcctgctgtgccaatgcctgacctgagcaatcatctcacagatgattggatgttgctggctggacccatggcatataaatttttggcattaagcagatacttagcaaaaacggaagcattcttcttgtgttggtttctcagcaattctaaaacttttacacctgaaagccccttcccactttttttcccactcatgttctctttctcttactctgctgaaaaaatcctgcaagatctgccatctttatgtgcctgctgtccctcagtgtggccatctcttttcttcctttctgctggctgccagggaacctctcttcctacagaagctacaccttttcctgggtggatccatcctctctggcctcttaacacattctcacatgttcatttacctggactgaccacactttgtttagtcccttgctctcctttggctgcttctcctgtggtgatttaaacagaaaaaaaaaattcttcacctgatcatagtatcctcagctaccatcctatttctttcccccctttgcagccaactatcttgacaaacgttttgtatctgcgtctcaccaccaactttctactcagctcctgcttcgctcttgcccagacactttctaattacaaagtgtacctctcctttctctgcaatctttcgtgtgaccgtgatgctgcatttggttctgtttcatgttctccctttgggcacctcaaacgactgcaaacccttggcctctattctgagtggtggtccccagcaccccagctccttttctcccattcccttcagtgatgacaaccttcatcatttctttttaagcgccccccccccccccgcccatgtaccctgtgcctatattctaagcaagtggcttagatcctacttaatctggaaaattgcatcaggtgtgagtgacttccctcaactacactgactttatctgcattcccacccatcctgagtccttagcctctgttccagaggatagttgtcattgcttttgctaaagacctgtgcttcctcacgaactttgcttccctttctttaacttctccatttccttctctcattttctttctctgatctgtaaacatggccaggcctcctcctcctaaaaatctccttgggtactttctaatttgtctcctttttttcatccggatatgttgagagtacagcctacatactaattcttcacttcattgccttctattttctcttccagctgctacttaagctctctggcttccctcaccactattctgctcaagtagcgcttgataaggtcactgagggcatctatattgccaaatccagtaagcagtttccaggccccatcttattggacatctctgttgtgtttggcagtgctcatcactcttccacctcagagcccacactttttgacttctgcaactctgaagtctggatcatcccattcttcccttctcttcctttctcgtatctttgggcttctctaccaccctctgcagtttgtatccttgggggatccatcttcagcccgccgctgtccccattcacatctctggtcatctgtttcagtctgggatttcactctgcctgttgctctccactcctccgtctatatctgcagcccaggtctctcccctgagttccagcttcctgtgtccagtcgtgtgctgggcactctcaatgggcttcatttaatcttttttttttttttttgaaatggagtctcactctgtcacccaggctggagtgtagtggtgtgaccttggctcactacatcctccgcctcccaggttcaagctactcttctgtctcagcctccctggtagctgggattacaggtgcccaccctcatgcccagctaatttttgtatttttgatagagtcgaggtttcaccagattggtcaggctggtcttaaactcctgaccccaagtgatctgcctgcctcagtctcccaaagtgctaggattacaggcatgagccactgtgcccggcatgggcttcatttattcttttttttttttttttgagatggagtctcactctgttgcccaggctgcactggctaagttttttgtatatttagtagagacggggtttcatcatgctggctgggctggtcttgaactcctaacctcgtgatccgcctgcctcagcctcccaaagtgctgggattacaggcatgagccactgtgcctggcccatttaatctttcagttagcaaacatgcatcttctgtccccacactcttgaatatgaaatgttgaatataatgaataaaagcattccccctctgccaagcaccatactatcctgattctgtttctatccctttgtccttcctctgtttccttcctgggctcttgtgttcttcactatcttagaagtgggcgcccattctcatagggcctttcatctgcagggacactctcagtggttaccttcaggccccatttttcctgtgagccctggttctgtgctgtctttcaaactcctctggctcagaccccagttgtcattttcctcccatatcagcactgtcttcactccatttctgtcattgccttcttctgaacactgaagcttgaacacacacattttccccacctacacattttgtctttcctactaacttaaaagtaatttgaagtgtgtgttctattgtgtacctgtgcacctctccctccccaacatggtgatatgtgagggtataaagtgaggcaaagaaaaggcaaaaagatgaagttcctgtcatttcccattttaacaagagttgcagagggtccccctaccccccatctcccacagcaactttgacattaagtgatcacttcaggggtggtatttgtggaagaggtttcacccacacttccatttccttaggagagctgaggaagggggttagccattgaaggatgaagatatgtaatcaatttaatgaggactgtcatttggggattttacaggaatttttgactgcatttactttaggctacactatgtggaatcttcctttccctttgggtagtggatcccttaatgccatatttgtctggttccatatctttcctgtcaccttcagttttttaaaaaaattgtgataaaatgcacataaaaatctaccttctgaaccatttgtaagtgtatagtccagtggtattaggtacactcacattattgtaaaaccatcaccaccatccatctccagaattcttttcatattgcaaaactgaaattctatacccattgaatactaattctccattccctctccctccagcccttagcaaacaccattctgctttctgtctctatagatttgactactctaagtacctcctataagtggaatcatacagtctttatccttttgtgattggcttgttttgctttgcataatgtcttcagggttcacccgtgtggtagcatgtgtcaaaattcccctcccttgcctcttttttcttttcttttcttttcttttttttttttttttttgagacggggtgtcactgtcaccctggttggtgcagtggcatgatcttggctcactgcagcctctgccccgcccccgggctcaagccatcctcccacccagcttcctgagtagctgggactacaggtgtgcaccaccaagcccagctaatttttgtattttttgtagagacaggattttgctatttgcccaggctagtcttgaactcctgggctcaagtgatccactggcctctgcctcccaaagtgctggcattacaggtgtaagccaccatgcccagtcaatttcctccctttttaaggctgaataatatcccattgttagtatagatcacatgttgtttgtttattcttccatcagtgggtgcttgggttattcactttcagttttaaaacaatctcttgttagtatttaatattggattttgtttatgttgaaaactttggtctcaaactcagttgagatctccttggcatatatctcccagcttggctcagctgctgggcgtgaagaagatgatgaggccttgtcctgagatacaacaccccctaacctcttcccagctctccctcctctctctttcctctccccacccctgcttctctctcctgtccctttccccctcccccaagagtgatagtaagtaaactcacattgtggcaacacccgttggagtctcctgcccttagctttctgttggggagagaatagtctgccacctgaaacactgcatgccctctaaggccaacacccctttcctttctcagactcattctgactttgaggaagtagtccagaatagtggaagggcttagcggtcctgtctccaggaagcccttatgggaggaggctctcagaacttaaattgtggggtactttgtgcctttgtcctcacgtgaaattctgggacaacaggaaaattgccacccaacattgttttaacacttaaaaattagaggggacctagactgatatgatatttataagggctgtacataggagccctgaaattctgtcttctctctccatccctttttcagtatccttcatacttgaagaggaggggttggggtccagtatagaatgggattttaaagtccctttattaatcattatttccagaggcgagactgctccttaaggatagacgtctttgaaagggcttccttcctgttgtctggacccaattgctttaccacatagaaccgtcattactttccctctttttggcagtcttttttgagctctcattgttggtctaactgaaagcacctgatttctagggctttaactgaaagcacctgatttctagggctgtcagtgcagcacagcagaggctgctcttcaaatggtctggcttagtggtttctaacccttttgattaagaagaccactgctaaatttcccagagcctcacctaagtgttgtactttgtgtctcttttgactaatcatatacttaatgacaaaaatttggtaaattagtgaagcctttaattgggcatatttttaatttatgaaagtatatcggcacttgtgcatatgttaggcttatttttcattcggagacagtgcttggtgcattgtagatttatggttccttataaggagtcctccttctgtctttgaagtcttagacacacagcttgggaatggtcctaatagactgtttcctttaaaaaaagaaagaaagaagagcctgtagtgtgattgaatctctatctgacaaggcttaacagtctaaatgaaaacatctaggttgaaagtgtgtttgtgtttgcagtacatttgtgtatgagggtttttgtggatgttttcaaggactgatgaggaagccacacacgggttatttctctgctgaaagggtagaggccaggtcatctgacctactgattaaacttgaaaagggagagtgtgtcttttgccatctcaaaggccagctgtttattgaatttctccaccctgcaattgtcttacatacggaatagttcctggagaaagatctaacatctgcgcaggtctatcctgttctgtggctgtgtttactaaagtgagttctgcgcttacattcacacactgcaaactgcacgtacgatgtaagtgtacttgtcatgtagagttttaccaaaactatattagattatactctgaagcatgttttgcatctgacaggtcgagctcattcattcagtattaagtccctcatgggccaggctctagcctgtgtcctggtgataaggaggtgaatgtgacagaattcctattttcaataaactcactgtctggagaggaaggtgatcatcaaaataaattttagcacgatgtgtaatgattaatgcacagaggatctttggaatctccaggaagaaggcctgacaacctctggatgaaggatgggatggaagataaagtggacttagagagatgtatcgtgtggctctgtctttatccctggaaaggttagcctaagcatggggtaggtgctggtttcttttgctgagaaatgtctcagagaacctcagagtagcaggaggcctttgtgatagattggccagcagtttttatttccctgacctttcagcatcaaaaagtgccagttggaccctgggttttgccttggaattagtaaatagatagttcaacagcaatggttgaaaagcctcttggagtctgtcccatgagagtaaggatgttaattctgaagcctgggccattttccatcctgggaattatactctgccccttcctaaattcccattgtggtttcaaatgaagaggccattgttcactttccttcctaaaagaagcaatatatttaacttctggctctttgcctgactgatggcgagttgatctctctgaagccaacacccgtggcttcctatcaagagaaacactctgcctccatctgatttccttcttgggttgaagttatttagatcctacactggctcagtaggaggcttgcctgccgttatgtcctactaggtggtgacagggcccttgattccctccctgtgtttaatagaaataaagacagagtcttagcgctttagggcagctagttattctcccaaagacctattataggaatttaaaagcaaatgtctgatgtgaaaatctatgctattttagggactttgaagcacaacacaaaagagtatcactttgttgaatagtttgggtccaggcaggtgtcctagagcagaagttttcatttatttttaagcaacaaaattctttctttcccaaatgaaatctcctacagaatccaaatactgaagggtttctcaaccccagcatgcttggtattttgggccagataattcttgttgtagaagctgttgtgtgtgttggaagatgcttagcagcattcctggcttctaccctccagatgacataagtggcacccacattctctagttgtgacaacaaaaatgtctccagacattgcaaaatgtccactggggagcacgatcacctccagttgagaatcaatgcaatataatctagaaaacagacttttaattaagctcctcctttagaactctgcccagggtccctgactgttagtgtttgagacctggtggggcgttctgggctacacagatgcactgtcctagagggttaagttgtcattttaaaaacctggggcatagagaacttgttataaacaaagcaaaagagctaaaattagacaaatccacaagtactttgaacccacatgtacactaaatatttctgtctatgtattatgtatacattgtgtacttggatgtgtagcataagggaagagtcgaagggtggtgtctgccttactccttatgtgttgaggtttggctaccacaatttgccctgttttgccagagatgccagttgaaggcctgtgactgacagcccagtgatagagtcaccctcactgcacaaaatactcagcttctgtgggactcagtggccctggccctgctcatgggcattccgtggtgagtgggccagcacctgcagcctctttcaaccagactggttggttggagcttggaccatggttattccaaggtggatttttatccttctgccctttgtactaaatgggtcatgtgtgcctctgtacgtgtatgtgtgcgtgtatgtgtgtgactacacgtgtctgtgtctgctcttctcctttcagaagcccagagccactctgggcctggccactctgagcattggttgtgtgggggatgctgggagcttggcacatgctactcctcctttttcctcccttagaatgatgaaagtgttgttggagcctgtcccacagacagaaactgtacctcatttatgtgggcatcagtataaacaagaacaataccactatgtgagtcaccctcacctgcggggagacgcataggctcagggagggaatttgctgccagagggtctcagcttcagtctgtctccccggcagactcatcctaacttcattccacagctcaagtgcagtgtgaatcagcaggcagcctgtgcctagctaaaggactctctctgtgttttgtttgtttggttgcttgtgaagatctctgggcacatacagcagtgttttattttcccaaaagatcgcatgaccactacagttagccttgggaacagattgagtaagcacaattcatttgatctatctgcagatctccagcccttctaagaagctcacttccaaaaatgtttcaggagtcctgtagaagtttgcttagagttccttaaagaggctaagcgtcagttgcaatatctctctatcaaccccatttcccccagtgccactgccatgggctggaggagtgggtaacttgcttaggaacttgggtaagggacctgaagctccccacccactctggccctagataggctaaagatttgaaattagtttgatttatgtaaatctctggtgtgaattattgctatcagataaatacacagaccattgaactgaaaacagagcctcaacacaggttgccattgctaatgttagtttatagtagccattatctagtagtgcctttatcagtgaccccaggtgtataattggtttgttgtgaaagaggagtggagttcccaggatgctttttgtcccccatggttcccttataagtgactgtatttcctgagctctctgcacttttgtcaccttttgtcatcaatatatacaatcagtttcaggcaatattgatagggatgtgaaaactaaacactataagattgaatggacttaatagctaggagttgcagaaaatattcctacatgtatacataacttttataatgtacaaattgttcttatgtgcatactcttgcataatcatcacaagtcagccttgtgacttaggctctctcttggccttatcttgagagaatttatgaaatctgataatattgcagccccgtaggaaaacttttcagtgccttgctatgatctctgaaggcctatactcctccttcccttcctaggctggtattgacctgctttttaaatctcatctcctaccagaccttcatattcattgtagttctagcagtagtgtactacttgtaggtacctgaatgtggcaagctcttttctacttcttactaatttatggaaacaccaatctacccattcattctttcactgctacttgtatgctaggcattggtgatatcccctaaccccctggtccttggtctaagcaggcataggtggtgctgtgtggtaagagctttggtcttggtgctaggggagctgtaaggagggcaccaagccttgacttgaagggattagggaggcttctccagtaaggcatctccaaagtaagtcattttagtgtgaggtggatgggagagttaggagaggagaggaagaaagagattagggcaggtgtggaccccaggctagacagggatggatgagtgataaggtcttgatagtgggtagtgccagatgcaggtgtatagttttgaggactttgccctaaggcctgaaggcagccattcaatgtttttgttttttgtttttttgagacagggtcttactctgtcacccaggctggagtacagtggcgcaacaatggatcactgcaacctcgaactcctgggctcaagtgatcttcccacctcagcctcatgagtagctggggctataggcatgtactaccatgcccagctaaatattttgtttttctgtagagacagggtctctctatgttgcccaggctggcctcaaactcctggcctcaagcgatcctcccctcctgccatggccttacaaagtgctgggattataggcgtgagccacagtgcctggccaattaaatgctttttaagtaggagcatagcagggtgcagattgctgcaaagcacctttctagaatatatcctgttcccctcattctccctctagtactttctagtatataccccgttcccctcatcctccctctagtactctgctgcttaggctttaggttcaattcaggcatcactgtctctgtatgtgctccagattccccgggcaccatcgggggtccctctgccccacagcaccctggacatgcatactggagataaagcagcaattgcttttgtattttaaccgtctagttgtgtgtccttcctcctagaccactggttttcaggatttaaaagtgtagattcttgttgcccaccccagatattcttacttactgtgggatagagtctaggcatccccattttttttaaaagaagcagaaacattgcagtaggctaatcttattgagggcctggtttatacattatgtgtgtgcacacacgtatgcacacacccccacatacttgatctcattcatgcttatatctgtatttcttttatttttattttctttgatcctgtcattcaaatatccatatttcttaagaatgtccggtataaatttgctatgctacaaatgtttgattgaatgaatgaatgaagttgcccaaatttacgtgtgaagatgtgttggagcctaagttaaaattcataggtgattccgaggcaaggccctttcacagcatcactcttacaccacagttgctacactgagatggcctttgaaaagcaggcagtcccactgaaccacagtatcctagagactaagaaacggggacaagagatctttaacttgcattttataattttcagtggcacatcaataatctgcagggatacactaataagatgggtattggacactcattacgacagaccctggaggatccaaaactgtaaaatctagctctgatctcctacaaatttttggtctacttgagggtaaaaggcagaaatacacagacagttgaatgattgtgccagatcgtgacagttacctggagtaccgtgcacagaagggcaatagaatgatgcagtgactgagtaagaaagagcatgccattagctggagtggtctgcagatacctttggatgaggaagcacttttatgaggtttggctttagaaaagtgagaagccattccaagtgggaggagtgacatgagtggaatcctggcaggagatgggctatgaatggtgagggcatcagtttgacaggaacataggtttgtttgtgtaggggagtgatggttgacacctaaagggagtgctggttcaggattgggagggccttaaatgataggtggggctataatacagttggggatgtgtggcacattcagcaatgtaaaagtctgttgtcctcgaccccagatccattcaccttattaatgaaggtcatgaatttttaaatataataactgatatggataggttttgtgtcctcacccaaatctcatcttgaatcataatccccaggtgttgagggagagacctggtgggaggtgattggatcatgggagcagtttgctctttgctgttcttgtgatagtgagggaattctcacgagaactgatggttttataaggggctcttcccccttcacttctcccacatactctctttctcacctgctgtcatgtaagacatatctgcttccccttatgccatgattataagtttcctgaggcctccctagccatgtggaactatgagtcaattaaacctcttttctttataaattacccagtttcagtatgtctttatagcagtgtgagaatggactaatatagtaaattggtactgatagagtggggtactgctataaagatacccaaaaatatggaagcaactttggagctggataacaggcagaggttggaacagtttggagggctcagaagaatataggaagatgtggaaaagtttggaacttcctagagacttattgaatggctttgaccaaaatgctgatagcgacatggacaatggagtccagggagaagtagcttcagatggagatgaggaacttcttgggaattggagtaaaggtgactcttgctatgctttagcaaagagactgacagcattttgcccacaccctagagatctgtggaactttgaacttgagagagatgatctgaaattggaacttatttaaaagggaagcagagtatagaagtttggaaaatttgcagtctgacaatgcagtagaaaagaaaaacccattttctggggagaaattaaagctggctgcagaaatttgcgtaagtaacaaggagccaaatgttaatcaccaagacaatggggaaaatgttcctagggcatgtgaaggacttttgcagcagcccctcccattacaggccccgaggcctagaagggaaaagtggtttcatggactgggcccaggaccctgctgctctgtgcagcctaggacttagtaccctgcttcccagccactccagtcatggctaaaatgggcaaatttttaaaaagtcagctcaggctgtttgcttcagagggtgcaagccccaatccttggtggcttccatgtggtgttgggcctgcaggtatacaaaagtcaagaattgaggtttgggagcctcagctgagatttcagaggatgtatggaaatacctggatgtccagtcagaagtctgctgcaggggcaaagccctcatagagaacctctgctagggcagtgcaaagggaaagtgaggggttggagcccccacacagagaccccaccgtggcactgcttagttcagctgtgagaaaagggccaccatcctccagaccccagcagatggtaaatccatctgcttgcactgggcacctgaaaaagccacaagcactcaacaccagcctatgaaagcagccaggagggggatataccctgcagagccacagtggtagagctgcccaaggctatgggagcccaccccttgtatccacatgacctagatgtgagacatggagtcaaaggagatcattttggagctttaagatttaataactgccccactggatttttgacttgcatcaacctgtagcccctttgttttggccaatttatcccatttggaatgggtgttcttatccagtgcctgtaccaccattgtatcttggaaggaactaacttgattttgattttacaggcttataggcagaagggacttgccttgtctcagatgagactttggactgtggacttttgagttaatgctgaaatgagttaagactttggtgaactgttgggaagccatgattggttttgaaatgtgaaaagatatgagatttgggaagggccagggctggaatgatgtggttaggctttgtgtccccacctaaacctcatcttgaattctaatccccaagtattgactagagacctggtgggaggtgattagatcatggggggtggtttcgtccatgctgttcttgtgatattgagtgagttctcatgagatctgttggttttataaggggctcttctcccttcacttctcccacacactctctgtctcacctgctgccatgtaagacatgcctgcttccccttctgccatgattgtaagtttcttgaggcctttccagccatgtgtaactgtgagtcaattaaacttcttttctttataaattacccagtctcaggtatgtctttacagcagtgtgagaacagactaatacaataaccatgttctcttctttctggagatctccagccacatttgacttccaggtctgtgggaagcagtccaaggtgcaacctggaacactttcatttggcttcttcatgtagaggaacatttacatgtcgctgcttgttccttctacccatggcctacacacactgccaagctgtcaccttccctgttgtgcaatgtgtttgccatcaccttcaatgaaaacaatttttttaatgtcagaattttcttagttattaatcccaaacacagacaccagaaacatgatccagaataaagttttcagttcacactgagcttgtcattgctgaagtaagactcttagctctttcaccagtatggacaaaattcagtaggaatgttttcatcacaagtcttacttcttaataatgctttgatctagggtaatttctctttagtcttggatggtaattttgcctgaggaaagtccaagaggtcttatgtgaagatttctgttttgtttagagtttgccacaaatactggaaggagaaagttttctgtaatttatacagctttacattagaaggctatagcttattttaaaatggtttctgttcaaaaaattttcacctacaattatagtataaagtgccttgtccttgtattcacagaggaattttctcatacaactacaagaaaatgtggaaagtttcgtctgagaaaattcaactttttcatctctcataatttactgcttcaggaatgcaatttaccaaagtggattagaaactgtttgtaatggggaaatacgtgcactctttgaaggcagttgtcgacaaagagtcaaactctaaaatatttgaagaggtttattctgagccaaatatgagtgaccacagcccaaggcacagtctcaagagatcctgagaacatgtgcccagggtggttgggttacagcttgattttatacatttcagagggacataagacatcaatcagtacatgtgaggtatacattggtttggtctggaaaggcaggacaacttgaagcaaggggtggggagttgtatgggggagggtgcttataggttacaggtggattcaaagatctgcttattggcagttagttgaaaggataaattagttattatctaaggacttagaatcaatagaaaggagtgtctgggttaagctaaggggttgtggaggctgagattcttattatgtagatgaagtctcataggtgtcagcccttagagacaatagatggcaaatgtttcctatatagacctaggaaaagtgctagactcaacagttaatctctttaggattgggaggacctggaagaggaaagatctagttatgttaaagagattctttacggatgcaaattttcctccacaaaaagatgctttgcagggtcatttcaaaatatggcagagaaacatattttgggataaaatattttgattttcttctttggttgttttgtttgtttgtttttgagacagggtctcactctgtctcccaggctggagtgcagtggcgtgacaatggctcattgcagcttcaaccttctgggcttaagtaatccttctgcctcagctgcccaagtagctgggactacaggcatgcaccaccatgcccagctaatttttgtatttttgtagagacagggtttcatcatgttacccaggccggtctcaaactcctgggctcaagtgatccacctgcctcagcctcctggagtgctgcaattacaggcatgagccacttcacccagctgttacctttatctatcatgtgatgctagctgagtgtggtggctcacacctataatcctagcactttgggagactgaggcaagtggatcgtttaagaccaggaatttgagaccaacctgggcaacatggtgaaacctcatctccacaaatatatatatatagatagatagatagatagatagatagatagatacacacacacacacacacacatatatatatacacacatatatatatatatatatatgtctctcacacgatgctataccagagtcaggttgagttggtatttttgtagagacagggtttcaccatgttacccagactggtctcaaactcctgggatcaagcagtctacctgcctcaccctccgaaagtgctgggattataggtgctctgcactctagcctttgtaacaataagggtctattctgtcggtttcaggtctctattttagtgttaatgctggtcagttgagtctaaactccaaaagggagaggatataatgaggcatgtctgactccctctttgcgtcatggctttcactagtttttcaggggttttttttaatccccttggttgagaaggggtccattcagtcagtagggggagcttaaaattttatttttggtttacaaagtgaagagctttcctcttttaagtcctcaccatataaccagtctctaccagatgctgagaatagcttaaactttcttactgtcttatttgagcctggggtggtttgttgtaggaccttatcaacatagattttttgataattgatctactttacttcgatgtctgagtaaagctttaacctggcccttaaacaccaaaaatgctttagtgggagctcttgttttgggaaaatgaaaaatttctgtgtctatcaatcacggaaagtattccccactggtttgattctgaaattcaatcattgcctatgaaagttaaaaacatttttttttccctgtagctagcttttactctgtctctttaaaatacctttttttggaggagaggtggagcaagatatgtgtaactatagttttttctttttttgcttagatggtttaaagaattctgcatgtcatagttgacattccatcattatcctgtgttccacagtcaaggccaaaggttaaaaataagttcttaaaggaaacaaaattaaagcaagagggaattacctctgaattgttttagggactcctagcattttgcatgagtttctgttggtctggagaatagaaggaagcatgaaaggtttcattccttgcaaatcaagtgaaactggctcctaccctcttcttcaatacaaacatgaaacagaaaaagtagactggaagaccagaaagggcacagatttttataccattttcatcaggattactatgttcatgttatggaaccaatttgtaagttttgggtaacagcttaaatagaaacctatagaactgaggcaaccttctgtttctcaaagacagatggtgaagcaacatttataaatgctttacagttagagagcatatgctctcgtccactgttttttgtctttgtgatcaaagaaggatttgaggaatttcttttaaaaatcagtctgtacaataactgagtacattactttcagataatggagaatagtcacacccattgttttcagggcctcagggaatcctagaatgtgtgtcttgtggactgtgtcatagttggctagttacagtggcagttactaaaatcaaatctgtttcaattaataaagaacttgacaatgaaactaacaagacccattctaaagacgccaggaaaataaaataaaaacccatatgtactaggaattgtaaatagagaggaagcagaaacaatgtaatttgaattatcttattaaaattttaaaatattaaaatttaactagtttctcttattcagctagagacggtataaaaacttggcagaagtgtgatttttgtctatctgctggccagaataatactatatagatgggattttgtaggttttagtctctctaccccgctgtcttccaatatgtatgcagaaaaagtaaacatgatccctaacctttctgaaaccttctttaccttcagtctacacatacatagtcttgggcaaagagttatcaggtaaattccatggaatcaagagtagaggcatatgttgcttttcttaataggaaaaacagtgactgtgtccccctaaataaagtcatgattcaatgaaaagacaaacagcccaattttaaaaaaatgagcaaaagatttgaacagacattttctcaaaagaaatatgaatgggcaatacacacatagaaacatgctcagcaattttaggctttagggatatgcaaattaagaccacaatgagataccactagaaaggctaaaatgaaaaagaccaacaacactaaatgttggtgagactgtggagcactagaacttttcatatttttagtgggagttcaaaatggtacaaccgctttgaaaaatggtctggcagtttcttacagaactaaacagaccactaccttgttacccagcagttcttaggtatttacccaagacaaatgaagcatatctctgtcaatagaaaagcagatgccagccatggtatgattttgaacagccagtggaataaaagaatagggactatatctgaccttgctgttagagtagttaggcagatatgagcggggcaggagaggcccccctcccccacaggaatgtcaggcaaccatcaggtgatggtcaggtggttgttaaactgtctcactaacatactagttggtcacagcttgcaccagggaaagcagactcccagtagatagaaaacaccttaagctcttaatcagcagcttcctttttttttttttgagatggagtcttgctctgttgcccaggctagaatgcggtgtcgtgatctcagctcactgcaatcgctgcctcccgggttcaagcgattctcctgcctcagcctcccgagtagctgggactacaggcgcgtgccaccacgcctggctaattttttatatttttagtagagatggggtttcgccatgttggccaggatggtctggatctcctgacctcgtgatccgcccgcctcggcctcccaaaatgctgggattacaggcgtgagccgcggcacccggccaatcagtagcttcctcataggatctcaggcgttggatgagtgggctcaaacttgcatgctaagagacaaaatggtggagtttagctggtgtatgaccttcctctaggaacactcaattggtaagggaaaaatgcctcaaatgaacatgtgcacagcttcagtaaacacactgtacatgcggcccttcccaagtgctggcaggccactgcacatgcggacagcccaccccaaggaaaaaccaagggaggagagacacaaacctcagcaccatgccattgtgtaaaaatcccaagtcaagcgtcggacagggtcctcggatctctcaaattgcccacttggccctcttccacgtgtactttgcttcctttcattcctgttctcaaactttttaatatactttaactcctgctctaaaacttgccttggtctcattctaccttatcctctctggccaaattctttcctccaaggaagcaagaatcgagttgctgcagacccatatggattcgctgctgctaatgttgccatttggatttttttttctttttagagtgttctagaatgcatgcttagagaagggaatgtaatcctaggacaccactcagctctgcaacagtatagctctgcagtaatgagtaaatgctgtttgttggtttactttaaagctctgctactgaatatatacaaatatactgttatattttcctggtaaaaccttttattatacaatcacttctttttatttctagcaattctttcttttacagtgtattttatctgacgttaatgtggctgcattgcatgtcttttggctagtatttgccctgctttgcatcttctttaattcatttactttctactttttctacctatgtcttaggtttgtgctttataaacaacaggtggttagatttcctatttctagaagtttattgagattctccctctaccactgtctctaccaattccattttttcccacctctattggtttggaagatagaatctctctctctttttttttttttttaagtgattatacttggaattttaacatgtctgtgtaactaagtctaaagttagctaccactttaccctcctactgagcaatctaaggatgttagaatgtttttaactccagtcactttcctcctggcttatgtgcatttccttgatatttttgatatctttttatttttcttttgaagctccattaactagatgttattagttattccatccttctttgtttctatttacttacatgtttataattttttaacataccactttcttgtatagctcaaaccttccctcgaacatttccctccttcttcaagtagattctcttcaagtacattctttatttagcgaaggtatttggtagtgaacaatctcagttttctgaaatatctttattttgccctcattctggaaagctagtttcttactttatttttttaatagacagagggtcttgctttgttgcccaggctggtcttaaacttctggcttcaagcagtcctcctgccttggcctctcaaagtgctgggattacaggcacgagccactgcgcccagcagtaacgctagtttcactgggatcatggactcttaagagctagaaggaacttcactgattatttgactcagccttttccatttccagaaaagcctgccaccaggcacagaaagaatacatgacttccagaatccctcgctatattgtccagactggttttgtactcctggcctcaagtgatcctcccacttcagcctcccaaagtcctgagataataggcgtgagccaccgtgatcccctttacctttttctttttttttttcctttatttcttcttaataaaaaaaaagtggggggggatacatgtgcagagcgtacaggtttgttacataagtatacgtgtaccatggtggtttgctgcacctattgacctgtcctctaagttccctcccctcaccccccaacctcttcaaaaaaaaaaaaaaaaactatcaaaaaatggtggccgaggttcaaagctctcaccttggttttgtgataaaggtggttaatctttggtgttggatttcaaattagtctgtttacagtgagcaacagtacagcagttttaaaaatcatgttgaatcagaaacatgaagaaggcagcagagctttctctccaccatgcacttggagaaggaaatgactcggcagcatactcctcatggctaatatcctttaagatttttccaaaatcatgaaaccagaacttgagagcttaaaagggactttagaagtctaccagtggataagagagaaaaaaaaatcaaaagggaaatggaataagccaaactaaagggcaggattcttttagttctcagcaggaaacatatgtttatctggaaaagattttggttggacaggttgtttgtgtaagaatcttttttgtgaggaaggaagatcaacctgggcttgaaggctggggtgggggtagagagaacagtccctgagcttcaagtaaatgagaaaaatacacagattttaaacagaggagccctgctttcacggggatcatatgatcgtgctatcagcttacttttaagttgtgataatgtatacatactttatgaaatatgattaaatggtaactttagtattagtggctacaagaacagaaacagcaacttttaaaaagatatgaaaagatgttttgggtgaaagtagttggctgcgcaacacatagagtataacatacatcattaatttaagactgtagatgtacagtatatatttggcatgtacaccaggattttcagtgattattgatgtaataagatttatgatttttaaaaagaaactcttcatgatagttttctgtaccacttacattttccatagtgatcatcatattgtctttataaacaatgacaacaataaatcaaaaagagagatcttacatggtgcctcttctctgacagctgagaccacatcatagctacgttgttcccttacattgcatttacattacatttaaaatgttatcaggaggacagaggctcatgaatgagacatgttctctccagttaaatttagtaaagaagaatcagagaaaaatctccagataactggaaaatgtttacattttcaagtatataaaaccaggatacattatcttgtttaagcttggagttgacaataataccattttgagatgtttttcagatagaatgacagtgagagtcatagtggggttgcacctccacatgatgcaacccaaatgtgatggaacagaaacatttttcttcatcatcctgaaaccgagcagtgatgatccgctgaggaatgtttaattttcatgtattaaaaaatgaagaatgtctgacctactgttaatgagaaaaaaaaacaccaaaaaggaagaaagaagaagtggcagctaaaagcctttttatggatgacgtcaatagaggaaaatgaaatattcatagaatcacagcaagagaataggaattctgaacatttttgtagaaggaaactgtaggattcttgcaattgatagtaggacaggagggaatttccatccttatgtgtgcagaaaggagtagacacagtgaaatttgaagactattgtaaacattttctacttcacttcaccttgaagaagtctacagaaagcatatatggcatagctgggcagagtggctcatgcctgtaatctagcactttgcgagaccaaagagagaggatcacctgagcccaggagtttgagaccagccagggcaacacagtgagaccccaactctactttttaaaagattttttaaaagcatatatggcagttaaatttcagtgagaaatcaggaccagggtaaatgtaaatacattactatagcagataaataaatatggatgccccacccatatttcctttcatcccacaacagaaagctggaaatgctgaaaaattaatacctcccacccctgaagcagccatcagccagtgaggaatgggagccagaggataaataacccaacttcctcacccgctgagggtgttcaaccaggtccttgaaattcccgacaggaatcgagcctcagttgcccaccctggaaacctgctcagtaatacgcttatcgttggtttccttccctttcctgtctcacttctgtaatcccctggtgcatctgggggttccttcccgaataaactacttgcaacttaagtccctatcttgaactctgctcctgggggaatccaaacaagaacaggtggagacagagtagaacaaggataagcaaagcaagagaggagatctgaagacgtctctaaggttgtttgagtgactccaaggatagtggtacaattagctaggagaaagagagggtggaggaggccgagaagagggttcagcccaacaaatgccaagttttaggtagcttggggataccttgaagagatgctgacaagctacttagaaataagtttattagctagaagccggagctggccaggcacagtggtatgcacctgtagtcccagctactctggaggctcaggtgggaggatggcttgagtccagaagctgtttgaggtcagcctgggcaatgtaatgagacctcatctcaatatcaacaaaccttatctcaatataaatgaatgaatgaatgaatgaatgaatgaatgaaaccagagctatagctgtatatttgggaatcctcagtgtacaggcagttgatgaatgaacatccagaaagactagaagcatggtatgcagggaaccttggagcatacacatatttaaaaattgggtggaggagaaaagccagtgaaggagactaagaaagacgattatagagagaagaaccagagctgttattggagccaaggcctctttcttcaaggactgagaaggggagagtttgtactttggagtttgcacagatcacagacatgaaaaaggaaagatgatgatgagtggaaaatgggaggtcaggactctcctcccatcctgatgtggcaagaggcttttctcatggttctggatggaactttggccctgttgcagatgctcacatgcaacgttctgttctaatcactgttctgctggcagaggaggctggagtgatgagtgagcatgggctcagcttgcgtggatgctatgagccgtaggtcctactcaagagagtcagtctagtaacaaattattttcctctccttcttttgccatcccatttagtttgcaggatggttggtgtttgtgtgggctgagattcctcagagggaaccaaagccctgagaaacatgtgtagcagctgttgatttgggtctccacagtgagatccgggtctaatacagtgagtccaaccactttatctgagtttggaaataactatgagttacatagttaagctgttttcaaaaaacacagaggattctgtactgctagtgccattgagggggcttttgctgccatttattttcaacttatttttttgaggtggagtctcactctgtcgcccaggttggagtataatggcgtgatctcagctcacagcaacctctgcctcccaggttcaagcaatcctcctgcctcagcctcctgagtagctgggattacaggtgcccgccaccaggcctggctaatttttgtatttttaatagagatggggtttcaccatgttggccagacggtcttgaactcctgacctcaggtcatctgcccgcctcagccttccaaagtgctgggattacaggcatgagccgccacacccggccttgctgccatttttaaataccaaaaccttttgttgcagtctttgtcacaggtgctggcacaaaattcctggtaccttctccctgctctaattcaccaagttctccttcctcttttccaaagactactaacatggaagtcttccttaattagttacaggactatatctgcaactcctgtgatttattcgctcagtgcccgtgtcactgtcacccactggtggggtgtgcttgttgtaaatacccatttaaatgtttacattttcaagtatataaaaccaggattgtaaaataccgttgtatttccagttgtaaatagccgtttagttaagttaggcatttgtttatcacgcgtcctaatctctgtttgtgtcgttactgtctcagagatcatcatcatctgtgtttacatttttatgcatcattctttatgcaagtagttcttattcagtgtttttgatgatgttaagcaaaattctgttgctaccttacctcattaccttcccgggatatattttgcagatataaaccaataatattttctggttctttcttgactagtagcttttggttaactctaaggtttttctgtttgtttttctcacagttgttttctcccacgtgtacaaatgataaaacaaattatctcaggaagaagaaaaaagacatttgatagtatatccagtagttcaacaatagtcaacggagtctggtgtcctcacttctgtcattggctgcttgacctcacttaaccttcctgttagtttctgtttcctcactagaaaatttattactttctagggataccaggagacctggtgttaataaagggcacagtgcagggtgtgtggaagattttagtgtcagttctagcacaagctagctaaatgtgtctcggggtacattaacttctctaggccccaatttcctaggtattcattcttcttctagacaatagacagttgaattaaaaaatcctttctatcgaccaggtgcaatggctcacacctgtaatcccagcagtttgggaggccgaggcaggaggatcacttgagcccgtgagtttgagaccagcctagcaacacagcaagaccctgtctcttaaaaaaaaaaatcctttctattcctagaactctagggtagtgtgaagtaagggttttcacagttacactaggtaagttactacctgtcgggtacttctctaattatgctgtgcttattaacttatcaagtcctcaaatggccctatgaggaacatatcctttatgttctatagatgaggaaactgaagcattggatgttaaacaacttgcccagggccaccgagcttataagggaagaagccgtctgcacaccccaggctccagattccacagcctcaaccaccaaactctcttgtctgtcgtcatatagaaggctgttctgttttctcagtgtagcccccttaaagataagccacagtaaaccacagtgcttttgatattaggcaaattaaacttgagttcaatcgtatgttacactgaatcaaagttatattcgctgtgcattttacgccagtaattctggaaactaaaaagtgccatgccagaaattttctctgatttaatttgcttacaatcattttaaaaatgaggagctgtgatccacgcttttgccccaggttggaatattttagaagtactttcaaatatatatttctgctgctgggatataaaaccataaattcgagcagatagaacaaaagaccaaagaggatgatgtatttactgtttttgagttaaagttacaacagtttacagaatcacagcaaccgagaataggagttctcagagacatactcctcatccacagaagcctcacatgaccaacacaagtttcagtccagtgcaactttttgcaaatgaaaacttaccctggggttgtttggtgactcctagtcacatgtgctttctaaagttctcaaaacaagcatggggtgacagtccagttttatgaaatataattttagttcagaagagatgggattttagaatagttaatcttcattatatttgacataattactctgcaccctgtggatggggtggcttttcaaaacccacttctggtgaggcagaccagggctccaggccagcacccctctggagattggaatgtgaatttccgtgctgggacacagagccagcttcctatttatttagagccattgggcacctaaggagccaaacagaagttgtgatgcaagttttggctgcagagcatgttagggttgcctgacgtgtctaactaaaacatgatctgagagatttctcaaagccctggttgatttaagcaccatagtattcaatagggtttttttttagtccttttaactcagtcctaagtaaacaggaggcggtgcaaacaatgaggaagttccctctgcattccgatggtgaagtggggttggagtctgtaggcaagtgaagagcgtgtgggagagctgtttccttttgctcatggcagcagtctagaacatggtgacagtgaaagtcattggaagccatgggggcccattttctttatgtgaccaaatgtcttgcaaagtcccaggtgtgtgtgtaggtgcatgagtgtgtatgtttgttttctaaacgaagcacacgtgcaaaataatgtaaaagggcagagtgaagtttgtccatgtccctgtatgaaagtgcatgggaagtgcctggggcagaagtgaaagagacacggccccaggtcgtgagagaagacattgaggtgcactcccggcctgctgtgggaacagtgggttagcatgtcaccggtgcactcccaggctgctgtggcaacagtgggttagcatgtcacccggctttaggatttgggggagtttgctcaggctctgaggcaggtaggttaaggctaatttaactcttaatggttggaaggaaagagggaagggccgtttaggaaggtgaaaaggcaggagtgaaggtggcaagaaatgattggcatgcagttttttcctaaatcctcctctggttataaggaatcaactggaaaattgcagtggcaatagctgttaagaaaaaaaataggattcaattgatgaaatattaaacatgcaagtgggctggtcttttaaccaatctttgtagtattaagggattaaaaagttaattcttggtaattagatccccagggagaacttaatttgcatctatacatgataagtgtttactattaataattcaagacaagttttgctttggccggtattgagctgggtctcaggctggtgataacagaggctggatagagagtgataccattagcctaattttgtcatctgcaagcaaaggaatgttaaaatctgttcacttcgtggtttctaaatgacttctagaagtatcatgagtggaagagggcagtgtagtgtagtaacttttgttcttccgcagtccttagaacctgtcaggattattggttatgacactgttcccacagggtggacaacaggggcatttttatcttcttgagacatatgggaaacttaagaaggaaagtaactaggctgtttgccaaagattacacctacctccaaacaaaaactgaggcaggtataattttaactgtgctggaatctctgaagatgttggtgtcttggccaaattcatttggactctttctgcatttcactctttgagatctattgtgtagactctaatttctttgacaggtattgtcacattggtctccacaaaaattattattgaaagccaggcatggtggctcacgcctgtaatcccagcactttgggaggctgaggcgggtggatcacaaggtcaagagatcaagaccatcctggccaagatggtgaaaccctgtctctactaaaaatacgaaaattagctgggcttggtggtgtgcacctgtagtcccagctgcttgggaggctgaggcaggagaatagcttgaacctgggaggtggaggttgcaatgagctgagaacacgccactgcactccagcctggtgacagagttaaactctatccaaaaataaaaataaaaaataaaaaattattattgaaataactacattttttttcttttttttttttggagagaaagtcttgctctgttgcccagctgaagtgcagaggtgcaatcatggctcattatagcctcaacctcctgggctcaagtgatcctccctagtagctgagaccacaggtgcacacttggctttttttaaaattttttttggtagagaaggagtttcattatgttgcccagactggtctccaattcctaggctcaagtgatctcccacctcagcctcccaaatttctagaattaaagatgtgagccactgcacttgccctaaataactacatttttttgaatgctgcgatgtgcctagctttgtgctaagctctttgaatgtgttacctgattcagtccttgggaaaaccctaggaagaaggggccacctgatttctagatgggaaccctgaggcttagcaagaaaaagagagccggtgcggtagggtcaggactggagcccggtttatactccgactgacaggatggggatgcctgtttcacctcacccttgttaaaaaggacactttagcaatccttttaagtatttgccagcttaagaggtaaaaatgtgatttagcttctggttcttatgcgtccgtcttgggtagcattggacatcttggcatggttattggctgtttgcacttacagttttaggaattgcctcttcacatcctctgccccatttttacttgattgttcatacttttaaaaattgatttctgtgtattataaatagtaaccctttgtcatgtgttacaagtcctcttctccctcagtttctttctttcaattttctgctttgtatttttttttttttttttgccaaatagaactttaaatttcttaaattgcaaatctgtgaactttggatgcctttagagtttattatccctttaaaaaaatttttttaagagatggggcctcagtatattgtccaggtggtcttgaactcctggactcaagcagtcctcctgcctcagcctcccaaagtgttggtattacagacatgagctactgtacccggccaagttttattatccttatcttatcctaggagtataatatttttctgtgttttcttattgttctataatttcctttgtaacaggtatctgagattatctttgaaatcttctgtctcttccagggtttaaaattttttagcaaattattatttcatggtttcttaaatttcctttgtttcaatgattaaagcattattgaggaaataagctatattttattaatcacaagtctctgcatacactagaaaaattctagtataattatttggaagacataatgatgtagttttcagagtcctcagattagaagccactgttttaaaagcgtgaggttagaaaaggaattttgcacctattccaggttaatttctacctattccaggttaacagaggtgatcctgtaccaatgggttttggacagagctctcatagtctgtgctgtgggcgattccctcatttagtttgcgaggataccagaattaaaggaaaataatgagaaatgcttatagcccatagatagacgcgaggtcacagacagccagactggagctaggagaccatgctgatgtcacatactgccctatcagaaccctgggaaacccttggtctgtgctacaagagattggcccatgatagccagttataaccaggcagtgggcatctcaggggtttgcatgggtctaaccttaaaaagccacatgactgggtgcggtgacacacacttgtaatcccagcactttgggaggccaagacacaaggatcacctgaacctgggagttggagaccagctctggcatcacagtgagacctccatctctattaaaaaaaaattatttttaattagctgggtatggtggtgcatgcctgtagtcccagcaccttgggttgctgaggtaggagcatcacttgggcctgagagttcaaggctgcagtaagccatgattgagccactgcacttcagcttgggtgacagagtgaggtcctgtctcaaagtaaagagtcctgttaggaagccataatgattttaggggggatggtttagatcttgaagaaagaaaaaataatttgaggagtgagcacttgaactatcaaactttctcatctattaggtgcgttaggttccttacatcttattctttttttccttccttttaatatatagctactctccagagagaccggatcttcaaacattttaccaggaagcgccaaagggctatgcgaaggcgagtccaccagatcaatggacacaagttcatggccacgtatctgaggcagcccacctactgctctcactgcagggagtttatctggtaaggggttcccttacttctgtcctcctcagagcttccatctaataggcttcctctggttatgtatgacttcagcagaatgcatgattatttaagaattctttcaggatctgatttttgcctcttactctagtatgttgacccagtaatttaaatctccattgcaaaaacatctaaataatttacagatccaagttttagataccatttctttttaaaatcatcttggtaaagatgctaatgaatcctaaactggtcaacaagcataaatcagagaaaaaggctaataagtcaataaacaatcagtaaattggataatcagcccctaaggaccaaagaataatcaacagtattgctttaagaaggcatgaatcgcataatgacttatggaaattaatggttgcgagaaaactaaacacaaagtagtcttcggcctcttggtatgtaacagaagataatagccttcagtgatcatatactgtaatctaatccctaggaattagtaggaactaagataattcaacattgagaaattctagagatttggggcaatatcttactagacatacaactgaagcttaagtctcagtctcagtggcaaatgtaaaataaatttaagcagtagttatctttagtgataaattaagcatacttatttggaaagggaagaaagaaagatgccctcacacacccatctcagaaggagaaaacacagtttggtagcgtgaaaggagatctatatttttgttgtcaactttaattattttgtttagtgaaggcagaagcccttggatcagagcagtttctgaatgttgatcaattactttgtattttgttttctgtgattattttggattttatatcttcaacagtcagaacctagggctagttagtatttctgacatttttaatcaagaaacaacgattttgagatgctaaaccagctgtagatatgaagccaacaaatgtgtcataacatttattgtatttagggaaaaaattgtattacttttttttgggaaaaaattagcagccctggcgtctttgagttcacgtttcctctttgcatgaggctgcactcgacttagccacagccccacctctctgtggtttgctcacttgtgacctaagggtgcttgcctcttgcagtgtatttcatgtcacacttttctgtttcctttacatgacctgccaggcccctgtaggcattagtggtgatggcccctgacctgaactgacattcataatggaaacttatttgatcatttcactgacttttttccaccagagaaacattaactgtacccaaccagcctttaacgctccccgcctccacacccatacactgtcaccctcatactctctctctcacacacacttaaaatattggtgtatatattaatatatatggctaagagtatggactctgacatccagtctcatcaccaactgggtgtgtgacttagtcaagttgcgtagcctgtcaatgtctcttcatttgcaaaatagacacaacaatcttattttacttgtataataaactttcatatagtacttaaagggccaggcactattgtgagcattttatattacaacttttaatcttcattagagccctgtgcagtaggaacggttatcattagtcccttttatggatgaggaaactgtggctcaaagcatcaggtcatctggcttcagagtctgtgctcttaaccatgttattttgtgtgctgcctcccgtggctttttgtgaggattaaatgaaatggtatatatcagctgcttggttcagtgcctggcacatcctatgggcttagttactgtggtctttgttaatgagaatgagaatactcctaatgttaccatcattatcatcacccatagaatatatttgggagaggcaaagatggaagtggtgggcctgaagggcatattgtggcagcaactctgcccacctgtggactccaggggtgatatggacacagggacaagggcaggtcccctgggacaggcagctgcggtagactcatctgtgcacttccacagtgtatctgtgtccgtttacttcagcatctgaacatctttatgtgagagagaataaggtgggaactcttcaggccaaggcttaatcacacgtacagatgaggatttattgccattgaggacttaggaaattgccatggaggtagatggaatgggaatggtttttacccacccatttgtatcatacagcacattctaatccagcacatggttttttctggtgtctcatagtaacaaacaatggctcagaaagcacatgatctttgcttcttccctgaaattgtgtttttcataaaggaggagaggatgaaatttgttttccttaaggactataagagggttattgctgaaatacttgactgatggtagttttcttctcttcaacaggggagtgtttgggaaacagggttatcagtgccaaggtaaggaaacatttttaaaaccatgtttcattttgttcctatgttaaaagaaatgattataccaagagaaaacagggtatcttcccttaatattgtgataaataactctctgtaggtcaaaggaaacccctgtgtagatacaactctttagtttggtgagatcttggccatattttagacaatgtaaaggggacgtttttatttctaaagccaggatacctaataaattttcattgtttaaagtcttgtctctgcagtaacatgagagtactaaaaggtaatgtgattttgtgagcatactcttaaattttgaagataaacttttgttttttacaatcctattgataatagatagggatgaaaagtagcacactgctgttttctctttttccccgtccagggaacataagctattatccaagttgttttttgaaatgttatgatttcaaaaaaaaaaaaaaaaagtgagaaatgttcaaagttaagctgtcagtgatcttgtaagttactacatgttatatttagttttcacaatctaagatgaaaccaatttactagtgtttctagcataattggaaagaaatacaatggcaggaatggaagaagagccctcagtcaggtggtttagccaggcccatcaggcttgcctgtcatttgggttcccccttaacctttgacatgagtatcatcacatagtttatacacatggtacctgtttcactatgtggatgattgataaaatagcaccacatatcctagagcagtagcctatgtgtggataagaaaatctcaccttctcttctggaagatgtgaggtaaaacattacttcccttggatggactgaataagacatactcttggatctaattttgactttactatgtatgaacaattccattgaactttcaaagttaggaaaaaacaaatatataatcaatatgacagcaataattgacctgtatgctgttaatctcagtcccaagtgagaagacagttcacaagccagaatcgctgtcactttgtggcatgggcctgtgagcacaggaatatgccctgcagtccatggtagcccatcttatgcacaccaagataagttgagaagctctggataaacaagattatggttttgagtttaaaacatgggatttaagatacatctctattgttattttatttctttttctctttgtcctatagtgcctggatatttgatggcctgattttcagtgggtcacctgctatgtaaagagcagggaagactattagttaggagacatgcagacaccactttggtgatgtctccctaaggcatataaaaccaaatgcctggttggagagaggtatgccattctaacactgatcaaaagcaaactggcataggtatttcagacagagcagacttcagaaaaaggaaaattatcaggaataaagaggggacaacaataaaggggtcagttttccaagaagacttaacatttttatttgttttgttttatttaaagaccagtgtagtagtacataacaatttttaacatgtatgtatgtacctagcaacaggaatcaaaatacatgggacaaactgatagaatcacaaggaaaaatgaacaaatccacttctatagttggagacttcaatatctcagtaattgatagatccagcaggcagggaatcagtagggatataggtgatctaaacagcattatcacaactaggtgaaattgacgtttatagaatacttcatccaacaacagcagttttcacattcttctcgggctcacaggggacatttaccaacatagaccacattctgggccataaaacataccttaccaaatttaaaagaagagaaaccataaacggtatcttcttagaccacaatggaattaaactagaaatcaattactgtaagatagctggaaaatccccaaatattggaaggttaaatgtcacattctaagtaacacatgggtcaaagaagaagactcaagagaacataaaaaatatttagagtcaagtgaaaatgaaaatataacttataaaaatatgtgtgatccagcaaaagcagtgctcagatgggaatgtatatatcattaaatgcatacagtaggaaagtagaaagatctaaaaccaagattcgaaatttccaccttaggaaactagagaaggaagataaatttaagcctcaagcgagcataagaaaagaaataatacaattagaacagaaatcagtgaagttgaaaataggaaaacaacagagaaaatccatgaaatcaaatgctgattctttgaaaggattaattgataagcctttaccaagctaaccaggaaaaaaccaaatacctcaaaaaataaagtatttctgtgtgaaggatggttttgagatcccctcatataaaaagaccagttctctgggcactttcaatttggttctcctgagaattgaatctgatgaaagctagatttgttttaaggtatgatgctatttactgacatgtcacctctctttatgtagttaatcctaaaaccttccacatgtcttgaaagatcttaagatgatatacatttttatactgcttcattgcatgtgtttatcctttgatgacaagctcaactatctgcagtatatcacttatctagatgagaatgaaaaaaatgttattccgaaagttctaaatatttcaacagttgattaagccattcagcaaacatttattgaatgcctcctctgttcaaggcatcatgcaaggaattctgagggcattacaaggctgggtggaaggtttgaaatgaaggggcaggctaagggttgtgggagatcagaggagggcaggtggtttcagtctagaagtggggatggggtagagtattttcatggaagagacattttctgagttacatcttgtcctaaacttaagatttggttagttgataggcaaaaaggatatcccagggagagaacagggcatcgatagtttgttggaagggtccaggaagagcaacccatgtagtttttactggaacaagtagatcccatagaagaaaggtgacaggtagcttggagcagcctctggagggcctggaacctgggtgggaaatttgaactttgttgatcggcagtgaattaccatggaatgttttcgattatgggggcaggactagagtgttagaagagtcctctggtggtgggtgcaggatggaataaagtcaggaaggaagaaataggcccaggacttgataagggatagtttgagcctgagcaaaggtctgtgttaggatggtggcgaaggcaataggaaggatgggcacaccagctgctgtcaagggggccagacgagtccagtcttgttggcacggtgcagccctggttgactctgctgtaactggctggactgtgagcttctgataaatgtataattgctggatttaatttcctagtgtgcacctgtgtcgtccataaacgctgccatcatctaattgttacagcctgtacttgccaaaacaatattaacaaagtggattcaaaggtaagaggatagcagtttgctgattaaatgtgcgtgtgtattgtgtatgctgtgtaccgccgtctctctccctccctccctcctttcctccccctcttttccttctccccgtccccaaacctctgctttcctccccctgccacctcccttccacattctttgaagccaagggttgtattagaatagaaatgtctctctccctttttttaaattatggcatttatatttctgtatttatgtggcatcatccctcctttgtgaggaccccattagtggttggctgggtataagctatatggattggttctacttatttggagagacttttggcagagtgaaaggagccctgaacttggcatctgacagcctggatttgaatgctgaatccagcctctgttagccatcttctctatgagctgcggcaaggcctacaatctctcttttcctcagtcttaaaacaggatcaatgtttccctcacacagtttttgtaagttaaacaacatagaattgatgtgatacatatgttaataactgtaaattatgtttcctaagtaaaaagattgctggctttctccagcctcttaagaaatttcagggaagatgtctctctctctctctctctctctctctctgtgtgtgtgtgtgtgtgtgtatgtgtataagcttcaacatcattcttgccactcatattgcattcatctgcaataggcatacattttaaattctagaggtaaaagcagatggagtgttgctgacatttagcagtagatttgcagaggcattggaagaatgactctggaacacaatggttctttatagtacacatataggattgctaaagagtatacctagaggtataaaccacagcttttccaagaaagaggccataaaagtttcaagaggagtaatgattgccctactccttgtcatgcatggatctgttgttatagcatcaaattgtggtatggactgcagagtacatgcctagtggaattatttgctggaaactgagatttaactcagattgtcagattgcaaatgccaggcaaagaaaggctggaagagctgaataagtagttactttaatgtcactttggaataaattccttctgtggttccatggcctctgagtctcttctttttatttttcttcccgtgacacaatgtctggaagaacttacagtgatagcaagtatatatagtgtataaaagacccatttaatcctgaagttaaaaggttctgggaaatagatgggggtgttaggggattggcaaggagagaaatatggcctgaatatgaaagatgaagtgaaaatcttaatttttatttctcaaaatggcaaatgatctaatgtgtttcccacatttctgtcttgtcctgttcattagaaaatgtgtttagtctggttcgtaagacctgagtaattaatcagggctgagtacagtaaaataatatacctagctcaggtgtcatagtgacactttgcatttgatgggctcctattacagtttttacaaaggacattggtatgacattttagctcttgtccctttatttccttttttacagattgcagaacagaggttcgggatcaacatcccacacaagttcagcatccacaactacaaagtgccaacattctgcgatcactgtggctcactgctctggggaataatgcgacaaggacttcagtgtaaaagtgagatgctgaggtgctgggtacccacctcttcatgggaacactatgccctaagctttcagaattctgtggactcagaatctgtcctagaactgatggttttagatatgttgtaaatcaacatcttagtcattttaaacttacatgtttcttgtcaggcatgtaaagagaacttcatctgatgccaacattttctaatcataggacattaagtcaaatggtatattcagtgatctagctcgctagctgacaaatacagcctagacactgtattttaataggtgtttggaagagaaaaagatgggatcttagtcagaaatggaagatggttgagtcaggtgagacactaaaaagaaaaaaataaataaaaatttcaaagaaatggaagttaggaggaggtgaggaggtgagatggccaaatgagaaggttggattaagagtaagaaatggcagaatagatctgatgatctcaccagaaatcagcaggaatggagttgtcacagcataaaaagagctgccctgggtcttgtgaaagagattggagacaggggtagaatgaaggaagataaagccttgattgtaagcttgcatctcaccagctgtgcccagtggagtgagagtttggagctttggccctagcaaaggctctgagtgggtgagagctgatccctgtcctgttaggagttagggagctgttggccttgtgccatcttgtatggaaatgtaatgatctgactgccgtggggtgcacctgaagcctttcttatcagacacaccccaagtcgccagttgaggagaacaatggtgaggtagaattggcatgagtatagccagacaacttccattgactgcttggacttacagagcctgcttctgtcaacaaaaaggggccagtcacttgtctttaagaagggcacattcttctatctctgtagaacactaataatttttttctcataaaaccaaaacagtagccagctcatggataacttgtagggcgttggtccaggtgcagcttgatcttagcgtgacggtctcacctgggtatgggttcccagtgggaaatccctttctgccttgcattgttgctgatgcgcagagccatgcatggggctcatctgcattgtcctcttccctagtggcctgagggtagcacacctgcagcaatccggctcttgtgatttttgcctttatggtcacttggtggttttgaaaggcttctgtaggctcgtgtgtcttacacctgtcttcctgagaggggtgggtttcccatgaagcttaagtctcagggctcctctctctcaagggcaccttccaaagccctctacttgatttggtgttctttttcttaaagaaggcctcctaaattatgtaaattcaggccccacaaaacctggatctgtgtgtgcttccaagatggactgactccataaaacaggaatgtgttgcttgtcgcttcagtttcacctcccatcagcagggcccatgtcaaaaaactgtctcagaatttattccagctgataacgcctcagatccttcattgtccccaggcagcttccggtgcctcaggagcttagctttctttgctcgcctcttcaactgccatttgtactctgaccttcagaaagttttaaaagttgcctttccccactatgaagcagttagaaccacaggctgcaaatgctgagaaccacaggctcacaggatgcccatctctgtgctgtgaggcctgcccaaccacaacaatactcagaaagaaagctgcagatagaggtttttcttgtagaaacaccatttccatcctgtttgaacagtgatctacatgtggcatttaaactgctaccttttatttcactgttgagagacagaaaaaaatacagttgacatgattctttgttatttaattgcctgtgaattgccgctacgataaaggttttaatcttagatcatactaaggcagcaatgcctgttacatgtgatttagatgaatgggtttcatcaaatcatggtggaaaaaatgtatttgaaatatattattctttagtatgcttgcctttctgcttctgcagaaaacagaaatagataaaatgtcaggaactattactagtgtgagcttaattttatgagaaaatgatactgttcagccggtataattcctctgttataatcttttaggctattaaagttctctgttgcagcacatgttgaattggttcctttctgaacatggattctgttttccttttccctctagtatgtaaaatgaatgtgcatattcgatgtcaagcgaacgtggcccctaactgtggggtaaatgcggtggaacttgccaagaccctggcagggatgggtctccaacccggaaatatttctccaacctcggtgagactttgctttttttccatgtctcgtaatttagaagttgctcagatgtgatgagcccaaatgagagcatgtggcctcatcaaagttcctaatcttagcaaatacaataaacagacttattgcctttctttctttctttctctttctttctttcttttttcttttctttctttctctttctttctttcttcctttctttctttctctctttctcccttttttttctctctctctcctctcctttcctctcctttcctttttccttccttcctcccttccccttccccttccccttccctgtcttcattcctttttgagatggggtcttcctctgtcacccaggctggagtgcagtggcacaattatggttctctgcagactcgactgcctaggctcaagtgatcctcctacctcagtctcccaagtaggtgggactgcaggtgtgcaccactatgtcagggtaattttttatttttttttttgtagagatggagtctcactttgttgcgcaggctggtctcaaactcctgggctcaagcgatcctctcgctttggcctcccaaagtgttgggattgcacaggtgtgagccactgtgtctggctgaaatagcatttttaatagcaatttgtttcacggataagattgtatatacagttatatgacaagaaataatgagcatgagcaacaagtaataaacagaaagcaaaagaaggacttttttcctttctttccttttttttttcttttttcttttttctatttgttttttgagacagagtctcgctttgtcacccagcctggagtgcagtgatattcgctcactgcaacctccacctcccaggttcaagcaattctcctgcctcagcctcccgagcagctggaattacaggtgcccactaccgcgcctggctgatttttgtatttttagtaagacggagtttctccatgttggccaggctggtctcaaacttctgatctcaagtgatctgcccaccttggcttcccaaagtgctggaattacaggcatgagctgccacgcccagcctttcttttctgttttaaaatcagcttcctgtcactgtggtctggtgaaagcctaaaacccaggatcctgggttatgcttttgtctggggaccaggcaggacaggtgaccagtaactatgggcgtcagcgtcctcacctctaaagcggttcaacttgaagatctcagaggctctgcacagccctggagtccagcagttctgaagttttggtttatggattgtgaatttatcattcacattcagcaggagacaggagtctctccctctggactctcaggagtgagtggagttgtgtcagttgcagtgcacatgtttttgtcagcactctccctgaatgacctccacctgctgtcatccagttgagccttggctgcttcccaagcccatgtcttactgttgccttcctggtcagcgtctagagatgggaaatagccatgtaagatctgaacggtgtagcttggtgtccagttcaggaaaattatcgactcaactaattaatctctgggtgctgaggaagggaagtgcaattactgtgagattcttgataatcctgaaaatgtcagcaccaaccacctcatttcctttttactgaaggactcctgcctagtagatcagggactttcattgacaatttttttttttttttgagacggagtctggctctgtcgcccaggctggagtgcagtggcacaatctcagctcactgcaagctccgcctccctggttcacgccattctcctgcctcagccttccgagtagctgggactataggcacccgccaccacgcccagctaattttttgtattttttttttttttttagtagagatggggggtttcaacgtgttacccaggatggtctcgatctcctgaccttgtcatcctcccgtctcggcctcccaacgtgctgggattacaggcttgagccaccgcgcctggcctattgacaatttattgaattgccactacgataaatgttttaatccttatattagatcatactaaatcagcaatgactgttacatgtgatttagatgaatgggtttcatcaaatcatggtgaaaaaatgtatttgaaacctattatgtaaaaaaatgtatttgaaatccggtctgtctgtcttgtgggtaggcgggcaggatgccaatattgtgcggggattgctaatgcatgggacagttatccctgaagagcagagattaaagatatcagcctgaactagggcttctgagatacaatgggaataagataagaataggaataaagatcatgcagcacgatctttaggaatggacagtgcacttgtcatttgaatcaagtatccttaatccatgacatccggtgcctggctggatgttagacttttgatctgttgtctagtggtagcttatcttataaatgtctcaaggtgggccagctgcaaaagtcaccttgcctttaggtagcaacatcctcaggtactcagtaggatggaactggaaagccaactgaggcaggcacacttaccttccattcattgtgttgaaactagaactctcatcatgctggtgagagtgtagattggtcagtcttattgtagacggtaagttggctgtgtatcagaagtcttcaaaattagcactttggcccaaggaattccatttgcaggaagttatcttaagaaactgaataatgataatgacaatacagcttaagtttattgaatgtgccaggcaccaatctaagtgctttacatgcatttgttcatttaggcctcctaatgactcatgtggcagatgctttaaccttctctttgtcagaagaggaaactgaggtagggagaggctgggtaggtaacttgctcagggtcttaggttagcttgcagagctgttattgaatccaggcagcttgcttgagagctagacccttaattactctgttttgaagatttgcatgaagtgtattcactccagtgttattcactgtggtgaaaaaggggagatgcctcatccttctaatggcaggggaattaataccttgtgagatatccatgaaatggatattgaatagccgttagaactcatattcttgaaagaaatttaaaggcatgaaaaatacccaggacaaatttttgaatacaaatgtatgttatgaaaccataatttgattatgtttttaaaaattaaccaagtataaaaacgtgtgcgtgtgtgttatttatacatggatatagatatctttggcagagggctggtgagattttaggtatttagatttttattcttcatgcttttgatcattgttctaatattcacattggacttttatttctcctatataatttaaaatattgattaaaaaacgttgcttcattcgtgtcctggtgctgaatgatgcttgaatctctgagtagacatgagaactgctctctgtaaaaagtggacactaggtggcgctcgtggaatgggaccttcccgtggaaagccaccgcagaaggcacccaagggaccacacaaggcattggtgtttccatgcacttccacttgagcgctaactgtaactccatggcttagacgtatttttaattgaccttttacacaaagcagtaagcacagattcagaagctgatactgagggagtttcgagtggcagaaccgatcatctgtcaaactgagttgatctttcccccacgttatactgggggtgagactgctcccagccaataaggtcttcttcgtgcatgggtgctccatgcttctgctgcaatttctgacttaatgtgttcttactctttcagaaactcgtttccagatcgaccctaagacgacagggaaaggagagcagcaaagaaggaaatgggattggggttaattcttccaaccgacttggtatcgacaactttgagttcatccgagtgttggggaaggggagttttgggaaggtgagtcttggctttaactgtttgggttgaagtaagtgtgctctgtgtatggggggtgtgtgtgtgtgtgcacgcatgcgcacatactcacatttctcatgtgccattctttcttcctgttgtgtgcacacaccctaagacccccaagaggactccctcatgctccctccttttgctttgccataggtgatgcttgcaagagtaaaagaaacaggagacctctatgctgtgaaggtgctgaagaaggacgtgattctgcaggatgatgatgtggaatgcaccatgaccgagaaaaggatcctgtctctggcccgcaatcaccccttcctcactcagttgttctgctgctttcagacccccgtaagtatgaatcacattcactgcaccaacagcctcttttcttacagagctgagacagtaagatactggagatttcataaagttgagtatcagaaattttgggggatgggctcccaaggcagggtcatatggaggtattggtgacttctgccaacctctggaggaaaaatggaagcttatgaattcaccccttccccttgtgctgtcctggggaaggagcaccgtgagggttgtgtgtcccaggattgaaaaggtcatcatacataaatcttctgtaggtgaagtgaaggtgaatgaaagttacagcagtctaagaacagagaaaatgccatgggctcattgtcttgatgaatttggctgtgactctgctcctaaatgctgggctggttctgacctgggcacaggagtttagaagaggggtctgagaggacccagagaggtaccttgatttggaacatcccagggcattgcttctggccttagcaacgaccctttgcctgaaaccatggactggtcttaagaattgaatctgtctgccctgtaatggcgtgcgtttaggaatgcttctggctgcagttaatggaacacttgaccagcggtggattaaacaataaatagaaaggatgagtttggttcattagtacaaactttttacttgttgtttcacataatgagaagtctggtggtaacagtgctacggttggatttgttgctcagtgacattggacatgtctttcccttggggtcccaaggtatttgctgcagccctagatgccacaccttggcatgatagcatccaaagcagaaagcataagggcaggggctgaagggcttcatggccagtccccttttctcagggagggaagatctttcctagacttgggtcaactgccctgtatgtctgttctcacattgctacaaagaactacctgagacggggtaatttatgaagaaaaaatgtttaattgactcacagttccacaggccgtacaggaggcatggctggggaggcctcaagaaacttacagtcatagcggaagggtgaaggagaagcaagcagggtttcacgtgacagcaggagagagagagagtgaagggggaaaagctacacactttcaaacagccagatctcatgagagctcactatcatgagaagatcaaggggggaaatctgcctcatgatccaatcacctcccaccaggcccttccccaacattagagattccaattcaacatgagatctgggtggggacacacagccaaaccatatcatgcccttagcaagggaggctggaagagcaaatatcaggccaagataagctggcagaccatgattggttcacaccaaccttgattcagcccctggagcagggcattctgcttttatttagaatcaggctcaaaattgggcttttggtatcaatgaagagggaaaatggccctggagaaggcaccaagagggagggtctgccacagatgtgtcagaatcttgctgtcaaaaggcattctgggagagtgaattctgggcatgttcctggcctgtgccaccatcaaggaagtaggggattccacgagagcgggataggggcatctgactggtcagggaggctggcaatacacctctagggaaggtaaagccatgctgggaccaaacgagtgaattagaattagttaggcagagaatgaaggtgaatatgtcatacagggtcaacagcacactatgggtctgctggtgagacagagcatcaggtgtgaaggaggctcagtacacacagcatatcgaggttgaacaggggccttgagaactgaggcagccgaggtgggccagggccaggccatgaagagccttgtaggctgtgttaaggggtttgggtttagtcctgagagcaatggaaagtcatggaagaagtggaagcagaggaatgacgtatcaggttgtatgttttaattatgaaaatctaatttcttgcgataggtaatataagtatcctccaaatattcatatcctttctccgaaagaaacaagtattgctcgttttatttatagcctttgagagaattttctgtacataaaagcatatatatacagcacatatatgcatacatgtttatctttaaaaaacacaaataatagtatactttgcccatgattctgtatttttaaaatttaattaatctattttttgagacagggtctcactttgtcaccaggctggagtgcagtgacggttatggctcactgcagcctcaagctcccaggctaaagctatcctcccacctcagccccctgagaaactgggacttacaggcacatgccaccacacctggctaatttttgttatttttttgtagagatggggttttgccatgtttcccaggctggtctcaaactcctgggctaaagcaatccacccacctcagtcactcaaagttctgggattacaggcgtgagccactgtacctggccactttatttttttaagacataatattaatagtatatattggaaattgttttgtatttctatataccaagctgcctcatttttaatggctgcatagtactccattttagaacatgacataattaatttaacttttcctcctctgttgctatgtattgtgttcctagtcttttatttcagtcattgttgcagtgagtccccttgtacttttgtctttgtgtgcttatgctggtgtttctgtatgacacattattagtagtagtattgcttggtcaaagggtatatgcatttcacattttgattgagttcaattgccccctcccccattgtggttaaagatagtgaacgttttattgtccatgtaccacacattgttctaagtgctttatgtctgttatttaatccttacagtaaccctctgaaataagttctgttattatcaccccatttcacagaggagaaaagttaggtacaaagaagcttagttcctaagtggcagagagcgtttgaagccaggtggtctgacggcagagtccaggcaggctcttcctatttgctgggctgcgtctctaaattcacactcccaaagcttgagtgagaaggtgcatttccccgccttcccatcatggcatgctctctgtcatttggatcatctcagagttagaaaaatggtatatttgaagttccaacttgcattcctctaactgtgagtgaagctgggcgttttcatacatttcagggtcactagtattcaaatctgtgttgggagggccacatgcagcctggagaatgggtggagcagagaagtctgggagcttggtgacaggacgcactgaaggagatacatggcttggactcccacgccaccccagcgttatcaagagaaaaaaaaatggggaggcagctaatggcttcgtgggcctcggctcccctgcgcgcctctcccttcccctctgctcctcattggtcctcagtggctcttgatggccctggagcccatgctgctcctgcccccatcctctgctttccctctgctggattggtccttggttcccctggagctccagttctccctgccccacactgctccctggagtagccttgaaacgacttccttggctgggcactttgccaacgtaaagcccctcccctgccctcacccccttgttgggctcttttcttggaatagaggagtggagttacagcttgaggcttgagagggatagctggtagctgatactggttgcccgccggggtttcaagcgccagcctcctgaacaccaccatgaacaccatgagtcaagccgcagagccaggtgacctctcagatcttcttcctagggcctgagccaaacatcacatggtttcctatgacatgaggttagatcatcttcaccaggtggtaacctttgagtcaagcagtcaactgatatttagtgagctcacctggtcttgcagcagcaatggttccaagttactactgctgaagcaaagaaagaagtatctcatacctaacaggggaatttgatctgtaaaaggaaattctggtgattataagcaaagatctcatcaacagatcatgttatggtagagtaaaatgaggaagtaacctggaacagattgggaacccaatcaatatagcatatgcaatcaaaatgttccaggaaaatgtataaattctacagtataccaaaattttagcggccacatgagattcccagtgtttagtgggtgaagcctttactagcattgaagtctatttttcctagtggaagttttatgtttgaccacaaggtggcagtcattaccgcaaagttacttttatttctccaccagagaaaccaaaggcatggaactgccattgcggtttaagatgtgtgtgttgtagtagatgtctccaaagcaaaggataaagggaatgtacccctgctttaggctaaatgataaagaagtagtgggaacccacttcaaagaagcaagtgaggctgggcgcaggcagcactttgggaggccgaggtggggcaatcacttgagcctaagtgtttgagaccagcctggccaacgtggtgaaaccccgtctactaaaaatacaaaaagtagcttggtgtggtggtgcatgcctgcaattccacctactccagaggctgagacaggaggatcgctggaacccgggaggcagaggttgcagtgagccaagatcgtgccattgcactccaacctgggtgacagagcacgactttttctcaaaaaagaaaagaaaaaaaagcagcaaaggagattttctaatgctgagatagaggtatacaattttagttttgctgtcgttgttgccttctttgaggtttgcaaggtatcggactccacagtacacatagcatttgctcgctgtgcattcgtctgttggaagtccttatttactgttgtaaaactatccccatttactgttggaaaactaactataaagaacagaaagtgttacttgctatgagaagttacagcagaaagatgcttactttttagctgcccagtgttgcaggccctggcttctcaagtaagatgctaatcagtgtgtaatgctgaactgtgacagtctcccctggagaatttaggagtgagagggggtgttggagccactctacctgcaaagcatttcattgtgagggcctttgtaaaaacagcactctcctcatgcagccctgtggaatcagtctctctgaagcccagagcagggcagtaactagccgaggatcccttagattgtaagtggcagagacaaagttcaagtttaggtcaggctgactctgactccatatgttgtcttattccgcatttagttggttgattcagcctcggcttaagcacctcctatctgtcttggctcccctccaacctgacaatatggaaatggcattgcccttgggaacagaaaacctgaactgtgttttagctttgttttccaccatctaaatggcttgagtctgtcctaaaattcctttgacccttaaagttcttatcattaaaatgaaaacaggatcgctgtgagggtcaaatgagagaatgcagaatattttgtacagtgcgaagtgctgttcaaaagtgagtcagttcaactgtggtgatgaccccctccatcctcacaccaaaggaaaaatgtcccagggcttcccaatggccagcccagacacccacatggaggggacagcaaacattgagaaggtaagtattttataggtccttttgttcttggcaaaaaggaaatagtaagcaaatttcaaatatttgataatttatcaagattgctacaaaggtttatgaacccatagattatttcccctttttttttataatcatatacactgcttacaagtatataaatgggcatccttatctgtttctgatagcactgcaaatcctaatagtttgtgactaatttgataacctgtactaaaactcacaaaatgtatactcctggatctgtttttctgataatctggactacaaaaataatataaagaataaaatgttattcataaagatgtttaattttcagtgctttgtttatatatatttttttggtcaacatctctctaatcctccagcctctggtaaccactattctattctgtttctatgagtttggctttatttgattacacatatcagtgagattaagcagcatttgtctttctgtgactggcttatttcaaataatacaatgtcctccaggttgatccatgttgcaaatgacaggatgtctttctttttaaaagctgaacagtattctattgtgtatatattccgttgtttctttgtccgttcatccactggtgaacacttaggttgattccatatcttggctattgtgagtaatgctgcagtgaacatgagagtgcaggcatcttttcgacatgctgatttcattttctttggatgtatatccagtattggaattgctggagcatatggtagttctattttaattttttgaggagcctccataccgttttccaaatgagtatactaatttacattcccaccaacagtgtacaagggttcccttttctccacatcctcttcaacacctgttatttttcatcttttcaataatagctgttctgacaggtatgacataatatctcattgtggttttaatctgcatatccccaatgattagtgatattgagcattttttctatacctgttggccatttgtgtgtgtggttttgttttgtttttttttttacttttcatttatttttactttaagttctgggatacatgtgctgaacttgcaggtttgttacataggtgtacatgtgccatggtggtctgctgcacctatcaactggtcatccaggttttaagccccgaatgcattaggtatttgtcctaatgctctccttgcccttgccctcccacccaacaggctctggcatgtgatgttcccctccctgtgttctcattgttcaacttatgagtgagaacatgtggtgtttgattttctgttcctgtgttagtttgctgagaatgatggtttccagcttcatccatgtccctgcaaaggacatgagctcattcttttttatggctgcatagtattccatggtgtatatgtgctacattttctttatccagtctgtcattgatgggcatttgtgttggttccaagtctttggtattgtaaatagtgctgcaataaacatacatgtgcatgtgtctttatagtagaatgatttattaatcctttgggtatatacccagtaatgggattgctgggtcaaatggtatttctggttctagatccttgaggagtcgccacatggttttccacaatggttgaactaatttacattcccaccacctgttggccatttgtatgtcttcttttgagaaatgtctattcaggtccattaaccattttaaaattgggttgtttcttactattaagttgtttgagtttcctctgtatttggatattaactccttatccagatatgtgttttacaaatattttctcccattccacaggttgtctcttcactctgttgattgcagaaactttgcagaagctttttagtttgatatagttccatttgtctatttttgcttttgttgcctgtgcttttacggtcatattttaaaaagtcattgcctatgcctgtgtcacagatttcttcccctaagtcatcatttggtaattttacagttttaggtcttacatttaagtctttagtccatttttcagtgatttttttatgtgacgtgagatgagggtctgtttttattcttctgcatgtagatatccagttttttcaacaccatttattgaagggacagtcctttctttgttgtgtgtccttgggatctttgttgataattaattgattgtaaaggtgtggatttatttctgagctctgtattctgtcccattggtctatatatctgtttttatgccagtaccataatgttttgattactgtagctttgtagtagattttgaaatcaggtagtataatgcctccagctttgttctttttggtcaagattgctttgatgtcgtgcattatttatagtaggaaaatattagaaacaacttcagcatttagcaatgggggtacacttcaataatatactatttgatgagaattttcagccagtcaagagataattttatgttacgtagttaaattgtcaggtaccgtcgtaagcacctaacatgtattgtttattgcacgtgattcctataacagccttataagataggtgcaattattatcctcattatgtcaaatggaaaagtgagacactgagcagttaagtcatttgcctaaaatctatcacagaaaatggtaaaaataggaggttagaatccaggaaataatacagaggttatgatgatgaacagtctgtatccaagtcaggttctgcccaagatagtgaattggcagacccgttcccctccccagcctcaaaaaagactgccaggaaattatgccagtaagctatcagggactggattaaggtagtggaattatgaaggatttttttcctatttaccaaatttggtaataggattacatttcttcaacaatgggggtaggaggaataagccattattaagtcagggaccagacccctggtctctcagaacctgggatacggcctagtacatgctgtctccctgactcatttatggcgaaattcacatcacactccttttatctgaatcagtgagggttgtgtcagcagctgagtccctggcatggatgtgctggaatccaggcctcccatcccccatccccggctcgcaggggcctccccttcggttctcctcctggagagagaggaacaaagactagggggtgagggatggaggggggctatcacaggaagggggagcagcaaagtaaatattggtctgaggctttgttcggagacccagtttatggaagcaaaggtttccatttggaaaacagaagacacttgtggccagtgcccgaaacagcctctcactagcaggccctgggactgggtgagagggctgagcgaagtactcctcattgttttgggaatgccttaagtttgagtttaggatccaccgctttcaggtgggctacaggacgctccgatgccggtcgcttttgcctcctcccgctcctctgcctgctggggcttctttacgatgtcagcctgcaaggatggagttcctggcaggaccatagctttccataagaaaccacttctcaaatggccaacaaagttgaaatcctggtttttgaaggtcagaatatcttggaatcttgtgaaataaatgccatcgctgcatacatgctggcacaaaatgatctcacgtgtgctcagtgtacctgcagcttgagtgcaaaggaacattctttcctttgtattactttctccattgttgttgtattaaatattagcgaagaagtgggagaggcagagagcagccaggcagcaaggtagtcatgtggccctggaattcatctttcagaattttcccaggcagggaactgcactgtgaccttcagcacaagagctctgagttctaattctggcttagctggcccacttgtctttaagaagttcccctgccttttattttgagataagcctctccacctaaatgtgtgttccttatttctggacctgttggccaacgtacctttagggagtgcccctccagctggcttcaacatgtggggtcgtagcggggctgcagcctgccctgtccagctctgatgcttcccagcgcctccagctcccctttcccttcctgaggcctcactgagcatttggctgagcccctgccagccgctggacgtggggaggagaaggcatgctcagaccctacagtggcattactgcttgtgctctgtgttgctgtgacacccagcgcaaggggaagaggccctgtgacagagggttagacaaggagaaggggaagtatagccgaaaggctgggagactttcccctttacaggcatgggaattctgaagaagcctctgttcatgccttggggtagttggttgattcctggggactgaatggtgcccactttgcaggaggggatgagcgaagaaggaaagggcagttcatgagaccctagcatatgtcctaggtgctcatattcattaccaatgtctatgaaactaaactgcacattggcattccgtaaatatccattgaacaaaatatctcatttaatacccaaagcatccagggaagagtatcatcctcattttaaaggcctagaaactgagatccagagaaattaaacaacttgccccagatcacacagtaagccagagtcagtgcatggattcctgacctgactgtcctgccaaataatatacaagccatttccattatatcacaaatagaagttttgagtctctaatatgtacaactgagaatactgtcattagatgggaatagaggcagttttccacaataggtggtttttggccttttgggaaatacctaaggatatttcctctgatctgtttggaaccaggtttccccctttccctgagcagtggctgctacaaatacaatctggtttgctgcgggtcatttgttgcagtttgcctttggctcagatcaaaatagaaaatgagccagaacatggtgtttcctgtctctgcatgttcctaccttattcatagtgttccatcttttttttaggttattaattgtggatttatttccatagtaagacaggatctgactttggggccaacatatgttggacccgcctccttctctgctgaagattctctgaagacaaaatgtgcataggccttctccaggatctggatttttgggggattatttgggacctttgcttctgtcctctccggctaccaggctttctgaccttctgtagctaaatagggccacaaaaatgaataggaataagagaacctgaagttcaagctgtgtctttggctctgtctctttggacgcgactgccaagatatttggtgtgacaaaaggatttgaaatagttggcctgtttttttcagtttgaggttgttctgttgtaactggtcttgtttttggtagccatcattatcactgacaacctagagactgagtagaccgccacctccatgtctgctaagatagtataatttaaatctttgatgtaaccagaacacaacccaggtcacactttgcccctgtgtctcatgatgactgaaagcttttggggtgatgattgcttggttatggttttcctggacccaacttggaacccttaaagcctgccaagttatagatactctggcttcagtagggccctgtattgaaacaccaagtgccaggactgctcaaaaggtgaaaatgagatgggtgttctgccaggtggtttagtgaaaaatcagtcaatccaggatcccactgactgaatgctaggcaaaagaaacagttcttttatttgttttcattttttgcagagttggaggtcttgctatgttgcccacactggtcttgaactcctgacctcaagcaatcctactgccttggcctcccaaagtattaggattacaggcatgagccaccgtgcctggctagaaacagttttttaaaaactcattctaattaggaagagaagaccaatacacatggaagaaaagtgtacagtagatagcatgtagtaaatatagtccttatgctacaaaaggaaaggtagttgaaaatgaacattgggttctaggggaaactcttaagtatgtgccagtctgtgctcagaagtacaacctgattggctgtgagactaaagccaactgatagctttaagcagcccctcgggtgtgggctgcagatggttccctaggaagctgggttgactcctgctgtgatgagctgggactgccaggtaggacctgaagcggctgccaaggggctgccaccccaccctgaagacaaaatcatgcagtctaaaaacctgactgctttggatcaaaatcataccctgtaatatgttctagtttttaaataacttgggttttccttaattacttaatctctgctgagaacccagctgcatccatctcttctaggtccggaattatccacagcatctcatgagcagaaacagccatgtcaacataaagttagcagactcgtcgtgtagagagttgtgcactggcaggttaggggggaaggtgttcattcattcagcagatatgcactgagtgcttgcaaggcatagggctcgccttcaagccttgaggacgcagcagtgagcaaaacagaaaagagtccctgccctcatgaaactgacattctttgggaagcttataagcctgaagctcatgaacagattgttcatcttatagtctcagctggtgaccctccatggcagctgctccctgtggcaattcctggattttcctttcagacaggctcagagccgtcatctgcttgaagagtctggggggcttgtctgaagctgcatttgcatatcaagtgctccgttatattttttgtaggatgcagtgagaatactggggggaggctactcgagtccttggtccttggtactgtctctggttagtggtgggttctgggtcactattataggggttgggaggtttaaagcaagaagcagaatggcaagagtagcagccccagtaggctgcatttgctcccgttgccacttgcacgatctttctcatcccgctggcaagactagtctgttcactggcagcccctgcatcaggctgtgaggacgccctgtctacctcccgtctccatccctgtattaacccatgtgctatcaagagcgactgactctttctttacaaggttctttttccttccttccccgtaagctaatagtttggctcaggctcgccagcagaccctccccttttttgctggagggctttggcatgccctgtcttttctttggggccacccagggagttcctgtttcctttctgtgggaggcttccaattcttagttatagcaaaagagcctgtattttttagctcactcctgcccacttctggtcttgaatgacttatggcttaggtgttacaaatgggagtcctggaactcttcccagaatctcttaattccattcttgtggtatatgacgttctaaacattaaaatgatgtaatatataactcccaaccaaaacaaaagaggagatccctgctagccaaattcttccctcctctccatacacgtttttccgtcgctgtgcagtgaatcctgggatgtgtttgtcagtcagcttccttgttcttctggctcctcactccccagggaccaccgagccacagactccacggttttctctgagggcatgcgaagtggaaactaacctatccctgcagccagcccagaccttctacaatcatatctaccagtggtgaaaggcagttcaagatgagttggacacaaccaagaaaaatagggaacaaatatgtcatagctcctctctgtctgctgtctatagaaggaggctaatagcagcagatctggtgagggccagtggcccatggacctgcctgccccaaggcagcaatcatgggagtggggtcaaggaaacactaaggaggtacacctgataggactttttaaagaggagtggccagggttctggccggtttgaagcctggagagaatggaatggcatgagttcagttttggggacattcagtggtaagactggtttctgttttctcttctggaagctcatagatacaggatctgctcattcacttgatttgtgcctcttatttgggcttcaggacacatctctggccaatcgcaattaaaacaccatgcccagttagccatcatcgccactcagagctgtctgctttaccgggctaaaaaaaatgatctttatcaccagttgtaagtgacttaaaaaaaaaaagtacccttccacattgctcagaactttgccgtcaccttcttgaccctcaccaacaggtcaggttgttttaataatctagtggctggtaagctttcatcctttacaattaaaaaaaaaatcactgatttgcataatgcagtgccatttgcctactttgttgggggtgggggctgtcctgttcattgtggatgtttagcagcatcccaaaataccagcagcacctctccagttataacaaccaaacatatcgccagacattggttcccaggggggaagaatctcccctggctcccttacatgactgtcaggtgattgtctttggtatgaaaagtcaaatgggttagacgatcacttttctttttatagaagccaaagccaaatgtgtcagaccttctttatgaaaatataagcgttattttttttctgagtttgtagaaaggcaaagttcctgttgggggctcattacagctgttggtgcctgcactgacagtggcattgttagggatggagcccctgagctcgggggagacagcggaagcgtgcagcgtctgtttaatgtgagtgagggctggcatgctgctggcagctctcaacagtgaagcctgctgctcgataaggcattattatcagagcctgggggcatccagggagcaaaagattagctgactgagcatatatctaaaatgggttatttttaaaaagcaagcagtacaaatactgcagcttgtcttgttttagcatttaataattacactttcactttaccagcaaggcattgagtcagtggcattttatgaaaagcatcctcccaaacctgaactttgtgagtcagattcccatcctgtgtgtggtacatgtggttggattgtacaaacagataatcagagttttgcaaaatgtttcccaaccagcatgggaaaacgtgctgatagcaatatgattgggctttgagggagagccacttgctggctttttttcttttgtttcccatacatggaaatgccatttcaacttgaaatgtggataccttaccagaggattgcttgagcccgggaggttgaggctgcattagcgaactgggactgcaccactgcattccagcctggatgacaaagtgagactcctgtcttaattttttaaaaacccacacacaaaaaaaacaacaaaacaaaaagtagaaccttaaatgctatcttaaggctgaatagtctctaaatattgaaagtagaccctagccaaaagagacattacctgtttctgtaatataatgaatggtattagtgtacttaccttgcattttaaattcaattctgtaaatgtttatggagcatgcattatgtgccagggatgaagacacaagaacaaaatgtggacctgccttttaattgcttacagtcaaaggtcatgataacaccatgtgatggagagaagaaagtcatgattgatcctcgtggaggttggaaggacttcccagaggaggggctgtgtgagctgtgttttgaagatgaatagggatcttatagtcacaagaggagggcatagactcccagacagaggtaacagcagtgcaaaggcacagaggcttaaaattgcaggatgtgcccaggaaaccccaaatgactagatgaggcagatttgtaagaagggaaatggtggtggttggcggcgggggtaggggggtggtgatgaagaagcaaagtcataatgggtctgatgtcctttgctgaggagcttagactaaactgtttaggtaaaaggagccagcaaaatctttaagtgagggagtaacataagatttgcatgttagaaggctctctctggctgctatgtacagagggaggctaatggcagcagatctggtgaggatgctgggcccgtgatctgggaacttgcctgccccaaggcagcaatcatgggagtggagtcaaggaaacactaaagaagtagacatgataggactttttaagtgggaatggccagggctctggccatttggaagcctaaagagaatggaatagcatgagttcggtttgggggaaattcagtggtaagatgcttgtttgtcagaaacacacttgagatgggagatcagtttggtgtcatccatgtcctcttggtaagtggaaactataatataaaatctttcaggccaggtgcagtggctcacacctgtaatcccagcactttgggaggccaaggtgagtggatcacctaaggtcaggagttcgagaccagcctggccaacatggcaaaaccctgtctctactaaaaatacaaaaattagccgggcatggtggcacgcacctgtaatcccagctactcaggaggttgaggcagggagaatcgcttgcacccgggaggcaaaggttgcagtgaaccaagatcacgccattgcactccagcctgggcaacagagcaagactctgtcttaaaaaaaaaaaaaatcaaaaatcttttagtagatgtttatagagagagaagagaggagacttgaagaaggaattctaagtaagggttaaggttgagtggaaaaaagaagaagaatcagaaggaagtggtttcatagtaggataaatcaagtgctgagatgaagtcagttcactaacagactcagagttctattggatatggcatgaggttcttggtgtcaccatcttaggatctgctcatttttggggttttaagaacctgtctgaactccacttagccaactgaagcttgccttcaaagttaacacaatgtgctttctcccatataaaccttttaagctgtttctgatgactgttcctcttcctgttagagctccacctcttttaatttagcctccatacctttagagtaaggtctgcaactttcttccttaattgacagtggagatcaatatgtaacccagattgcaaaaatggtttgggaacactgcatgttctcactcataggtgggagttgaacacatggacacagggtgggaaacatcacacactggggcctggcaggggatggggggctgggggagggatagcattaggagaaatacctaatgtaaatgacgagttgatgggtacagcaaaccaacatggcacatatatacctatgtaacaaacctgcacgttgtgcacatgtaccctagaacttaaagtataattttaaaaaaaatttttaatagtttgggaagaaattgtgggcatgtcatttgcttgaacagattttgttccccagccagaggaccagagaagagtttgtcatggctacagtggaggaatcaaactcagaatagcatgtgaaaggcacattccacacagaaacttcggcccgtgcatcagcactgcagacagggggagaggaaatgaattctcagccagtagattcccaggcatcaccttgaggcagatatggcatattcttggccatagtctctacttctctaactgggcaaagtgtctaatcaactataacccaaaatatcttcccacatggcataagtgtcgaattcatacatagatcagagggagaaatgaaattgtggttgtcttaaaagtttacacagtttagggatctccatcatgaaaaatgatctaaataaatgaaatggtatttttactctttatcctacaagccctatacaaactaagtccataaatatcctatttgatgcttaaaccaaaagctttataaagagaatttcactatgtgaaataatgacttgaagaaatcctattgtggatgcttttgttaagttgctaaaccttttttaaaaagtagataatcatccaagatatcttctttgtgactcttaagttttagtgtatttcaaatgtggatagtttttgactaggaggtttgttcaaacgttcttctcgaccactagggggtgctctaaaggttagtgatgtctaaatgattgaccaatcaattaaaacaccgtgcccagttagcaatcatctccactgagagatgcctgctttaccaggctaaaaaaatgatctttatcatggcatagagactataaaagctgtgtccttttattttcattaacctaattagaagtcaagctaattgtaggacttcatagaactggcatcgggaatagtatgcaactgttaaaaaaatcatggtcttgatgactaattatatcaggaaataatatgcaatataaatgaaaagagaagtgtatgttttttactttttcctttctgtttttaaaacatgctataaaatgttaagtataattaggacacaaaggaaaaattaaatctagttaacattaccttgaaaacttcttatttgccctgaaatctccagttctttggaagctaaaagcttgagacttctatatctggttgtcaggattagggtgattttatttgaattttctttattttcttctcaattttctatctatttactttgtaattacatttgaactatggatatgtaattagttttataaatagaaaaatcaaagctttataaaggaaaatatagcatcagcagacctgattgtcctacttaactcttccacaaactgttttaactatgggcaaggtacttcacttctttgccctttgcttctgtaaaatggttgggtgaaacgaatcttggcagtttgttccagctcttctaaagttccattttaaattttaccaggagacaaaaatggttcctattatgttcactcttgaagcatttattaaccctcacaattggccaggcactgtgcttggtgctattaaagatatctcacttagtatctgggctctgccttcaagggtttccggtcccccatggaaaagaagaccaagtgcacagatccatcccagccctacacaatgatactggaaagctgtatgtggaccagaaatgccaaaggaggttccatcaggaagaggggacttgtgctctgactctgctgtacccctgatcatatgttaccacttatttatgctttaaagaacatcctggcctggatgtttcacagtgtgttaaactgcaaggtagatttcctctttgtttccctggtctactgtatatatgccagtaagccttgtcaggtttcattatgagagatggctataatgcatccagattactaggaaaacacttggtctttgaaaagagctgtgtgtccctctaggtttgaaatgcaaagtcctaaggctttgttatattcaggacatatttcaccttcccaaagactagtctcagctcagacaggatgtatcttgcctgtgggcttgacacaggggttgctgggtgattgaattaacctctgacatcttctgggctgtgcaaaatgataagttcaaaaaaaaatgcagccattagactccttctcattgtttcttccttgaagcctttgtaatctttcttaatgtggttaaattcaagttatttccagttcagacatggtgcaatcagatttcctcatgcgggtgcttttccactgtgacctctttgacgtcagtaactgtttcctgtttatttgaactccctgctcaccctgtagatgactttgtctgagaaaaataataaagcaacggtacttaggagaagttcaacactgctatctgttacggagatttccttctcctttcccccagccgtcaatagcactctgcagcttttcatacagcatgagcttgttattcatgtagaaatactccaaggcagttcttagaacttgggtaagtaagaatagatgtggctcccagcttaacattgccttaaagcaatagctacatttttcataacttttacgtgttatgtctatctttgaattatttccaaaaggtaatctgcatcctcactataattctgagtatggtggctatttcctactgccttggtttctggaatgatacatcttcaaatgcagtctttaaatcatagagacaacagattttttctttaaatggagacaaatctttgcaatctggttctgagattgaatcaactttatagaaaggaagaataactgctataaaaagtctcgcttacagtaatatgtttttagtacataaggagggcatttgttttgcaataataattattataaagcccctaaaatagaaaatatgaattaccagtcagtgttagaaaacttatcagaactgaaacctttgttagtatgttttggttatcaaatctagttttgtaaccccttgcttagcaagcatttcccagaaagaaaagtccttacccggtcaaggccattaccatatagcatcgggaaacatccctgtgtcccagcagctgggctaggactccttccacctccttcgaccctctatacccttgtcccacactgagggttgggggagctgctgcagttgctgtttcggctgctgtttcattcctgtccacttgtgagtgtgtgtgtacctccgccagtcttggaggtctgtgaaggaggcctcgagacccagtgcatgcagctcactgccacgtgtgccacagccacagccaaggggccttcctatgcctcatgcatcaggccctttggagccctgggagcagacggccatggcggctgaagctgcagtggatgcactcatgatgatgaggataataatagttgctaacatttcttgagcatttcacttatggtatgccagacactattcaaagcccttagcttaaatcatttaatcctcacaaacctgtgagttgggttgtcttattatccccattttgcagaagtgagttttgtgagagagaagctaaatacagcacagcaggagttgctcttggacctcaagcatcctggcccagagcccaggtgtcgccactgccctgggcttcctcttagtcataccagggacttgggcactgggcacaaaatctcctctttatataatgtagtggtaccaatagcttctattgattgagattcttttctgggcttggcactgtatgaggcacttggcttctggtttaatctttacatgatcactgtagttatagatgttattatcccagatttataaataaataaggaaacttcttaccccttaaaaatgggtgtgtgtgccatgcatggttgctcacgcctgtaatcccagcactttgggaggccgaggtaggattgcttgagcctaggagttcaagaccagcctgtgcaacacaaagatacccagtctatacaaaaaattagccagatgtggtggcacaaacctgtggtcccagccgcacaggaggctgaggttggaaggatcacttaagcccagaagttcagcgctgcagtgagccatgatcctgccactgccctccagcctgggtgacagagcaagaccctgtctcaaaaagaaaaacaaaaattgtgtgtattttagctgaaattctcctggtagcagaaaatttacttcaggtagtaagaaaactttcttaaggctatgcaaaaaaaagaactaaaaataaagattcagaggtacaacggatgtctcatgcaacccaagggcaggaattggccagctctctcggctgatctgaaaccagaaagacatgaggaaccctggcagttttgctcttggctcactcaccctccctgatctcttgtctctgcctcactctatgtttctgcttcattcttctccttcacccacccacctgtccatccacccacccagtctttctccactctcttatacccaggcatttcccacgtttacactgcaaaagcagtttccgtttcctaactcatgtttcctcagttcctgcacacagcctagactaaattaaaagctttttacctcagtttcagttttctggaaaagagactctgagcaggtgcagcttgatctaactggctgtgcacagatgctgagcgtttacccatgcggccaggctggagcatgggtaaatgctgaggaagggatcaccatgagctgagcagatgcctccaaagatgtttgccccagtgaccttacaggatcttgccctgcctggtccatgctcgctctccagtcactttccttagttagtatcatcttgtcactggtaccatcctggcatagcactttcatccacccggatgttatgtctcttgttcatacaaattgcccatcagctttaactcctatcgaacagcccttaatgagggggccttagggaatgcaccttacttatactgacagccattattcgggggatatttttagccccttgggcctggggaaggaatagttctgaactgatagccagggcagagagtggacccagactgcagcaggtcagtggcatcagagcaagtgacgacaggaattctattatcaccaggcagcagctcctctgcctcccacacctgtaactcacaccaggtgtgggacaaagggatttctgagttgctttcactcccaccggtgttcatcaccccatgttaatgacttgtacttgtggttggctgaatcagggacaaaagagaggagcagggacaaagggcttagccacttggctttagaagtgatgttaaaccggtctcctggccttgagatttcctaccacacaggtcagggcagacttcacctgacagaagccaaaagcctcaggtaaagctgtacagatgtgcaggctcagtttctaggaaaatggactttagaaaaaccaaaatggttctatgcacaggtttaaatacagaaacagtcatctttgccatctctgtctagagtgggatttgggaaacccctctctgccataggagtgactcactacaaccataatccatcttccagtacttccctaaatgcaggatttccaaaaaatgcttcacctagttgcttcacaattgaatttgtgaagcatgatttggtgtttgttgagtcatcagtgatactaattcttaaatagcacagactgagagtagagctgtaggtgagaggttatcttttgcctccttttagagcttcaaatacaggtctttgctttgtaaagggcattcactaaatatgagaagttttactcctttggaattaattttgctggagtgatttgcttttgtagctgatgttgttttattctatgtggcaagttccaacattactggagtctttttcaagccaagcaccatagctgcacctgttttaccccaggcactgggcttataattctagtagagactggtagtgagtgatcatgtttattaatggcagcagagaccctgcacttctcatttgtgggtgacctgtgaaagcacccctaagtagctttttgctttttctgcatttcattttgaaaacagcagtacagttacagcgaagcctcacactcacccactccagcgcttgacaacctgcctgccttcgcagtccctcccgtctgcctgacatcttacacttcaactgcacagtcttcctgacacctcccacctcagtccccactccagcctgacttgcataccctcatccttctaggctggggaattgactcctctcagaagcttccccccaaaccccacctgccaaattccacctccacctccaggctgctcagatgccctgctcggtgtccccataacaccttctgtacctctccactgcacttaacacactgtggcgatgtgctgtgtctgcatgtccatgagcttactgagagcagtgtggagtcatattagttttaggagactgggtccttacccaggccctggcgtaccacgtgtgtgtttagtaaacatttgtctttgttcagaaccttaaaggaaccaagaagatctctgcaagctgtagtagatgtcgtaaagcctgcgcaccaggctccaagtggagctgctgggacctgaaccagagccagccgattttcactgtggatgccattccaacaagcctggttacctcaggcagcagaaaggccattatgggacatgggtggttactcgtgtcccttaataatgggcaacaaggatgcaacaatttctttttgtagctgctttctgactcccattgcctaaacaagggctctctcaaacagcctcacaactgtgtctttcccatgtcttatcttccatctttcagatgaaaataagaaaaacatggaggaagcacatgtgactttagtttgcttctaattgcaagagtaatacacactcatcatagaaactttgaaagatactgaaaggtagaaaaaagaaatgtcaccccgatcccacaacaaaaaactgacttctgtcactctatagccatcttttttatcctttctatgcatctgtctgcatttttggctataactaaaatcatcctgcacattcacgtttgtgatctttttttaaattgaaaatacctacatgagagcacaagcattggcagcttcagcagcagctatcacttactgcacacttgcccgaagggacctgaggacatacttaatacaattttacttctgatgatgactcctcaccccaccacccaccacctgatgatgtgtgggtcttctttccttttcctttttttttttttttttttttttgagacagagtccccctctgtctcccaggctggagtgcatggcgcgatcttggctcactgcaacctctgcatcccgggttcaagtgattctcctgcctcagcctcccaagtagctggaattagaggtgcatgccaccatgcccagctaattttcttgtacttttagtagagacggggtttcaccacgttgcccaggctggttttgaacttctgacctcaagtgatctgcccgcctcagcctcccaaagtgctgggatgacaggcatgagccaccacgcctggcctggatcttcttttctaaacactagagattttttgtcgtttatctccttctcttcaaaagtaatcttggagaaattgctgccaaatctttgcctctctgcagcaaacattttaaaatggggtgaacagaagtgcaggtcaacagagggtttcctcacagcaaaaacattttgcttgttgataaacatgtctttgttttttatacctggtgacgttatttgaggtctttgataggatggaccagtactctgcattaagtcgtcgtcgtgtctcagctggcctgtgtctcctgcctgcttcaagagttgctcataacctgagggctgtgaattacactctgtgttccaggtggtgccagacaggaggttagaaatgagactctgaatgaaaagaaacaggtacagcagaacccatctttctggaattctaaagcttatggtccctcactgtgtagcagaggtgaatctgccagagtctggcattatctgagaatctgcctccagggctgtagatggggctgggctaaagcaagactagagggcaggattttctccccccagatctggaatttagcccacagtctggcttttagattttaggctttcgatgcctactgccttaaaactcttgccaagtgcgccacttatagcagcctaaggaatggccacttccccactgacccagttccagtagccaggtgttcagagcaattggaattcatgtgactgccagtcagatccacgaggaagatgaacaggctggttaacgaaaacatgtaagactgacctccttgcccagagatgattcagggtggctttttgtcttagtcttcctcaggccatcagtggccatccctccaaatggacagatacagcattggcataaaaccttactatgcagatgcagctttttgggatgtttccggtgtgtgtatatcctccgcccaacctgttgctaacctgctaattctaccttaatccttcccatttagaaaatacaggacagccattgctcatcaaagcttgtcccacccaattctgcctctccccttgtcagtcaccctcaaatgaaggccaggagcttaggcagatggcttgctgtatttacatagtttgcctgttggcttacattggccaacccgaagagttgttttggtggtggtggtttttgttttgtgaatcttgccattccttcttcactattaaattcttgcttcgcttttagcagaaagaagtgtttaataaattcaggggatttttttttcttctaattaaggcgttagttaaaatagggcataggaggtcataagccgtgcttccttctgataggggtctgcgtggttacaccaggcttgcaatgggagctgagcaggagcacgcaccctgctctgcccattgttcagctgtgaatgtgtggaaacaccctgtgcaaagccggtggcacttacaaccacaaataaagataggttcaaggctgggtgtggtagctcatgcctgtaatcccagcactttgggaggttgaggtgggagtattgcttgagctcaggactcgagaccagcctgggcaatataatgagaccccatctctactaaaaatcaaagccgggtgtggtggcgcacgcctgtagtcccaactactccagaggctgaggtaggaggattgcttgagccctggaggtcaaggctgcagtgagccaagatcgtgccactgcacttcagcttgggtgacagaatgagaccctgtctcacccaaaaataatgataggttctgtgtatctgcatccgttggtaaaataccactttcctcgcaaaataatctgcaatcccacaaaatggtatcacggggtcccaagtcgatggcactcatcctgtgggccttagctcatgtttcccttgctcagagacgtcgcctgacccccaggcaggtgaccagatatcacgcttcctctgcttttccttcacaggatttaccagaatttgtcaatctgcttgtgtcacttttttttttttttttttttttttgagtaatgtgtttctcacaccaaactctgtatggggagaggctgtgtctgctctactctctatgggatcgcggctccgaactcagcaccagctaatcaggaatttcataaatgtcacaggaaggagtgaggaaacccatttatcttagaggtgcttgaagcaaaacgttttacacttagataaatcttggatcactttttaaatgagacctacacgtttctttcatgaagcagtcatgatttccatagcactttattcacactacttgcatagtatttagtacactgcatagtgacttttaagagtccacttttacctgctaggttgagagtcacttaagggggagatggcatctcgctcatttctacattccgactcttgactcaatcttttgaaggactgagtggtatttccaatgtggatgctactgtgaggctgtcatttggcttcctttttttttttttttttttggaagaaggagtcttactcctgtcgctcaggtgggagtgccgtggcacaatcacagctcattgcagcctttacttcccgggctcaggtgatcctcctgcctaattttttttttatttttttgtatagacaacctcttgctatattgcccaggctggtcttgaacccctgggctcaagggatccacccacataggcctcccaaattggtaggattacaggcatgagccactgcacccggcctccacttctgtttggctgacttgtctaaaggggtgttctttttctgtgattgttctctgcccacttgtgagaactagagcacctgctaggtgtcctttactttgggtaattaaccccacatgttccagattaaaggcatttacctttcgatttacattctctctccaggtacatgacctttaaggtacagagctggaactcgagtcaaaggtttctgatgccttctgtacttttgatttcatgtagcaattcaaggctgtgtgaaatgaactacaggagatccaggtgctgctctgcccaggggatctaatcccaccagaccggttgcactgcaccctgacccatggtcaggatgtttcctggaatacatccacttgacagtctcctctctgtgccacagccttaggcaatatgctgctgatggagctctaggttaattgctacaccacattgggccctctcttgtgtttgtatccaggatcgtctgttttttgtgatggagtttgtgaatgggggtgacttgatgttccacattcagaagtctcgtcgttttgatgaagcacgagctcgcttctatgctgcagaaatcatttcggctctcatgttcctccatgataaaggaatcatctataggtgagttttggttgctgccctgtcttctaattcactgcctcttccctctcctggcatgatccatccttccacttctcatgataatcagttgaaaccttttttggaattaaattcacagaagttttgttttggtttttgtttttgagacagggtctcactccatagcccgggctggagtgcagtggcgcaatcatggctcactgcagccggtccatctggacctcccaagtagatagctgggactacaggcacgcaccactacacatggctaatttttattttttattttttgtagagacaggggtcttgcaatgttgcccaggcctcacaaaggttccaaggatccattaggataaattaataacagtaataaacactgcctgcaatctaaaatttgcctcactttgtattcataaaataggcccgacagtctcagaagagactgtttattcatgaattggttcagccccagtttgctaagaacctgtcatagccaagacctgcagggtgctaaacacactgttgttctctttttttcattttaacatttgaagtgaatcccttaaccatgattctattccattttaagaatctacaccttaactaaagggtgtggctaacctgctctaagttacaagaattacagtcatgtggagcatggctcaccagtcaggagctaggtgagccacttgtgagcagtgtcctgcatgataatatcttccgtgtgtagccccctcccaaatatttgattctccattttgtgacacacaatcttttgatcataatataccatactttgaatggactccgaatctgcttgatgttgttaagtctcagaattcaacagatatcaaatgtaactttagtcagagagaaggttggagacagtgagaagtgtaatagtgaatgttagataatttttattctcacattttcctgtttttttttctgctgttagtgtcctcacctaattgcacatatgctcttttttcttttttattgttttatttcttttctttctttctttctttttttttttttaagacagtgtcttgctattttggctaggtcggtcttgaactcctggcctcaagcaatcctcccaccttggcctcctaaagtgctaggattacaggcatgagtcaccacacccagctcacataaactctttttctcttgagatgcaattgttgctttccttagagaaaaattttcgtatattaggggcatgaatgccaaagtaaaggatttcctgattgaaatttgctatttattaaccttgttaaatgcagttcctatcataaactcatgacagtattgacatcattattaaattataagagctttaaaaacagtgaatattcttaaataccgtgggagtcaaaataggaagagaacaagtagtaactctcttagagagagtgcagtaagactggtgggtggtgctggagataagtgggaacgcaagcactgcatagcaggtgtggcaggtaccacagagacacttctctaattcattctcagtgcagatcccctagacctcaactccatacagtgcatttatcacagcctcacggcactgtgcaggagggaagagggtgcagaactgggaaccagcctggataaggacagtgggagccacctgtttgaaagcagtctaggatctctgctcgttcttaggtcacggggctgcagcaggttgattaggcagcttgttttgagctttcttgaccaggctgtggggattagatcacagcatttttttcccactctccactttctttccagtgtatgctttgtggaggttgctggtatgatctctgatggtgaagggagttaagcgtcgtcctcatgctatcagactccaggcagtaaattccatttttgttctcctctccgcggctaatccagccatctccactccgcttgccccaaagagagacgtttccacatgtagttttaaaaactacatgtaagtaatgactcccctacttgacagggacttctgctgcagatcaaaataatattaacaacaagacctaactgaacacttggactgggtgtggtgactcacacctctaatcccagcacctcggaaggctgagcggggaggatcgcttgagcctggaagtttgaggccagccggggcaacataaggagacccctatctctacaaaaaaaaaaaaaacatatacatatatgttaaaaaattagccagccaggcgcggtggctcacgcctgtaatcccagcactctgggaggccgaggcgggcggatcacgaggtcaggagatcgagaccatcctggctaacaccctgaaaccctgtctctactaaaaatacaaaaaattagccgggcaaggtggcgggtgcctgtagtcccagctactcgggaggctgaggcagaagaatagtgtgaaccgcagggggcggagcctgcagtgagccgagatcgcgccaccgcactccagcctgggcgacagcgagactccgtctcaaaaaaaaaaaaagaaaaaaattcggcaggcatggtggcatgcacctgtggtcctagctacttgggaggctgaggtgggagaattgcttgagcccaggagattgaggctgcagtgagctgtaactgtgccactgtattccagcctgggtgacagagcaagaccctgagtgtcaatcaatcaataaatcaataaaacgagcacttgttacaggaccagcacttcccttgcattcgtctattgattcttctaacaatattattgtataacaataatagtgtccacactgttccgatgaataattaggtcttccaaagacttcatcaccagactgctaactggtagtgaagtcagaattcaaaccatggttctaaccactgggctacactgtcttctcaggagagacttgaggatttagagtaccattacagtgtcagcttcttagtcctttttggtgataggaccacttcaattcctgaaaataaggtagagtgggcaaaagcaattcagtcttatctcaagctttcttgaatcctcagaggctttgagttgggccgagcagcaagcttcctttccttcattggatattaccgcccctcagtctacttgtctcatttgtctcaaaatatggtgggtagacactgtaacttgatgtggtttctgatgaagcagtgccagcccccatcttgacaaattttatttcaattcatggtgtctgtggttcagttctgagaattgattttaatttactcttggacttgaatcccatgttcaggctctaactgatatggttgactttgaagggaacacagttaattaggatagattcaaatgctatttttatcccttggatttatttcacaggataatttaattccattcagtatacaggctgggaacagagtcttaaggataagactttgaaagccaagtccttggaattcacacacagtaaagggcacatttgggtcacagagggtgtggttttgatacaagagcccagtgagaaacttgggagtatcaggcagcctcttttatcatacatgtcccagaacgccctttatcagagctaaaataatcccccagaagatgcctctgacctatccaaacagagctgttgtttgtctgtttggattctttgagggaggggagggagagaggtgtttattttccagcaggttacaaagatgataccatatgcaagtcactgttaaagaaagcttcagaaggtagtaccttaggctcctctgacacaaatttcttctttagctgcctgtgcctgtgcaagaggacatgggccagttacgtttgcacgcattccgtcttgtgttctgaccctgattctcagatgtattcacttgtattttgtggaggaacagaagcccagttcctaggagactcagcaagggaagggcctgcctctctgcctttggttggagggtctggaacctgccatggcccagaaaccaagaagagtaggctgggaaggaggcagtcatcaagtcagttctcccaaggggaaaaaaagaagactattcattcttttgtcctgggcttcttggccgattggaaggccagacagtgctcatgaataatttactcatggtgttgacttttttccggagtcaagccctacagaaaagtaagggaaacaaaggggcatgcatcccattgaccagacatctttcagcatgtttcatcaactgtattaaagggaaactcagctgtcattgacatttcaaccccaaactcctgaagccagccagcacacatttgattggctgtttttgacaaagtgtggaatactgtatctgaaatatgttgggtgaggaatagtttatagaagggcacagtttaaatttcacttcctcctcaccatgttacccctgggcacacagcactttccaacacatgcttttcgactcatgagtctgactgctttgtgccttatgcagctgttggcatgctgggtgcacggtaattagtgtttaccctgaaagctccaaatgcttcccgtggtatttcgccatcccattttgcagatgtggcccacagaggaagcttttgccccacagaggctcactgccaagtctgacatgccgccttttactcccatgattacgtggcacatgaacttttcaactttgagctgctgatttctcctcagattgagagaaaaatgtctacttaatttgactcttttaaaaattcagaatttgggaagagtagcaatctcactcgcaagattaagccctgttaagctagtctctgaacatagttgggggatctgtgtgaatataccgatcaccaacatcatctagctcttgtttctcaagaatcatgagggtccacaggtgcctcgctgactccagataactcagctgggcatagccttgcttggcaagtggtctcctctgtgagcaccacttcctggtctaagaattcacaagtgatccgtttccaaatgaatttgtgtgttggggccaggcacagtggcctatgcctgtaatcccagcattttgtgaggccaaggtgggcagatctgttgagtctaggggttcaagaccagcgtaggcaacataaggagaccctgtctctataaaaaatacaaaaattaggtgggcatggtgtagtgcacacctgtgtagtcccagctactcgggaggctgagatgggaggatcacttgagcacgggaggtgtaggttgcagtgagccaaaattgcaccactgtactccaacctgggtgacagagtgagaccctgtctcaaaaaaacaaaaacaaacaaaaaaaaatggtgtcttgggccagtgatggattttacatgcctgagttactgtgcactctctctctctccctgcagttcttcccctctggaaaactgtggcaatctctctctgattcccacctcctaggacctctcttactcctcagtatttcttatcagcagactttgagtccccagatgtctttcatttgagcctggagttttgggctcttactgtcacctcacctctattggaattcagttctgtatttatattcattctactcattctagtgaggaaaatctttttagataaagatgaaagtaaaatttaacagctctcttttccctttgtcatctgctggcattattccttctgctgcaagaagtaggtctcttctctcttgatttgcatactgcagagactactacaaattgtcatttgttgtttgtatagtccttgtttattcagtacatgccagccatgggaatgctcagtatattagtaactttcacatcagactttggctgtgagccctcacctgggactgatactggctctttgagctttttagtcatgtgcttgtctcttctcttacttagcttgtcatgccttgctgtgccatggtggcctcattcagtgactgctcttcaactctcaccagaaagtgaccaccattcctgacttccaagatccttcttcaaggatatgatggagagctcagagctttccagcttcttagagtagctcagcatttccctcaaatggggtcttcccttttcccgtagtgaaactcatcagccactgttctgcacccttgcatggcctctggagatcttttaacaagtatttgttgagcgtcacccttctgccaaggatatggatgtaatggtatgagcaaaaacaaaaatactcgccagtggagggtatgatccagtgagggagaaagatgtcaatcaaatgattataccaataaaaagtagcaaccatgactagtgctatgaagaggagaaatacaatgcagtgaatgagaacctagaatagggtgattctatccagttagggaaagatggaagatttttataaggaagtgactcttgggctgaggtcacggtaaagagggaaggaaggaacatttgagacagaagaaacagcaaacgcagatagatgcccagtaacaggaaggagtgtggcaaggtcaggggtttttagagcaggccagcctggctggagtctaggaagcgcatcttacttcacttggcattttattatcctacagtgttcagtcagctgatgacttcaagattttattaaacactccttgtaaataatttatttgaaggttaggtaaggccggtcatgttgccaatccctggaggagccatctattcacagtgagttctctgtgtccaggtctgtgcatttatactcaacaatgggtttataaaatattagagccagaggagacctcaaacgttgctaagggccaagttatcttttacagatgagggacttcaggtgtgaaacgtccaaaaattgtttctcatagtggatattctcttcggatgactcatctgctgtttgctttccatctccaggaaaacaaaaatatggctagaaaattttgtttcagtcttcaacttacagctggcatgaagagcaaatcaagacattttgaggcattcaaccctgtttactccattgcagtgagaaaaatccagttgagatcagaacatatttcctgagctgccacctagtgccggatgttgcattaggaggtgtagatacaagatgagtagatgagatgtctgccctttgaggcgctttctgtggggtgagagagatagccattaataagtcatggcagctgggttccaaaattggagttttcccagggtatcttgggagcagacagaatggccacttgccctaagatggatgttcaggcaaacttcctggaggaggtgatgcctgagctgagtgtgaagagttaaaagctgaacaaagataaggagggtgtttaggtaggggagcaagtttgagcaaagcagagaagtgtggtgaatgtgtagttaaagtggaaaacgacaggaactttggtagcactggagcctgaagttggaggcatgggaagagggaaggctagaggaggctgcagaaatgaagtattaagcacttactgttcttgagatgtttgaattctgggtcacttaggactttgctccattgcctatcacaggaaacataaaaatgacagtggcttaagccagatggaaacatagtgctctctcacatgaaaagcccggaggtaggtagtccagccccgccatggaagctccgtggagtcatttgcaacccagatttctgtgctttctgttctgctgtagacagggtcacctccttgtctaaatggttgctgaagatctaggaatcatctctctattccaattccatgtagtaagaagggctagagggcattcctccaaactgagtcagctccctttaaggggcctcctggaattccacacagtacttaccatggaattggccagaacttgatcatatggctgagtctagctccagtgaaagccaagaaatacagtattacaagtggccatgttccagctaaaaatcagcattccattattaagaagggaaagaatcattatttgatagaaaacttgcagtgtcagacacaaattccatgccagggagtctgggctttatggagcaggtaacctttgaagaattctcagcaggtcttatgacatgagtggatttatattttacttttacgtgcgggtggggggcatggcatgtgtggacatacccatggtaagtagcagccaggttgcaagggagaggttcattttgaggcagttgcagagttccaagtaacaagataatgaggacctgaactaagacagtgatggtagggctgatgagaaaggcataagagataatagcaagtaaagctgataggacttagtatttgggtggattcagggtaaaaaagaaaccggaaatcatttccaggtgtttagctagaaggttgagtggatggcagtgccattagctaggagagatcatgtgcctaggaagaagtctaggcaaaagaggaagaagttttagaaaggttgtatgacaggtgcctgaggtatactccagtggagatgctccatggataggggcataggagtctgaagctcagtaaagaggatgggctgaattaaatatttggaagtcatcaggacatagctattagttgagaccacgagactgaatgagatcacccaataggagtctcttaaatggaacagtgtgagtcaaggacagaaccctggggaaccagactccattagaaatctgcctaaatttggctccagggttatagaaacaattggtatgttcatcatttagagtaagtatccccaaagtgccagtgtattaaaaatataattccataaaagtatagaaaaagatcacttactttagagtatgtgtgtgatgctacatatattcttcctactgaaagaatgctggacatggttttcagaagccctgcatgctagacccagccctggtcctggggatgtgggcaggttgctgaatgcccctagccctttggcccatctgtacagtggaggtgccattggcacagcttcccagcagggtccttgtaaaactcaaatcagatggaagtagaaatgcgaatgctttttggaacatgccgtgtcaatataagaggttatctttgcatatgtgctgtcacctgatttgggttttcttggtatccataggcataggcagcaattattctcaagacactgcctgaataacaggtaattcttcatagaaattggagttttagcttgtaaaaatcaaccttctgaagaccagtctctatagtaaactctggtcatgcttttctttgaaaccaaatcattttctctgtattttcacaatattttgaaattgcaagtgattgatatacttaccatgaacttaccataaacccttgagataattttcttaggaagtcctagggcatatgtgacaggttgtacaacctgaagactatactctggcattttgtttcaatttcaacagtttctaatgtttaggggaagcagttgacctcattttgagtttacgccttctggtattaaagcagatgtttgatggttaatttgagaggagattcaagaaccttttcagaccattagtggagtgaacatcctgaggatgtaatcccagtaatgcagtttctcaaaggacctaactttataacagatagacatttaagccctgggacaccttgatcatttttctgtacttcatatattaaaccagaatgctgatcctggcatacctcctcagggtttggccttttcatcagtgaaggctgtgactatttggaactaattgataaatgtgttagtggctttcaccagctaatgaaaccaggccaccagttttgctcttcttcccaccaaattgaccaagcaaccaattgcttcattataattacagagaatcttggatttatttgctgaacaagaaaaatacagtcatttaatctttatgtattaaatgaacacaaccatttgtaaaaagtaattgaattgtacagttcaacaaatgtttatgaaaagtctacccaatgcaaacctttgtcaggctcttagggagtaaaagaagaataaagacaggtcctgccctcgagcttggggtgtttgttctttccgttaacaaataatttttttgttgttgggcactcactgtgtaccagacgctactgtgagctctggaaaaatacaggaaataaaacagacaaaaccccctcctctcagggagcttaacttctagcacaagtagtaggacaaaatatagaaagaacacaaaagtaggacaaaagacaaaaatatattgaatgttagggtgattcagtatatggataaaaaacttggtaagagcaatataaaattcagtaacaaagatttactgtttgacacagagatttttaaaagcttctctgataagggacatttgagcagatgaacaaagacctaaggatgggaggaggcagctccatgtgaatatctgggagaagagtgttctaggccaagtccttggagggagagtgcgcagtgggatcaaggagcagcagagggaccagtgggctggagcagatgaattcgggcgtcatgggcgtcgagggcccaagcctttttgttttctttctgcaatacagaatgctaaccacatgtgttgagcatttgtcctgtaaggataaactcctctgtttaattgtatcttctgtatgacagttgcacaaggtaagtggcattatccttattttgcagacaaaggtcagtgacattatcctatatttaaggctctgggaagtgaaaggacttgttcaaggtcacacagtatgtggtggaatctacaattccactccatgatatccttttgaatccatgcaggtgctgagttccctcacccatcaggcctttccacacgtttccctctgcttagaatgctcccccatctctttgccaagcttccagctaccaattcttgcagtctcatcttagtcatcacctcctctgataagcctttcctggactcccctaccctccagattccatctaggttaggtgccccctctgttcccatggcatcccatgaaacccttcccttagtgctttccataggctgtgcccctgtgcatatgggttcatgaaggcagggactgtggctgtccaagcccagcccctaggacaatgacaggagtgttaggtgttcttaggtgttcatggaattgaccaaggcctcaaattctacgctttttttattttaagatgacaggtcagggctgagaatatattatgattgctaccatttattgaacatctactacgagccaggctctattctgagctctctgcattaactcacctactcctcatgacagcgctatgatatgacactcagcttgggaagagctgcccattgattgtcttattctggcccaaacccatgattttctcataactcaaagcagtcttttttaaataagtgaaagccttctggaaagtttctctgattgaccgaaaaggatgtttgcacatctgtagtagtgatgcatttatatcctcatacatatttatttggatctgacttcgattctttccttagaacagattcctggaaaggcacacaaattaacgacttttagagctggcattgtggataagagctggggctcctgagtagaatggacctgggtgtttccagtcttggttctgccacttctctgttgtgggatcttgatcaggttactttacctctctaagcctcagtttcttcaatgataaaatggaagtcctggaaatactcacctgagggtggttgttagaattaaatttgtgatgtggaggtgcatgtaaagcctttagaccagagcctggtatgtagtacatgctcagtgatgttcacttttaaacattctgtttgctaccacttttgggaaaagcatcaaacacatgttccagtgacgggtattggtgccatttttctagttcccctcatagatcttaagtgcacaattggataaattttgacatatgtacacattgtgtaatcaatactccaaatactatatggaacatttctgtcatcctagaaagtttttagtgcccctttcagttagtccccaaacacccccataggcacccagtgattctgtgttgatattataggctgtggatatccacattgaaactattgagtgtcttcaaagtagaattgcttctcaggagtgtccttttcagtataagaggatgggctctttaaactgactacatgagtgtaatggcagttatgatcagaagagactacccaaagaaagacttcatcccatcagtcagttttactctctgtagagaaaagtaattacaggaggataaacaccagcacatcaacagttgttgtctgaggtaatataggtgatttttattttctttttgatggttttcaaatgttctgtattgaacaagtgttgtctttttatcattaaaaaaatgccatcctatttatttatttatttagagatggagtctcactctgtcacccaggctggagtgcagtggcttgatctcagctcactgcagcctctcctcccgggctcaagcgattctcctgcctcagcctcccaagtgcctgggattgcaggcatgcgccaccacactcggctaatttttgtatttttagtagagacggggtttcaccatgttggccaggctagtctcaaattcctgacctcaagtgatcccctacctgggcttcacaaagtgctgggattacaggcatgagccaccgcacctgggcagaaatgctattttagaagtgatctcatgtgatactatgtttttcaacatgatgtcagaaattggtaacctgctgttttatcagttaagttctgtcaagccccagcctcatgctgtgaccactccttgtctgtgaaacccagttctacagaagtcacaaagccattgtcttagtctgctcagtactgcttagtctgctgccataataaataccacagactggattccttgaacagaaatgtatttctcacagctctggagactgggaattccaagatctgggtgctggccaatttggttcctcatgagggctctcttcctggctttaaggtggctgccgtcttgctgtgttctcatgcggtgaggggatggagagagcacaggctttctggtgtctcttgttataaggtcacacattccatcatgagacctcacctttgtggcctcacctagccccaattatctcccaaaggccctacctccaaatgctatcacattagagcttagggcttcaatatatgaattctggcaggacacaaaacattcagtccattacagccattcattcatacacgtgtttggggttttcagttacattaagcaacatgttttgcagctacttggtttgatagtgccaaatctacccggaaatgatttcagccctaaggaaaacagctcctgctacagtggaacacacagtagacaggcacgagagaataaccaaggattagaccgaggcgttgtcatgcgtttggctcattaagccatgcatgttaggcttggagctctattttgaggtgtgttgagaccaaatccttctcctagatcccagtacttaagcctggcaggaaaaaaagctgagtacactgtggttttagagtgtaccttttgataaatagtttgcagcatgtccctgaaaggggaattttttcctttgtcttgcaaatgtcaaattgtacttttctgtaaactttgtaagtagaaatgtgaagtggtacaagtgctctgttgctttttggtgaaaatgctcacacatgatgaatttctcagttcagttgcaaagagaagttagtgaaacctgacaggcaaactaccccacaccctggagaacagtgtcctgggggtgtctggtttgctaggtgtgtggctggtgcagcaatgggaaggtggcgctttgactgcctggcccctcacatcttgctcctcccttttcactgctcctctggcctccagagtagccatgtaagcctgtgctttcacgtacagaattgctgctctaccctgttcttggcatttgcgtaaaaatttactgtgttccgctgacaaaattctagaatctcaaagctggaatggagttcaaagttatatacccttcttctttcaaagcatgaatatccaacatctgccgagcagtcatttttttctgtacttaaacacctataagcaaagaggaacttacttcctccactttcagggatgtacggcttttggaaatttcgcctttctgttgactcaaacattgtttcccagtagcttcagttcactggttctggaccacctataaggggtagacttaaaaaaaaaaaatacagctctcttacaagaaagctgtggagatatgtgaaggcagtctgggtctcccaatctagtttacctgttaacaaaggaaatactattagcctgatagtcgctcgttctagctgtttcttcaggattactgatttctcagtaatccataaaccatccatgttattaggcattctagatacttggatcaatatccggttgacttgtcacgttcttctcttacgaaatcagaactatctgaactagcagttggctaactgaactgagttatgttattatagctcatgttacttcttttgggtaagacttggtctttttttttgagacacggtctccctctgttgcccaggctggagtgcagcggtgcagctcactgcagcctagagctcctgggctcaaaccatcctcccacctcagcctcccaagtatctgggactacaagtgtgtaccagcacacccagctaatttttgtaatatttttagagatggggtctcgctatgttgcccaggctggtctcaaactcctgggctcaagcaaccctcccactgtggcctcctaaagtgctggaattacagcttgaaccaccatgcccatccttggtctttaactggatattgttgatgctgactatagagtagcaagcacggtggaaagttaattggtgtggtgatctcaaaaaaggatatttaaattttcctgttgtaaggatctcaggaatttaattcctgcatccatttgagagtatagcttcagcctgtatgtgcacatgaaaatagagaaggtagtcataaatcccagaactgaggatctctgtgcacagcccactctgcaaaggtggatattttcctctcaaatcaatctgtgacttgctcaagggtgaattaccaaagatgaaacatgggctgagcacgggggtgggatgggggagacaagaaaatcacctttgggtatgtcaaaatagaggtacctatggaactccttcaaatggtccatctcaaagttggaaataccaggataatgtttaagactggccacagactcaggttgattgcatggaacagcatgaaaatgagacagtattggcttacagttaagaacgaggctttgaagtcaaacttagatttaaaacttacccccacaatgtactgtaattctgtgatattgtaccaactctttaattctctaagcctccgtttcttaatctacatgaggataacagtactatccattccatggagttacagtgaaaattaattcatgtggcttgcttattccagtgtctgacatcagcaaatcctccatatacattatcagttgttaagaagaaaagtgatccagggaaggaaattaaacaatgaatttacttgaaagacagattccataaggaaattgttgaataaattatggttatacccgtactgtggaatattatgcaacaattaaaagaaagaatacattagatctacatatattgacctggatggtttgtccctgatagataaataaatgaaaaaaagagagatgtgtgctcattttaatcccattaaaaaaaaaagcagtagcgaaagctacaccaagagtctcatacgtttcctcatttgtcatggctacataagggcttgcatcttgagctcttttttgttcatttcatttgttatccctcaatttctggcacagggcatggcaatatttcttttttcttgtcttcatttctgttttatttctagcaactgagccaacatttgtctgcaggaattcatggtggggagtaagtgatgagaagatgggtggaaacacagtatcatttattgactaaagagcagtgtcactttaatttaattttaaaatgtaaattaatgcatatacataaaaaggacacttttagctgttctaaaatgattacagtgaatgctaaatcctcttcatacccttgtccccagtctctcaattcctcttcctcaagacatgtccttatatgtccttccagaaatggtctatgcatatgcaagctctgcatttgaatgtctcctgttgaaaaacaaatggtggtatattatctacctgaagaacagagattttttcctaagtctttagagagatgaaatctaaatccttaaagaaaggtagtaggtaggcaatcttttcttttcttttcttttcttttttttttttttttttttcgagatggagtctcactctcactcaggcaggagtgcaatggcatggtcttcactcactgcaacctccacctcccaggttcaagtgattctcctacctcagcctcttgagtagctgggactatagcacatgccaccacacccggctaatttttgtatttttagtagagacgggtgtcactatgttggccaggctggtcgcaaactcctgacctcgtgatccgcacaccccagccttccaaagtgctgggattacagacatgagccaccatgcccattcaatcttttcttttatcagaagggtctatgggtgacagttcaagtcctggaaataattctgctatctcttgttggagaaagtgctggttttttcagatcaggcaacaggcttataaacgtttattgcagttacaagctacaaagaaagatttctttccagcactactgctccaggtagagcagttgcaccagtcattatttataactggattaaagagtagcagcacatacttctaccgtggttatagagtgccttctgttgtacagagtggactgcttattcaccagggagttctcaaacacctttctctatgggcgctgtcccaaataatgtcaagagagaaaaaattaaaaatgagctcctgccctctaagaacagatgggagcagccccaaatcttgcaaatgaagcaagagggggtattcagtctttaatccaagcagctagaagcttgcctttcccaagttcacccagtgaggattttaacactcctttgacaaagaaatggggccgagcagcagaggaaggcaggtgacactgagtcatggaattcaccctttcgagcccttcctgggggatgtgtggctcttgggttggttcttgaaggaaaggaatgaatgtaagagaggaagggaagcaggcttttttttttttttttttttgactcctacacagaagatggaattgagaaaaatatactgtggcggtgaaatcaacttacaaaactgaggaggaaaattttgacaaaagcaaacccaaaatctgattactgtggggctgtccattttattgctgcaccaaggagcagggtagatactattttggcctaaagaacactgaaattttgttttctcatttgcaaatagacaggttcaaacccgtcagaggccgtaactgagtttccctgtgactgatttgtatgtgtgttagtggttttttttttttttttcctgtaagaatctggttgagtaattcagaaggttaaaaaacaacaaaacagaaataagtgagaaaagttaactgaggtctgccacatatgccgggaaggtgcccacagactggcagaatctgtgcagtctttgtctgtttctgcctatgcaaatactaagccacgctcaacagagcttgagcgttgtatctgttcaactgccatttaagaaataggactctgttctcaacagcttattccttggggtttcagaatgtaaaatattaagtgtgtataatcacaggccaggttcccagcatttctcggcatttcagctttggcaggaggaatgggaaaaactgaagtttttatgtccaggaaggctgagtgtaatctttgttctgtggcactgggaaaggaagtgaatctgttacaaagcgctttacctctgaagcatgtctcaggggcagctgtgctttgtgccatgtattctgttttcataaaaagaaagaggtagagtcgagggcttaccatgaagagtattttcacagtatctcacttgatatatcatccagggaaagtgacctgtgttatactttgtgttttaagatataactctagaatcaaaaacttaccagagaagctcaagatactttactttgcaagaattaattctcaagataaaaactcatcagagttcaagataagaagggttcaattaacaacacattttaaatggaagaattatttaaaaaattgttttaactttgaatgagcttagattaacttacctgttgcagaggtaggtcagaccccatgtcatcatttgcccagaaaagtcccagtttgctcccataatcccccttcatgacccattttactctcagaggcccattttgtttattgggttttttttcttgagagagtctcgctctgttgcccagactggagtgcagtggtgcgatctcggctcactgcaacctccacctcctgggttcaagccattttcctgcttcagcctcctgagtagctgggattacaggtgctcaccaccacccccggctaatttttgttatttttagtagagatggggtctcactatattggccaggcaggtcttgaactcctgaatttaagtcatctactcacctcggcctcccaaagtgctgggattacaggcatgagccaccgcacccagccgtctgaggcccattttgggcggtacactgcatggtcatcatacaaagaggtgtctgcatttctacttttttttctttaagatggtagaaccaaacaaaaaagggtgtttttacaaattgagaggggtccctctgtaggaggggaatttctccagcattttcctttgatggagtattctcctctcgttcagaaataggaaatttagtaactaaagcattaagaacagatttattttttaacatcagtcactaccttagtttcagagacacactgggggaaattgcctttcccttacgcctcttgttttatgtcctttatatgagatgttaatatatttacatgaggtataaatttgtctgtaactttataggtttgtattcatttattaatccatccatccattcatttactcattcaacaaatgttaattgagacctattttttgcctggagatataatagtgaccacaataggcctgctccctgcccacaggaagcaggcattctagtgtaagcacacaaacaagtaaaagtaattaccaattgtgaaagttacatggaaggaaataagtgagcttttatttgtggttttatttcatagagctgaaggaagtgaagagacagatacctctctccccacttctttcattgctgaatgtctgaagtatttcttactccattggactactatgacagaacactatcgattgggtggcttgtaaacaacagaaaattatttctcactgctctaaaggctggaaagtgcaaggtcaaggtaccagcagatttggtgtcgggtgagggcctgtttcttggttcacggatagctgccttctcactgagacttcacatggtggaagccgtgagagagctctctaggatttgtcttttcttttcttttcttttctttttttttttttttttttttttttgaggtggagtcttgctctatcgcccactgcaacctccacctaccggcttcaagcaattctcctgcctcagcctcctgagtagctgggattacaggcatgtgccaccacgcctggccaattttgtatttttagtagagatggggtttctgcatgttggtcaggctaatctcgaactcccgacctcaggtgatccacccgccttggcctgccaaagtgctgggattaggagcatgagccaccacgcccagccggatttcttttctaagggcgctaatcccattcacaagggctttaccttcatgacctagccacctcccaaaggacccacttccaaatacagtcacattgaaggttaagtttcaacataccaattttggggatacataaacattcagtctatagcagtattttatctggggtttcaaactcaaataccttcagagtagaggccaatggggacactcctgtctcatggttctaaccagaggggacttgcatatccattcacctaaagctccgttaagaaaggtgaggagccccgagccagacccacaggaagtgtccccaggttgcatttggctctggtcacatattcactttttccagagtccccaaggtatactttagttccacatcaatgcctaccaggcctggttcagtcttacatttcaataggtccccttgtgggtctcggagaaaaagagagcagcattagaattttactaccacagtgagtttttccacttcactttggaaacattgagctattcctacgcagtttggatgacagaaatactgtgctcagtgcaatctactggaaaatctgagtgcttggaaaaatgtcaggaatactctcttttgtcatggaatttctccatattgcggcggtacttcagtgtgagtcagcaggaggaacttcggtgcaccaagcaggcctcacatcagtggggttgtgcgtcccagctctgattgaagtcaggggggtgggtaagtgatgtcctggccagtccagggatgggggctatttctagtgtgcaatgctggccctcctgaaccaaatgtgaacccccctggactctcgcatgagtttctctggaaagctcgtcttctcttctttacccaacccctccccctaccactcttccagaaagttgctcttcagaattccatgaaggatggaagcagccctgaactaactgccctggggctctttattctcaggctaccaagaaaagaaaaaaatgctaagaagcagggacctggctgcctgatcttccctatggtcactggctcttcttgaacaggcatgtaatgaaatagtgtggaacagtaagaaagctcctacaggcagaggccatccatgaagcctcttctcaggcaatggagtcttcaaatggaatgaccacagactgttttctttgaaggtgaatgcacatgtctaagccctaaattgccctgctaaaatcgtcttcccttggacaccaaaagcatagctgacaaaagcaaaaataagtgagagggagtacatcaaactaaaaagctgctgcataggacaggaaacacttgacaaaatggaaaggcaacctatggaaagggagaaaatagttgcagatctgataaggggttagtatccaaagcatataagcaacttatacaacccaatagcaaaaactaataataataacctgattaaaatggacaaaggacctgaatagacatttctccaaagaagatatgcacatggccagtaggtttatgaaaagttgctcaacatcactaaccatctgggaaatgcaaatgaaaaccacaatgaaatatcacctcatacgtgttaggatggttatccaaaaacctgaggacaagtgttggcaagggtgtggagaaaagggaaccctatgcactgttggtgggaatgtaaattggtgcagccactaagcaaaacaatatgtaggttcctcaaaaaaattacaaatagaactatcatatgacccagcaatcccattcctggatctataaccaaaggaattggaatctggatctcagagatgtctgcactctcatgatcattgcagcgttattcacgatagtcaaaatatggaaacaatctaaatgtccttctgcagacaaatagataaagaaaatttgctatggaatattattcagccttaaaaaagaaggaaatcctatcattccggacagtgtggatgggcctggaggagattatgccaaatgaaataaggcagacccagaaagacagatactgcatgatctcactcatatatggaatctaaaatagtcaaaatcatagaagcagggagtagaatggtggttgccaagggtggttgggggacagagaaatgggaagatgttgatcaaagggtacaaaatttcagttatgcaggataaataagctctggaaatcctactgtacaacataagacctatgattaacaatgctgtactgtatacttaaaattttgctaagagagtacatcttaagtgctcttatcaccaagaaaaaaacacaaaggaggcaggaggaaacctttgaagattatgtacaggtttattgcactgacagtagtgatgattttacaggtatacacctctccaaacacatcaagttgcatacattaagtatctacagctttttgtatgtcagttattccttaataaagcagttatttttaaaaatcctcttccctttggtcccccagcctttaacatggcaattgacatggcaattgacatgataaaagctactgtatttccttgatttaaaaaaaccacagctcacaaaatgcccatgattgctgatttgattaaaacaactgtactagcagctggcaagtgtttttttagccactagttttaaggaacattcctgtttcagaagtatcaaaggggagggagcagcacagatcatagaatcaaagtgatacagagattagagttgtgttcccctctaggtagtgatagaggaattgtttcctctctaggcacagtgatagagggtggcttcgttaacagtattattaaggccatcttactgacagcaaaagggaaacaagacagagtcttgatagttgggtaaaaggatcagttaaatttgaaagcgcttccttttgtatgttccggtcagtcttctgcaggaggaggatgtataaagtccactgtgtcagaaaagcagtcagtctacccctccccagtttccatctgggtatctttgtgctcctggtcatttctttcccagaaattgggggatctggtctcagataagaggagtgggtttggatgtcccaatatcacatatggtaaggatgaaaaacatggataagatgattgagtttatcttgtatatgaggccatgtgttgtaaatggtctttttttgctaactttcttgactctctagatgtatcttgaggagtgaagcatgaggacactgttttactcagtcacaacctagagtcaagtttttttctgttattttctcaagacagtgctaccaattagattgtatgcatcccatttgtcctcatttgattcccatccatgttctcaccttctccaaggtgactgttattctgattaatgttcagattcctgtaatgcattgttagcattgggtgctggatctgagccagtccagggtctggagagctatgcagagatagaagtggactccagaaagaggcccccgaatcctgccattccctctccaaggtgccagagtttgcagtttccaggaattgcatgtgatgcagattgtaaattacgcgtaaatatgtatttgtgtcttaaatgacttttttagtttggagaatgcccttcaccctatgactggcataccgcaacacactcattagccctttgttggctgacactttgaaaacatgcagcctcaaagaccattgttaagtcatccatggggtttgtttgaccatgaaggagacttcttcaccattgagttaccaggttcaacaggtcctgggcatctgctttgtgctgtttacctctgaagatcaaaagataaatcagaatctttgctctcaggatttagtctactgggaattctaaacacacataaattgacgatgtaagatatggtaccataaatgctcagagtgaaatgcaaacagaatacagtgggtgcttagaaaaggcaactatgaatgttggctgggtgtggtggctcacgcctgtaatcccagtactttgggaggccagcgtgggcagatcacttgaggtcaggagttcgaaaccagccctgccaacatggtgagattctgtctctactaaaaatacaaaaataaataaataaaaataaaataaaataaaaactagccatgcatggtggtgggttcctctaatcccagctacttgggaggctgaggcaggaggatcacttgaatctgggaggcagaggttgcagtgagccaagatcgtgtcactgccctccatcctgggtgacaaagtgaggctccatctcaaaaaaacaaaacaaacaaaaacaaactatgaatgctgatggagaggttcagtggaggccttgaggagatgacacttgattctgatatgcaagttttccattaacagtgaaacagggaagtccatgctaggtagacatagcgacagggacagaggcgtggaggcagaaaagcgtcctgtgctaaggaatcatgaggactcggtatgatcagaggaccagagcctgggaaggagcagggcagagctggcagctgaggtagatgggggtgagaacctggaaggttttgaatgttgggctaggaagtgtgggctttattttatttgcctttcaatagaagccaacagaggtttttgaggaagagactaacaggaaataaatgcagtgtgttagagtaagtaacagaggagtaagcctggaagccaggagttcaagtaggaggtcttctcataggtcaggcaagaaacagtcacagcttggggcaagccagtaatggtgggaagagaaaggaaaagaggagggggagcgattcacatcgaagggagtctgatgatgtggttgggggaccaaggagtaggcgttaaagatgactccgagatttccagtgaaggagcttttaactgagtagggatagcaacagagtacagtttagtttttgtttttttgtgtttaaagaaacacttctggtagttttgcccataaagcagttagagatgcggcctggctctccggagagaggtgtcaggatagggatttagactggggagccatctgtctaagggaatacttgaactcacgggactcaactgcaaggtaaagtgtcaagcagggcaactgtgcacaactgggcagattgggccctgaacaaccctagggagtgccaccgtatcctagtcattgtagatttgtgcaatgattgaattttctggcagatggcagtcagatgtcttgagaaaggggcacctttttctaatgtgcacaaaggtaccatatggtgtggcaggaatgctggaagtaaacccaggcaagagccaagaacagaaccttagggaaccagctatcctataagggagggtggaggaggaggagcctccggaggagacacttaggggtggtgagagacttaggtaggatttaagtgtttagttgcctccaatttgcctgaaaatagagtcaccacacagtgaactctcatcttactttggtttaatgactcaagtagagcctctgctcatattatccatcagttcttccttttcacatagccggtgagttttccttggcactagcaagtgggatcattaactgtctccatttggttcggatgtagaattattaaacctgtggttctggtcttgagagccaatgcctggcaggtgactgtggcccagggtgaatacctgctgcaaagcctcctctagaaggcccactgcagagcctgcctggggagctcctaggagggcaaagggcaccctgccaggcaagtcacctgtcacacctggctccagccagctaggagtcagattggggcagccccccacccagaactgccagagcctctcggatggctcaagtcctcacctctgagggcctggcagggtgaagaacgctccttgcctcctgaaccatataagaaagaaaaggcatctccagagctatagcttggaggcttggctcctttatggcataaactacaaaggcgcacagcctccccgatgtgtgccaataagatggcataaatgcttcttgtggaagagaaggcttgtgccctgccttggcacatgatcctctgcccacacatgcttgtcattgctgcttcctggcgcttgtgacctcctttgcatcagtggaaagttacaggaggagagatagcaccacctttctagtcaggaatctgtcacgcaacccagatcaaaaacttcaagttcacttctgtgtcaatgggatcccgactctgtgggtggatagaacattgtgtggaaaggctgtaaaactcagagtgtaactgcagtttttatctgagtggctggaactctagcttgtttattacctagatcagacaggtaaaatgttctactttcaaataattcatgtttttcagatcttgaattttggtaaatttttttcatcagttgattctgtttcttaatttgaggaatagagttccttttctaatgggaaaatatatcacttgtcatgtctgtggtgctttcttgtgttctacaaactctacgtgagcataggctgtctggctctggggatcagaagcactcagggagctctgaggacaggatttcatatactacatcctgaaactgggcagatgatcacatgaccctttttttttttttttttttttttaaagcagggctcagaagcagagagagaaagagaatttttccacagcctcagagagaaaatccaggaaaatccaggagtagaactcatgaggctgaggttctggaactgtgttcccaaactgccttctctggaaaaaatgcagagggaaccagccgattcctagtaaaaaatttttgacttactgactttcaaaaagaaatgagttccatatgatgggaattgcattctttgatttggacttaaaggattttctgagcttttaaatggtttcctatgtaatattccatctcttctggtttgggagttttccatgaaatgcctttttaaaaaatacccaaagcatcaaatgagcttttcagcttgatgaagaacttaagaaatttcatcattccttttcttcctggctgaccttttaattttacgcaagatatacaggagtgatttgtcttgtctggtttgtaaggatttttaatcaccagccacacacattagtcactggcttttgtacgtacaagcccaattttctttgttttgggggttttttaaataagtttgtttgttcatttatttggagacatggatcctgttctgtcccccaggctggagtgcagtggcatgatcatatcctcaaactcctggattcacgtgatccttccacctcagtctcccaagtagctgggactacaggtacacaccaccacacccagctagttttaaaaaaaattttatagagacagggtctcactgtgttgcccaagctgacacttacagtaacagtaggatcagactgagagctggaaaaggaacagcgcaatgggattggtagcataaaagatttaccaccagatgcagaaagcagttctcaccattgcttcctcagttccttagcatccaccacgcgcagaactttacactttacactcaaggggtgtatgaataaagggaatgcaaccaaagtttaaggtaagaaactcagagcttgttcagttcagttagtacttaattggctacccagccttgtgccaggtaccttgttctggggctagagagctgaaataagcatggagaagatctgcagggaaaccaacagatgcaatcagtgcaagaaatgctgtcattagaagtgtgtaccaaacaccattggagcacaggcggagagacaccaaacttggcctaggaagggatgcagaggctttggagacagagaagcttcagttaagagtgaaaaagtcagcccaggagagaaatgagctcttccatttatctgtggtgataaatcaatgtgttttaatttttcctttttcagtccgtttaggaccaatactttttataaaatgtattaaaagtaaattactagaaaaatgaaatttccaaatacatataaaacagaagaccacatttttattattagattcagcggacttatattgtcatgtagtatgacagtatgatagtttgtcatactgtcaaatagtttcgaaaaactctgtgcctctacttttacctcaccatgggtcagcgccagtttgcagacgagcggcagtttgtggaccacactttgagtagcattgccctgggcagaggaggacatatgtgaggatatagtgattgactgatgtgagaaatgtggagggaatatcatcgtgtcccatcccatcgttttacagatgaggaaactgaggcccagaaaggtgacagagctaagaccagagtccctgctttctaactcgagacagttcttcttcttgtcctttgactaactcacctgaacagtcaccagatagcaccagcattccagcctgcctaccctgcttcacccacgcctactgcctctgaagaaagggaagaatctgtgtccatcagaacatgccggggataccaggacaccagcctgctgcccaacctggctgacccgtctgctcacggaccctgtcttaatgacagaagccactccaagagttcactgtgtcctgcagtagccagttaaattcatgtaaatcctgtttgggcagtcagtggaatttttaatactcttctcctttaaaaaaaaaaaaaaaaaaaaggaacaaaggtttttctcatctataagccaaacatgagcaggcagtcaccaagcagggcaaattgttatctcttggaatcagtttggttctagactggtcttgaaggattgacgcctggtctggggtggacttgagagccacagagtatgctgtcctggtcttaggtcatccccaagacaggggacctctgcaggcaatagcagcttcacgttggctgtagaggtcccagatgggtcccagggtcccagcacaaaccagaatccacccagctccccccacatcctccctaatccttcctcactgcggtctcctgggaacctggccaaacccaatggtcagggagggagttgctgttcagattaatagccatttattatgggcctggtatttgcaaagcactgtgttaggcactgaagggaaccccgaaatataaagatatagaaacgaaggcaatgagtctcctcatggatattgcattttaggtggagaaataagtcatataacagcccagacgggattttgaaatttgttctctctgcctgcctcttttggtccccatgaccaaggaaggcaaacaccagtgcagtggcattgatataaattcttaaatgtgaacatggcacttggagttgattgcttatttgtgaaaatacatgataaaaatattcatagattcagacatgtcaaaaagattccttcatttatcacagagttgtttataacagtgaaaaatttaagaagtctgcaggtggccttgcatggtctgggtgttatcacaccactgagtgtcaaaccagcatctgctgttgggtatgggtcctaagcaatagacagggagggggtgaagaacaaggactggctgtacagttgaattttatttgattacgttgtgaagtacagatactgtttcacttcctgggaattttgtgttttatttctggagatttgaaattctccagaatggaaataaagttctccagccactgtggtggtgtggatggcaacagggttcagtgacttcccttatcctcgttcaacttattctacctagcagaaccagtcacctgtggtgaattcagtggcgtttgacagtctaggatgaaccgaatgaacctcaacttaaaccagctttttgtcattgtactgacctgggcacttgacactaaacagagatcttaattcctgtatcttcatgcatcagaatttggtcttagtggagatgtcaatagacgacggtgttgtggctggttgggtttaaccagttctggaggcattttgctcgttgcccaaggtactggtgccagaccatgtcactgtatgacccatctggctttggctcctggctctattacccagagagcagtttataagccagatgtgtcacttaatagtaggcatacctgcccaaaatgcaaaagcttacagtagttatctagaatttacgaagcttgtttttactctttatcagtgttgattcttataaaaatcatgacagtaggccatgtagatattatctttcttgttgatgaataaataatagccaagggctctacagcacttaatgcattccaggcgctatgctaaacctaattcacattaagtaactcatcatttctatgaggcaggaactgttgttatctacatttcttgatgaggaaataagcccagagtggttaagtaacttgcccaagatcacacagctagtaaaactaaaactaaactcggctaatcaggctctaaagtctgtgcccgtagcctcacaatatgctgcccattgaaatcagacagacagatgagatgtggtatgacctccccaagccacttgggtaggggagggaagcagattgagggaggcaactgtaaaagcatggttgggaagttgtccttggctcatctctctatatggcacagggctccaaactgaaatagccactattgggtcaagattagtccagcatttaggcaagaagaatgttagtccagtcatctgctacttttgctagcatgtatggtggtgacactttttaaactaaaagtaacacacataggctaaaaaataaatttttcctggtttttgaattctgtttacttttaagatcttaggaagttataatgactcacacttgcacatttaataatgacttttattaagaatgctatgacacaaaattagaaacattcttcagacagtgtctccacgtgtaagtacttaaagaaaacaactaaatggctatttgggaaaactgggccctttggttgcaaaaccaagtgctggggccggagtgagtgctcaagaagtaccagtgagttctcccaagggaaatttcttaggggaaaatgtgatgtcttttgcacatgttactatgatgtgagtccagtattggtaggaaatcagtaaaattccctgaactttactgtgtgtgttgccgtcttgtgtctagcccgtgattgacattctagagataatatgagaaatattccagacctgaccttagagtttgtaatccagttgggagaaacaaagccttttatgcaaaacataattagagaaccaagcaatatcatctataatctaaaagtaaaatgtgaggtatgtttttaattccaagagcctgtgagtggttctgaagtgcaagtgtcttcttgtgtttttcagaggtttgtgtttagatggctcaggtttaatctctaatggggatagcagggaaccagatgagacctgctgaggtggccacagtactgattctagtgggcaggctgcctcccctctgatactgtgtaaggcattactaatgctggcaacagtttgcatatagccaattgccaaaagcagcctgcacatccctcctgaggctggtcccgtaaattcttctctttcctgtcgtaaagcattcctcatcaccacctcccttttcacactttatgcaaggccgtgcactgggacagcaaatggctgcaactttcactgcttgcttttcccaagtcgaagaaaagttccaacgctggcaaagcaaggacattgctattttctgacaatcgaatgtcttcgaggaactagcttcagtgctgatagggtctgtgttcctctagtaagaatagcactgtttccattagaggggaccaggatgggtagacaggctaagacgtctgattactctttgctctgtgtatttgtatgacagctcgggtgtctggcttaccttcctgaggatgagagccatagcattatccatttaataacagccacagtgacagtgctgataatggctagcatttacctagcactgtgtgccctagaacatttaatagtttcactctatgaactcgtttgttggtcttcgtgccatgtgtccaacataaagctagcaggacccatctgtccttgcccatgcttattctgtgccacagccacccctggttgtgattaagatattaatgttaaagagggaattgagttctgatttctcctcattcaaaaccattctgtcatcttcatgcacatgccctgcaggcagccagccagtaaggggtccttcatacctatcctgttcctggctggtggctctcagaatctgccatggctctttgatcctgtttgtcctcctgcccttgagtgactggctatcagaaagccttcatttccttgttggattctgcctccaggaagcaaagccgacccagtggtttctgtgggtcagctgcacttggctgtctgcactggggaagagacttggcttgttggctgttttatgccctttggactgtcaggtccaagtgtactgttggccgcagcatccagtctgtgctatcagagcaaggcgctatggtcaggagacccttagccaccaaaggtctgttgtctcctggtgtctttgcctgaagacttctggccttcttgtgtttcatcactaagtgcatctataagctgacccgctgccaggtatcatgtctgagcattttggcaaggagagtcggtgagagaagttttcttggcaaccataaaataaaagtactatcaggagctgctaaataaatttgcaccgcttcagccagggaatttcagctctcctgggtgggatagtgataggggatgtggaatgcaaaaaaaaaaaagaaaaagaaaaagaaaaaaaattatgaggctcagctgtcagtttgatggctcatttatttgatggtcctaaggagatgtatgattggtacactgaggatgtttatcaaactcatttcctcttgtatttgtccagagagtcagcgaatggggttttttgggtatttttttctaccgtgagacaaagtgaggggaaatctctgagtccctttgctcaacttaagttggtcctgtgtatctgcagtggtgatggtgggaacacactgcctacatgtcaagggcatcaaacacccagaacaggatgaagaccaacacctagtctatgggaattagtttgtgagtctgtgccctgtttgtttgtttctttgtttcattattgttttttgagacaggatcttgctctgttgcccatgctggagtgcagtagcacaatcatagctcagtgtagcctccaacccctgggctcaagcaatcctctcaccccagcctcccaagtagctggacctacaggagtgtgccaccatacctggctaagttttttaaaaaattttgtatagctggacacaatggctcacacctgcaatcccagctctttggaaggctgaggagggaggatcacttgagcctaagagtttgggaccagcctgggcaatatagcaataccctatctctacaaaaaatttaaagattagccgggtgtggtgatgtgtgcctggagtgccaactacttggaggccgaggtgagaggatcgcttgggcccagacggtcgtggctgcagtgagctatgatcacgctgctgcactccagcctgggctacagaatgagattatgaatgaatgaatgaatgaatgaatgaatgaatgaatgaataaataaaatttttgtagagacagggtctcactatgttgcctgggatggtcccaatctcctaggctcaagcaatcctcccaccctggccctgttttaaagagggtgaagtaaccagattcaaataggagtcatttttgtcatttctcatcccaggtagctgctgggaggaggtatgagggggtagtggggaagagcctcagaagagccttggcaacactttctgggctggaaattgttttactgactttcttcattataaaatgaagtattttacattcagcctcataatgatgaatgttcacatcttgtatacgtggtcttcagcaagatattccaataggtcagcctcaggaacaccagattaagtgtctgtgaggagaaatggcatagggacctcatttaataattaggaatgctgctgcttttagtaggaaattcattttcatacttaagttcattcagacttcagggacacattgtggggctattgaaaatataaatgccatccacgacaatcatagacacttagtagacattaagtaatttctgtggtaaaaaaaaaaaaaaatgagctgatggcaacaagttcaattctaagtctacaaatgtgcaggttctctaagcaaacaggatgtttttttccaacattcccttggagcctgggttccaaaagaaatcctttgcactctgaccaatgggtccttttccctgcacatcttccttgggaattatggccttaaatactacagaaaccaaaaaaaaaaaaaaaagaaagaaagattaaagctagaatatgtaaacacattttaatgactttttcctggttaacaaagtaatacatgattcctgtaggaaatttagaaaatccaaaacagaaaataaaaatcacccataaacatatcacctggaaatagacttttatgtttttcctcatctccttttttcctcctgtctttcctccttttctttatccctctctgtcacaattgtaacaaattaagagaatattgaaaatataattttgtatcctgttctttcacttagaattgtatgagcctataagtaagtcatgaaacccagaagctgtgaaggaaagattgataactggactatatcaaaacaaaacttcaaccaggcgataatatttacaacccatagaaccaatataaaaaattattactatcccataatatgagcttcttaaaaaaatcaaaaagataaacaactcaagtttttaaatggttaaaccatgtgaataggcaagaaaaaattcaaatggccattaaacatatattcttcttaaagcttaatctcattaatagtcaagaaatgaagttgaaacaatgagctcatttttcactggcggtttggcaagaattagaaggatgattccatctagcctgaacaaggaagccaaaacattgacactttcatgtgctactggtgggaatataaattgatgcaacccttttggaaaacagtttctctacatctgtttaaatttaaaatatttatgccctttgatatggcatttctacttctaaaaaaatgtatcctaaataaacactcccacaagtgtgcaaatcatgttcattactccattgtttgaagttgcaaaaaatttaaaacaacccaaatgtttatgtagaggaactggttaaattgtggtagatttttatagtggaattgtatgcaaccattatagagaatgagccagaggcataggagatataaatatgtccaagacaattgttgagaaaagtattttactgtataatattgtgttagtgtagcattgagaagaaaagtttgaaagactgaacccatcatcattttctctatacctttttcaggaatgatcaattttatataatgaaaatattacttttataatcaaaaaaacattttcagataacatttaaaaattctattataaacatttccttacatttttagtccttcataaaaatttggcagctttcataagattctgtcatagaaataccattatttatttagccattccacggttgatacataatttagctttttttcaaattatatatgatgcagcaaccaatatctttgtaaaataagattcttaattttacactcacaagagtatcatatcacatagcagagattgagaatttaacctgaaaataatccattgggtgattctgaatgtacaagattgatgtttttctaatctttttattttattttattaattttttttttttaagatagagtttcactctgttgcccaggctggagtgcaatggtgtgatcatggctcactgcagccttgacctcccaggctcaagtgatcttcccgcttcggcctcccaaagggctgggattcaggcgtaagccactgtgcccggccttaatctttttaaagcttacctggactataggtggcccatatggaggcaaaagatttgggccccactctctaggcacacagctctgctaccctactctaagtataatttgtcactagtttttgtagtctcagtgtaaaaaagagcagagatcttggcctcaggagatcctcttcccaaggctcagtcccaggctctctccttatttcattccttctcctgaggtgaactcatccacacccaggtaatgactctcaaatttatagctccgaaccagccttccctttgacatctagccatgtgtattcagctgcttaaatatctccacctgtatgtctaaaaaaagtagctcaatctgtccaaaataaattctgtgatccagaacctgctgatgcctccttccctttatcctttacatccttccattgctaaatcccattgctttcccccagtagttcttgacacatctagttctctttaccttaccaccctccctataccaggccaccatcatttatctcctggatactctagtagcttcccaaatgatctcctcatgttcattctcaactcctctgatatggagtcctgtaaaatcgaaaatctaatgccatccctctcctgagtcagagttttccatggtttattgggctaaagactgaaatcctcactggcccctgcctcatctggtccctgctctctcctgtctccatgctctcttctctcgccacccaggactccaaccacactagtcttcatttcttgactgaaccccctcacctctgttccttccttctgaaattctccttaccctcactttcccttctttctgtctcttcacttggttaataatcttcacagctcagttcaaatgtcactttcctgggaaatcttcccccagtgctaggtcaggccatcccttgatctattcccatgttttctcctcattgcactcatcacagttgataattgtaaatttagttgtgtggtgatctgtctgcttctcccaccagacattaacccccttgtgggtagagatggtgccccctttgcttactattgtatcccaacatcctggcatatggccaggctcatggacaatactaaagaatggttgggtgggtgaagggatggatatctcgtgtcaggtgatgcatgaatggcactactgtctaactcacgatgaaaccaaatgttatgcttttgctaattcagtgacttttcaaaagtcttttgcccatttaatacaatccatcttgctttgaaaaaactttaagtataaacccaggcactcaaaacacaagccagtcctaagtagttttattctaaaattaagaccataacccacattcactcacttggcagatgcccccttttcacacttacctacatgctagttcctcctcctcagtggaaggcagcaaatgatctgcacatttgaccacttgagagatttgctgtgcactcccctatgcctgtatcctcaaggactctgtaaaatccattgaactctatgcacaagctaagaaaaaaaccttgctttgcagtatttcgattatgcatttcatagtaatatgcataaaacatccctctatcatagtgccatcttagaatatttattgattccctcaggtggttcttgtttcaattaaagtccttttgggaaacaatctatccgggggattggccggtgacactgctacatagaagggattgggcctggtgtagtaagtcacaagcccaggccttggaggtgagcagaagtaaatctgaatcctgattttacccctgtctagctatataatcttggggtagagcctacttcatagagttattttgaggataaaataagaatatagataaagcacttagcatttgatgaacattcagtatatgttaaccactgaagacactgttattcttgttattcacaaaagcttttttccaggttttctagacagacccacagactcaccacccccaaatgagcaacagacaaatggcagtatgctgacaatcataaattgactgtgtattttatgataatgggtatcaaagttgtactctattaaagaattattatctttgagattcagatattaaaatgtgtatagatgaaatagctcatatcctggatttgtttcaaaataatctgataaaagatggatcagggagggagggagtcgatgtagcgagggagcatgtttggacgtgcattggcaggtgccgaggctgtgtgatcagtatgggagttgtgtcattctccctacttttgtctgttttgaaatttcccataataaaagttgaaaaatatgttaaaaatagttcatataaatagcctcctagattcattcttgttcaaggagccagctctcaactcgctttcctttatttcttttggaagagtaactgattctagtgatctaagcagtaagactcatgtcaatctgttttattactctcaggatagcttatggtggaaacaaaataaatccaatttctgaatctcctttgtcttcaatcacttgggaattctctctgaaactactgtgggcattttaagtaaccctgattacccagcaagaacaatgtagctttcagacaagcacagaggatagaataactctttctacccttctatgcttgcatgacaaaagctgtagctattaaataccggtgctcaatgagctaatgaatggcaagccggtaactgtggttttggcattttagtatttgagcctctgccctgtatgaacttgtaatcttcattgtgtagccttgttaagttcagctgctgagttacatgttggcataggaagctgaggtactcctaagccaaaaactgacctctgcatatttcaaactaaagtcaggaggcttagggtgacttcttttgctttaaaaaaaataaaggcatgatttccctttagagtggaagctgaccatgactgtaaatggctctataatctttggctttgtttgagtcaccctctccatgttctgctcttccgtttggatgcaagccaacacgaggataagtgttctgcttggtcctcgttgtttaataattgacccttcaaaaccactttctttctccagcttcatcaaagagaagaatttaaattttgatttcaggtttcttcttttccctcttgagtctatctttaaggggtaaaacatgtggctttttataagtttaagtactttggagcaaagtttatggagtgtccttccatcccctaaaaataagataggctctgagttggccagggcagtcccattggggtccatctgaaatgcttctgtttatccctttggtcagcacctcctgccaggaccatgctggagctgctaagaaggaagagaggtgcacagacagagccttctggaatacagtgcggggtatgctatcatagaagtataaactgggcaccctaggagcagagttgatattgctatgactgtctggggacatcaggacagacttcatagagcaggtatgagatacttgggctgagggcagcactggtagcctggaattacattatgctcttaattgaaccctcttgggatcccagtttgagtgatctgtcttattaaatagcacttggtatgagaacagccatggcgtttcctttacagctcatacagttctgagaatgcctaaaattagattgaaatcaggattaaggtgtctaacctgcctttgtggcctcgggcatcctgtgaccaggatgagtcacatccctgtcttgcccacttgcgtcttctgagagctgcgtcccaagacttccccatgcagagctgattgtaatagttgactgacaaaactgatggcccagcactttctctccctgcgcgattcctgctgcccatgacagcagctgagtaataagcagtcagacctcttacctgggacattagtcacaagctcttaagcaactgcgggtcagcgcttgagaccgttttggatttctgttagcacttgtttctgttgcccaagaagatcctttccaagacttcagcaggcatactggcttcgggaaaattcagaaactcagtgaccttgtttggaaatgtgagtgatagtgttctgggctcaggtccacacaggcctggcttgtcaggctaggacacagtgtcgataaagctgggctcatgggctttgtccccccggccgtgctctctcctggggctgcagactagtgtgtctaacctcagccaggcgcctctctactgtgtgcccgcagtcccagaggagccaggcacccaggccttatagtgcctcccaagtcagaaaacacttgtggaagaactgagagtggtggcctccttcactgggcaggaccacgatcatcctcacccctgctcccgtcctgcgctgctacgattgcaaccttttgtaggttaaactggctgtgctcatattgtatttatgtggtggggccaggggaggaagcagcttccacaaatcagcccactgaaaacagtcacttatatgggacatgggattctgcgtggagaagggctgatttggagccaggactgggtttgggttagagacacagaaagcttgcttcgctgaagtgggtgcacaggtactcagcatgcctttgccttatgcccctgacacccggggaggctgctactaagagcagagaagtctgttctatgttccattgatctgtgccatgaaagctttgctgctttaaccacacttattggggattcctggaataccagacttggtttccattcctgggcattttctagtggccattttctgtaagacctgtatggccaggctgtatcaactcacaggacaccgtgtggaaaccagtcatgccagttctgtcatcacctacctcctccaagccagcaacgtgatccaggctggacagagaccaaccttttgccttgggccatgcaggccaacagaccttgattctcacactgaggcaagaaaatagaacctcgagtgccctgacacaacccacagtgaatatggcactccagaaagagcagtcagctgcagccactgaggagacgccacagcgaggggggctccaggcggcccaaggccatggcagcctcccacaatggcagttaaccacaaagctccaggccacctagcatcccccccgtgacctgcagcctccttgtcactgatcagcctatgtgggttgcctctgagcatattgttcctttaaaaaccaaagtgtaaatgtctcacccaaaaggccaagctgttgctctgtccagtctagactgtgcctgtgaggctagcaatgccaccctccctctgtaacagtgccctggggtatgggtggcaacaggacaaccaggtgcttgtgctgggaagcgggtttttttaagagagcactgccttttatttacagacagctttatcagtacatggccatgttcctgccgaccttgaggactctttaccaaacaatcctgctgctgaatattcacttccttccacatgaatttgctcttagggattggaggaggggtggaaatgctttcaaccagtctccataatctactaggcttcttgtgcacctggggtacccacaaacaaaccctgttctcactctggttttccttttcctgattaacatccccacaaacctactggatttaagacaaacccagaagtcatcatttctgctgcttctctctatccgtctatctctaagtgattatcaagccttattactgattttgctttcaccgaagccctgcttcctttcccctgactaactccttattttccattccattcatcactgtcctggttcaggtcttaacatctcttccctggacggtttcagcctcccccaactgatcttttcttgtccagccaggaatctgttactcccttaatgagggagcatcaatgagttccttttgcctaatatgtaaaaatcaaaattccttcgtgtgacattcaggacccttcatggtttgaaggacttaactttcctctgtagccctgagatttttcatggccccagcactcctctgtcctgtgctgcccgcccctcagcctcctccaccatacccagggttctctgagtccacctgcacagccatactgctgggcttgctgccgtgtccctgccccatccgcctgtccatggcggccttctcactcccccttctctgcctgggagactctgactcatgctatcagacccagctcaatttctgcttctgctgtgaggctgtctctctctcctcccactagaaggaattgttctctcttatgtttctctcgtagcacttggttcataccttcatcgtgccactaggatgatacagcaattggtgtgttccccctccccacccctcctggtctatcctgtccatgtgtgtgtgtgtgtctgtctgtatatgaaatatatatctatttgttttacacacacacacacacacacacacacacacacaaagtatttctttcttctcttttcattttagagacagggtctcaccctgtcgcccaggctggagttcagtgatgcactctcagctcactgcagcctcaacctcctgggctcaagtaatcctcccacctcagcctcccaagtatgtgggactacaggtgcatgccaccatgcccaactaatttttgtatttttcgtaggttgggatgttgcccatgttgtccaggctagtttcaaactcctgaactcaagcaatctgcctgcctcagcctcccaaagtgttgggattacaggcacccagccgacaagtatttcttaagtacattatgccaggcataatggcgccaggcataatggtgaaccgcataaacacaatccccgccgtcatggagcttctagcctagcaaatatttgtctcccattacactgtgagttccttgcagatgaagatcagctgtactcctagtgcctgtcaccaccccgggcacacagtggccacctcccctatgggtgttcattctgactctgatgggtagagatgggtgctagagtggaggatggggtataggctgagtatgaggtaagtggaaagcctagaaaagccacattctgccctccgtttttacaggacagcctacattttcctgtggtcagcccattcttaatgggcgcatcatcttggagccatgaggcaagttctgagacttgatctaaatgtgtcatccagatagcacagagaagtttgttccttttgacgtgtgtacaggaagctcatgcggccgcatgtggccgcacgtgtgtgtgtgtgtgtgtgtgtgtgtgtgtgtgtgtgtgcccattctgagaggtggatggtttggggtctggctgccctatctcgtgctgctctttgtatctttcagagatctgaaactggacaatgtcctgttggaccacgagggtcactgtaaactggcagacttcggaatgtgcaaggaggggatttgcaatggtgtcaccacggccacattctgtggcacgccagactatatcgctccagaggtgagtgcagctgcttgatgcagctctgaaatctgagctctccagtaactctgaccagaaatgccactggctgcttttatgcactgcagctttggaggcagcattgaaaggtgtctagagccgacacctctagactcatttatggctcattgggtgaatgatggctgaaaatggcctaagtccctctaataagaatttgagttaaaaaagaaaatcatgctgctataaagacacatgcacacgtatgtttattgcggcattattcacaatagcaaagacttggaaccaacccaaatgtccaacaatgatagactggattaagaaaatgtggcacatatacaccatggaatactatgcagccatgaaaaatggtgagttcatgtcctttgtagggacatggatgaaattggaaatcatcattctcagtaaactatcgcaagaacaaaaaaccaaacaccgcatattctcactcataggtgggaattgaacaatgagatcacatggacacaggaaggggaatatcacactctggggactgtggtggggtgtgggggggggggagggatagcattgggagatatacctaatgctagatgacgagttagtgggtgcagcgcaccagcatggcacatgtatacatatgtaactaacctgcacaatgtgcgcatgtaccctaaaacttaaagtataataaaaaaaaatatatatatatatgtaaactttgcagttgctttgggctttagccctaaatgaagacaaagtgtacgccattcatggctatttattttcctttttgtctctacttagtgatttaatttcagcgtcatttagcagaactaaagaaaggctcttgaatccttgaatccttcccgtatgagtgagtgaacccagtccccttttttttccagactgatatatttccagaaccctttctgtttgggatctgcacgagcccatcacagtggcccaatcaggccataaatatttgctcacctagatgagaaggcacctctgagttgaccacagggaaaacagaccactctgtagaaatggaatgaaatacgcttgctagcacaggagactttttaaaaaaaactttgatatttcctaatgcatcaatttccctagttatgaagaacacatttgttaatctgatgtatgaaccaccttctcacgctgccccctttgcacagatcctccaggaaatgctgtacgggcctgcagtagactggtgggcaatgggcgtgttgctctatgagatgctctgtggtcacgcgccttttgaggcagagaatgaagatgacctctttgaggccatactgaatgatgaggtggtctaccctacctggctccatgaagatgccacagggatcctaaaatctgtaagtttggcttacccagctagcttctgatgtattgcaaaccagcttgtttcatgtgctgcttgagtcttttcagtacctcccaccagtaaaccactagctctaactaaaatttgtattgttctaatctaaagaatcaaagaaccagagttctgtcaggctgttaccctctcttatgcaatagaccctctcttatgcagtagttattttggggtcagtttcaatagcccttgataactttgtttgccaaatagcaagtatttctagcacttcgtaactttagttgagggcaggtgatgtttccccttcatacagtcaggccacaccagagttttgggtcaagtaaatgccattcccagcctgttattatatcaattgtgtttctgttggcatcttcaagttgcaggatgaagcggtcgggtctttctcttagggctgggagaggagaaggaaggttttccaaacctctgcagatctattttgcctccatgttattcttatgaaagccgggtgccacgcccaggctgcaggtgcaatgttgtaatggatcatgttgagaaagtcttttctgtgtgtgcatttaaggcactgtgctggatgcctttgaattgaggataaacatgtactggacgcctttatgttgaaaataaagtacatgtaatttgggtcagttctgtaaccacattagttgagctccaaaatcatgtattttcacctactatatgcagaggggttgtaaaggcaaataaaagatcagtttttcaagaagggataaatcagaacaatctatattctgttggatagtatctatggcataagaattactatctttaagttatatcctttcagtaatttgagacaaaagcaaaatgtgggaaatatttgctatcttgttgaaagacttgtttctctttagaaacttctagccctataatcagtgccatttcagggacattttttatgtgggtcactgtgtactggggctgaaggcttgattgtccctgagaattctctacatcgctaaaagagaaataatcacagaaatccttctgaggcaaatattaccaaagtgaatcataacacatagctcaatcctcaagctgaggtgtcagtaccctcctgaaactgagaaagcactaatttcacagaaataaaagcacagtactttgggattctaccaaatatctcctatctaacatgtttttgtaagaacagttcatttgttatattagtagaaattttagaggaaaccataaatatggcttttataattttatggaaaaaaaaagtcacagagaagggcttgtcttcgtggatttgtgccatgaagtttcttaacttcctgaagggaaatgtactcacctaggttggctgcagccaattttgataacataaaccatgataacacagcctcatcgtgctgcagacggaggtgtactttgcatgatcactttcctacttccatggcccagcacctggctttttgtaaaaaagcatgccagccttctgtggcctgcaacagccaccttcatcatactaatggttttccatgctccacatatttagtccaattactgtagctgatttagtagttttaatatttagatgaaggaccccacagttcataattcaaattaaaatactggttcaagccataaaaaaaatgcctgttatcagcattggtgtataaaggtcactaggcttggtaccatgaagggtaggaaataaaagtcagtctatgcctcaataaatttttatattctctaatataaacactggattagcaatccagatcagtgtttctctgatagataccctatgccttttgaatctaggtctagtagaaatcttaagaggccacatcaccatttgagttggacattcctaattttttgtctttacatttttagaagtcctcaacctcattctcgtgtttcagagtcctcttgagagaatgctttccaactaaatctgaaactaggtatcatccccttagcctagaacctaggacaagtactaagcaaggttaagattcctatggaatttttaagacttgtttctttttaaccgggtgagctcagttacttcaagctatatcttttatgtaaatatggatatttttggtaacgagcagatacactgtccagtaatagcctcatggtctttcctccaagaggaaacagcctctggtgcctaaggagaatcacatccagtggagactgagttgttctctctccttgcaggttcacttttgggaagctacaagtcccttcacttctctttatttcagctcctttctcatgccagctgctccactgatggaggcagcagctgcgattgttacatatcatgcgtctagcactcattttcctaaataacactcgacgctgtctctgggtatcttccacataggaaggagcaggggctctgggctcacagtgccgggcctgcctcccagtcctgttaccttctggctgagtggccttggtgagcctctgtgcctctctgaatctcagtgtccttgcttgtaaaatagaggtaataaaatccataccatagggtgattgtccagattatatgaaataatataggtaaacttcccgggcacataataagcattctgttttttcctccttcaaggcatgtaccttcaatgtaattttcttaaaaacacttaaatgttgtcagataaaattactaaaaaaaaaaaaaatcactaagaggatttctgggatttttttttttttgtgtgcattttactctccatgcctaaaaacaagaagcttaaatggtatagatgaaaacattcagctagtctttgcaggggactgagacatttaaatagaaatgtgatcaaagagaaaaaagaaatgttcagagcactcaagacttgaggagacacactgaggagggaaaggcatcagaattgggttggttaagaacctgcctccagagcagagctgcctgggggcagatcttggctctttgactaataggctgtgtgaccttgggcaaatggcataattcttgcatgccttagtttcctctccatttccttgggcaaatggcctaattcttccatgcctcagcaggtggggtgtacaacccacagggctactgcgtggttggcatgagataacatgtgtgggtgcctgaagcagtgcttggcacagggtacgtgcccaggaagtgtcctgcactattactgctgagagctgcatgcatgaaatgatttttttacactctgcccttatctctgaaaaagtatttgtcatattaggaggagggttcgagatagcaaggtgtgctatgccaaccactcaggctgctttctggctctaattgcaacttgatttaattaggccaatatagttattttactaccagaagaaaacttagagattgtcccttccaaccccctcgttttatagatgaggaaaccatgaggtactgagaaattgtgactcatcaaaggccatttaacacattacttaaatcaattggggcctttgtgcactgctgatgaggatgtaaaatggtgtggataatggtatggtgggaggttcttcagaaaattaagcagaattaccatatgatctagcacttctacttctggatatttacccaaaagaattgaaagtgggaactctaatagatatttgtacacccatgtccatagcagcattacgtacaatagcccgaaggtggaagcaacccatgtgtccatcaacagatgaatagataagtaagatgtggtacgtgcactctgaacaagcattcatttggctgcacagggccagatcaaggtatactgtgttctttaccaatattgacttgacgcctttttccagaattttgtgtccacctaagatcaggctttctgggagcttggtgacttcaagagttcctcatgtgaatagttgaatccattggatggtgttttgcatagttctaaaaacagtagggaaatcatgagtgctaagttttgaactgtaattatttgtctttgcccttaattttatagagctttgtgatcattagaagcataaacacagaattgtagagctggaaatagtttaaaaatattttgtccacatttcctcatctgtagatgaggaaacgggcccagagagatgaaggaactttacatgttagaatggaaagaacacaccctagacctcatgtgacttctgccactgattttcagtctataaaggtgtgataataacacctatagtgcccgcttcaaataaggcagtatacatgaaagtgttttccaagtggaatgcacgatacaagagtaagtgattagtattgctaacttgtgagtagtaatttcacaacacacttagagatgtcattatcctcatcttctccttgaacagttcagcaacatcatcaaggttattaagtgcttaattttacacaaggctgtggtaggcttttattcctaaggaaattgtatttttgtttttccaggagcttttaaatcttgaccaaagacatataggtggggtgtaaatagccaaatagatattgatctgtttatttatataataggcttatatcaatgcatatgtgcatagcaggcatgggttctgcaatactcaggttctgtgcgaggtgccaggaattcagtgatgagtgaggcaaacatgatcctgctcttgtggaatttacagtccagttggggtggggagggagaaagaaattttaaagagaaattaaacattaactatatacttacaatttaatgagaaaaaaataaaatccaaggttctttgaaagcatttatttaacaggcagatctaacatgacctgggccaccaaaggaggccatctggaggagatgacatttaataaaggctgaagagaaatgaggcttgaaagtgtgcagaggtcttgagaaaggagcagtccatttgagtagctcaatggcaggcgggttggagtgtgatgagcaaaggggtggggcagtgagagcttcaggtgaggaggctgagggaacagtgagagcccaaaggacatcctaggtcacgcgaaggagtctacactttatctgaagtgccaacgtaagtctttgaagaattccaagcaagcatgagtgatgcaatcactacttcatgtgtaaaagatcaccctggctattgtataaggagtggaccaacagactggagtatttgctgattaagtgacttctaggatttctttcaaattaatccaggagttgtggggaggaacagatgaaacaatattgggcatgtgtcagtaaccatcaaggctgagtgatgagtacatgagggtctgtgttactgtcgtctaaaatttccacatggaaaagttgttaaaaccaccatacaaatgaatatcttttataaacaagctcagcgtgtgtgtatgaagaaacatttctagcctgtatagaaaaagtgatctccatcttcacaaatgaagggaaatggtttacaatacaaatatacagaaagagcaaatgatgtgagccacatacaagctcccctgtggatcctggccacatctcttaaatccagtctcgggttcctggcctgggagtctatgtcaccctcatgattttttgccacagacaaaattaaccagtggttttagcacaactcatttcttcagcatacctgaagagtatctatgccttctcaagaagtgtccttcaacctccagggtagtaatgaagggtaccccaaagaagcatttttaacagaaaagagaccagagaaggagagaatcctcactgttggactttgccccatgctgcctccttgggaccctgggagatcctttcccggcctgctggatctgccctttccccctgagaggcaggaagagctgagatctccaagccagaccttcacagtgcctctctctacagtcttagtgtgggaggggcatctttccatggcttcctgagatggagatttatttaagaaggaaagcttgttgaattccctcttacctttttaaatgaaaggtattattattattctatatctggggaaactggtcagacacctgtttatgttacatgccatagagttacagatgttaaagacctcagggcttcatctggcgtgatgtcagcgagggcctacattcagggttggggagggtgtgtactgtccagcattcctctaaaagtgtgtgactggcaaggcaggctccagcatcttctgaccactaatctaatattactgtccccacaggccctccctgtcatcacctttaccactgccctctccacccgcaacacccccgaggttgtggacttgtgagttctttgtgtatagctgttcaaacatttcctatagacgtgggtagtggacaaaggacttgcttgtgagaacttttcccatggagtgcagaatcagtgggtgcgggggtagtttgagcacacttagtttttagcccaggatttctacttgaaaagaattccccaaatcattaaccagtaatcgcacatctaaaagtaactttatatgcacccaaataggcacactgggaagactatttttcttgcttccccttctgtctttctcatctttgcttcaaatgtttctgttcaatacttaacgtgtgcttgcctcaaaagcagcctgacctgcgactcgcagagaatggagtattcacactggcaggatcctcagaaattaacacaaaaaaggcatatgacgatgacacacacatttgtgtaaagaaaaaataaaaggcattccagctgttatttcttaattttttttaacttggtttgggaatatatactacctgttttctggtgtcaacatgccatcaggtttcttaggctgactaaatcatcccaaaatgctgataatgatgggacaaaagaaagtctatcatttttttagggcttctgaggttccactgagttttgccctcatctaggtccagaagggcttagggaagtcccaggcgagtcagcagagctcaggaagctgaatccttgtctcagaggttagtgctcctttgctgaatcatctccagcaagaaatcacgtgactcagggtctactcaggtgaagtcggcacccttgtctttgagctcacacaggtggctgagctaaataagtgctgaaaggagctgggtgcactctcctgagtcacctttgttgactctggaagcactgtaaacttggcatcagaaggagattataaagtgcttttgttcctaagctttataaagtgtgtgtgtatgcatgtgggtttctctgtcatccagcctctcagatttcatcatccgagcattgtctgcaggaatcctgtttgcctgtacgcacaaaggagggagaaccacagttaattcggggatcctcttttagccctgagtgtgtcccacatctgtcaccaggcagtgaattccaggagcattgactgtcttcctgttcatttccctactcccctcctgggagaggctggaatgttcaaggaagccagcaaaggtggtcagccaggagaaggctggggaagaggagggaaaaatgggacccgagtaacgcagaggatccaaccccagatcattagggctggtttttcaaacactgttaggggaaatccaaagaaagttatcaaaagatccttgagtaagaggagtggttaacatgcaacctggcagactgttgccaggactggaatacctgtctgaggaaaggaaggtgccccacaggcctcttaccaaaacccctagtgaggttaacacccttcagaaaaggaaccgtttgctcacagatcaaggccagtgtctgcagaaaacagaaaaacactgctcttcccagagattttgtatttgggtctttttaagtcatataattttactaaagttcttgatctctacttctttttccctcattaaattgtaagtttcctaaggttggaagtccttacattttgatagcagtgtaaaggattttttaaaatgtatttttaatagagtactcatgctgcatgtctcatttatctccatccctgccaggaagataaagatgtcaaagcttttgtaaaatgaccacggaaacttttcctgtgtggagatttgctaaccggtgtctgtgggtcagaaaagctttttgtttcgagttagaaaaactcttgtcaacaaaagtatttgactttgttgttttttgtttgtttgtccttgccaactatcaaaggtcagtaatttggggcagttgatcattagatttggtttggatgccaaagataatgcgcatccaggataaagaagggtactggccttgatttcatcagaggaggataaaggacattgtatagtccccactagagaatctttgtttagcactcacttctcttcagtagctacatttggggaatcatacctggaaaaaagtagttcgtatagcttgggcatgtagggtagcagcagctttttcttaacacttggaagtcattggagagcattgaaatccgccccatcagtcagagctgcttgagactggtttgtcaggaatagaagcatgttgtctaacaacgggcattggcacaactgcatgaccttgggtttccatctccgagacttgcctctaacctttacctacggttaatcaacattgtcccatgaccagaaagaagatacaaggaagcaataatgattataaaacccaggaaaggcagggtgttgggagccttggaaaggaattgagtatgtgcttatgaagggctgctggattccagtcacagacagcatggaaaacacagccagcaaacccaccacggatttgagcactgcccctgcccgctagaggaacagtatagggcatttagtgtactgagtttcatcgagagaaaataaagtacactgtgtagtgtgtctctggagatatcgcacagaatattctgatgctggtcagttacaacctgccaggtaaggcactgacccaccggcattctcaaatatacccacatgcccacttcctccatcactggctcagggagatcagcttgagcaagtttatttcactttatttttaataaagaaaagcccatttcagactcaaggaaaacaaagcatctgtagctgagggaaggacaatcttcaaaatgccagctttttttttttcctcccagagtttttagtgataaatgcaaaaatagaagaaagaaaagagtcccttgatatgggcacagactgtggaggccactggtgtggccacccacccacctgacgccggacaggccagtccggctctgcttcacgtgttttcaatgacacaatgctgttcctgccagggagcactctcatcacttaatggtactgagtattacaaccacattacgtgttttagtttttcttatgatgtatttagatatgctgcctttaaattccactccctgaacttatttctccctgaaattatttctcatctaatccctcttctggccgacagctctttgagtatttgaaaattttaagtgtccttctatcttttccagcaaaaagaccctcagtagtttgaaataaaaccaggtgtcaggctgaaggatgcctcggattttttccagccctattacttttctttcccttcacttaccacctgcactgtatgtacttctcagcccttctccttccatagaatcagaggaaaaagaatgtcacatgagccagcaaagaagtacaacacaaggaaacacacagagtgcgtgaattctcatcagatgaagtcctgagtgtcatttattaggtgaaagtaaagtaaactgtgtaatgattctcctcacctgtcggtccaagtatcttaacccagaatccaaataagaagattggtagcctcaaggggaagtctagcgtagggactgagagcaaaggcctgagttcaaatcctgactgtagcactcccaaactgtgtgacaggttacagatgggtctgtttctcagtttcctaatctttaaattaggaataataaccacagttgctttaaggattatatccaatgaatttggaacacttaatgcctatgcaacaaaggagtatgcagcatacatatatggcagtaatggctaccacttcttaagctgtaacttgtatcaaacggtatcattctctactctctccactcctgcagcttcccccttctcaaaccagtctggatacctggcagggtggtccattgccatgagtgtgcaggtaactagttccagccctccccagcaaattccatccagatccaatcttagcaggatagagcacctctccttctcttggctcgtccagtattccatagcagcaccattcggtataagaacctagacttgggaagattacagtttgtttccccagagagattcaggaagtctgttgtctgtcctttccaccctaccaagccccatcccacccccagtggactgtcatcagccccatcttgcatttaaatgtctgtcactgccttctcctatggaaaagtgacttatcaatgccaggtccaagcctggtgtctctcccatactgtgcagccacatccctgcatgaccactgccctgagctggagggtgctgctagcacagggtgtctccagatctccccaacagctggcaggaggggtataaaaggagaaggttggtcttcataactgggtcagaatctgcgtgtgccagcagcatccttcagacagacacgcgcctgcaacacgcatgcgtggtgtgcttctcgtcagccccaggtggccattagggtctatggtcatggcgaggttgggtgtcatggctgtgaaccgcactctattctgtgtcctgtgctctttctctgccctttctccccaggaccctctctagagccataaaatgccttttccccatttaggatcatcgctctggaatattggcaggaaggttctgtggcatagtttccttgccttctaacttgccagcattagctgctaactctctctctgccctttgtttaaggtctgaaattgaatgaatggagaaggtcattttgtttgcccaacagccacatccaaccattaggcagaaaatacagtgttctctggctcctggaagaaaatcttattagactaattgctttatttatataacttgtcctcttcctatgaaatcagacagattttgaaagaggaaaaaaatacttgtggccattacttatattttagtgagtaaagtacatttgggcccagttatttcaagactcataatgacacagcgttaaactctataatctggaacatccaacaactcaaaactgaagctgcctcctgtgtgcccacaagatgtgataagcaccatacctgacaccagatttgcaaagaagctgctccactgcacccatcttgctgcatttagtttctctgtcctattgttaatgcagatatagttgcacattaaaacctattgtttgtaggccgggcgtggtggctcacacctgtaatcccagcactttgggaggccgaggcaggcggatcacttgaggtcaggagttcaaaaccaggctggccaacatggtgaaaccccgtctctactaaaaatacaaaaattagtcgggcgtggtggtgcacacctgtaatcccagctactcgggaggctgaggaaggagaattgcttgaacctgggagggggaggttgcagtgagccaaaattgtgcaccattgcactccagcctagacagcaagagcgagactccatatcaaaaaaaaacaaaacaaacaaaaaactattgtttgtattctcgttttaagattgtcttagaaaaggttttctgtcaggaaaaaaaaaaaagttttccaaatagggtttggtggtatgtgcctataatcccagctactcaggaggctgaggcaggaggatcacttgagcttaagagtttgagaccagcctgaacaacataggaagatcttatctcagaaattaaaaaaaagcaagaaaaaggaacattattttccaaagaccattcctcccactgcactactggagcctaggacagtgaaggcagaaagagatcttgttctctcttacctggctgtagaggaacagggagagccagatgagcctcagggtcaaggctgacctcagagtgtagtctctcagcagctttctatctgtgcccctgccttttagtagaacaggatggacttacaagtttggcatttgggtcccattagggacataagcaaataatggaagtattctgcaaaagaattatgctgccactgttcacagcggtgggaacagagtgtttagggacagtctattcgagcctaggacggcaacaagatgttcattaatactatcatttcttgagggctttctttatgccaggcgctttacgttaattctctcattgactcatcataactttttaaaatataggaaaatcttcatgttagagttgagaaatctaaggctcagagaagttaagaaatttgtccacagtcacacagtaactcagtggtgaaagaatgatacaaacacaagcagtgacactgcagagcctgaccagccctccatgtcagagaagctgttagttctttcagccttccctggcttgcaggaggcctcccaggacattcctatacaaacttggcccaaatcctttacatgtccccttagaactagcgtcaggagggagcatgcctgcttgctttcccctgcagccacacctcctctgtagtctgggaaaaaaactgttaagtgtctcattctcggggccaggtgtgcctctgattccttgagtatcctctagttcagttccactgtaatgagggccacagcaggaaggggaacataaaatgagtccctgagttcttgacccttctctttcccctgctctccagtcagtttgagacttacacttggggtagaatccagattttccaccctggtcccctcactcactctgtgcagcttataaagtgcttttcttggccctagaaaacattctgcttcctttagtaaatgtgtgcagaatatttcatgaagtcacattattttcctctttggccgactttccctcttggatcacagtcagggagaaagtcagctgaggtgaggcaacttttcagtgtgaccttaaatgtggatgaaagtgatggccccgaggagcacaattgttaacttactggcatttgggtcccattagggacataagcaaataatgaaagttttctgcaaaaggattatgctgtcaccattcacagcagtaggaacagagagtttagggaaaggcctgtgcccagcctaggatggcaagctatccacctccaactccacaccatctgcaccaacgtgaactgtgaaagatttcaggcctgggactaatgttaaatgttcccttaactcctcatctccacatcactggacgggggtagtggtagaagggccaccccaccaccaccacaacacacaaagcttctacccccttagtatcaccccggaccctccttctcccggtcctggtttctgtttcatggtattcatcctcctctggcctcttcatggcatcctccagctgccactctggctgcttctcaccctacgccaggggtcaggagccatgaaagtccgtgagtgataccagccaggtgggaggtgatagggagtggtggggcatgtgactgactgggcatctggtgccccatgaaaagcagaagcccctgctcaactccaggccgtttctatgagaggagtgcaggcccagtgttcccgagtatctcattttccacgagaagttggaaaacctgacttttcatgtgatgtgacatttcctagcgtttaaatatttgagaagtaattaaaattatttcaaaacacactaggtaggccaaataaaatgtgtctgagacctagggctggtatcagttctagtctgtctctgtcactttccacaatctaacctgccctcccagcttcagtggttactcaaatttcaatgtctctgagcgttagatggccagccctggcctgcaccccagatttaccctagaattcatctgcatgtgggtgcccacacacctccaatgcaaagcggagcccatcagcctcccagatttggcagactgtaggatctcagtaagtgtgagctatttttgtctttgttccactaacaaaaatactactactactaacactgctactaatactcatgctacaaagaataatctcttgcccctcttttgttccatttctgttactcaacaccactgccccatcaggcagccagggaggaccctgtgatcttggactcttcactcccattcccggcagttagtggattgtgtttattcttccacggccctctagaatgtgcttccaactcttccttccaattaactagaaactctcctagttgctgaacttgtcatgtgttctcagctattgtctcagcctctaactgctcaccaccaggcgctacctctgcatttaagatttattcatcacgctgtggctagtgtcatcccctaaattgccgtgcagctctcatcactcacctcggatggatcccaccggctgccccccgcagttcctcagccatccctgcatgccagctgtaccaggcacttgtatgcctctgcatttgtgctggctgtgtcctcaggcgcattttcttccttcatgcctactatgttaattctgttcgtcctcatctctggtcaaatgccacctcttccacgaggctgtcacttgccttcccaccaccagccccagtgttatttgccccgtgcctcttccaagctctcacagcacttgatctaagtctcttttcatttcatccggctgtgtattatgaagtttgcttgattcttcccccttctcttgattagctcctggatgaagagacactgtctttgtcatctgcgtatccccaagaaacccctagtgtgctgccttacatgtagtagacaccttgaaaacctttgtcaattgaatcaaagtttgtttgtgtgtgtgtgtgttttgttttttcttttggtttgttttttttgtaagttgaggatggctgcatctaaagggctcaggccaaggtattaaaaacaaaactgcttggttattcaaaaggatttatcagaaccccaagaggctaagtatcaagctagtgaaagggttattctgcctgtccccaattccaagggtgcagtttttagaggacggacggtcgtgtttggtctacttgtcgtcaggcaaggcctcttccacagtgccccatggaagcttgggttcagtgccaggggcagggaggaatgggcaagcctcttggacactggggcttcagccaccctggcatatagagtcctgcactgtttgtcttgcccagaagaacaggctgtacccacccattcacaagatgtcctctctcacatcattggcaggcctgggaatttcccacaggccatctgggtgtgttctgccgtcctgtctcccaagttttttgcagcattgtttcttgttaattagctcttagaatagcaactgctcttccatcaggaattgtatcccgttgactttcctaaggcaagaatctactcatttcttttttgtaagcattttcccccttcctgcctgcattgcacaggcttacttagtgagagcccaagcagtgtgaactaactcctagctcttacagaactgagttacttataatatgcatctcctgaatcctgggtgaccactgtaagtgcctgaagtggcagctgctctgactgggcctgtgcagctctgaatgctgcatttacttttgggtcctgcctccaacccagaaccacctgtggcctttaattcctgttactaggagagaggagaagcgattaaaccctgtcagtatattcatttattagctgccctttgaagcttttttgaaagcattttacaaggtatatcccgtcaggttgcttaggaacttttgcagcctccttcttcaacattatcattttcatttgaatcaacactggcagcttgacacctctggacacctggcatggcagtgggaggtacctccaaacactgtctttccgtgtctgcaccttcaacaagattttctctgtaaattcagctccaaaacaatttttataaacacagcattacttttgtgttgttcacaaatcagatttggaaagaggtgcttggggactgtcatgagtctatttaaagataacctgatttaaataaaaacaaaaacaaaactttttatccaaggcaattttctttcaatatgggaaattaaattagcttcagtgtctttgaaattgagaaccacactccggccatgaaaagtgaattatcctgtactaatccttgctcaggaagtgatcaaaacacctttcctggctattttgtgaaagcagatttagcccagcatattttgataggagcccagcactaaggaagtttcccaactgatggaaatacagagaatctctatgcacacatcgcttagctgtgtggcagcgctcgttttagtttttggtctatggagcaatggaatctcagtcattgaacctacttcgaaacagcagtggtggggggaacatcttgaagaaaagcctttcatctagagctatgatatcttcgctgcataaagaaaagtggccaactttgttttttctagagccaggacacagaccttttcagtatgtcacctttgctgcttcttcacacagatcttcaaaaataacgactctctctcctctctgtggtctcgtcagagagcaggaatcctggccagctggtcaggtcactcagaaaaatggcacagctgtttctgaaagtagccccattcataagatgtctgctgcccacaactgcagtgttggggaaaggcacactgttataaagagcttcttttctttaaagaggaaagaaaaatacatggtgtttacagaaaagaaaactggaccctcctgctttcttttagtggccatgtctgaaatggaagtgggaaaagccataaatccacacaggcaatcgcgcctataaggcatgattcatactgactgtgctgcctgtgatggaaaacccagctagttaagcaagacctgccagaaagtctcgcacagctcctctgccatggctgatgcctgctgtcttgtgacgtgctggttgtatgtgaatgaatgattgacactttctctctctctcactcagttcatgaccaagaaccccaccatgcgcttgggcagcctgactcagggaggcgagcacgccatcttgagacatcctttttttaaggaaatcgactgggcccagctgaaccatcgccaaatagaaccgcctttcagacccagaatcgtaagtgtcccaggctgtcacagagacattcctttcttcagatgtcacagcattccaccaaagtccgtagaagagctggatggcccctgtgggtgacagaccagaaattcagctggatactgcacagggcagcctcccctggggggaatctgggctccttgtccatgggacaacaatgtcttcatgtgcccacattaattcttaccaagtttcacccctcgtttacccaatctccaacttctctcaacctaaattaaaatcttgtagggtataagaggcctgaaactttccaggtttccccaaaagagtttggctaattgagaaagtcattgttctggccaatttcctcatgctccttggggcactttttgtgccttttctaagcccctgagaaagcagagtgggtaggagatgttgctcacttcactgagcctggcctcttggcttggagagcctgggtctgtaatagctgctgcagtgcagagcccaggccaggccaggcttctttgaccaaagaaatactgggatctccaggggctcctctccaagctctgcagctgaggctggtggccttcctgagcgtggtcccgcttgtggtctgagagctgagctcgtgctcatctgtgggtcaagagctccacaggaggaaggcagagaagcaaggctagcgatagatcaagagtgatggggagacctggcgtggtggctcatgcctataatcccagcactttgggaggccgaggcagatggatcacttgaggtcaggagtttgagactagcctggccaacatggcaaaaccccatctctactaaaaatacaaaaaaaaaaagcctggtgtggtgatgcacacctctaatccctgctactcaggaggctgaagtagaaggattgcttgaacctaggaggtggagattgcagtgagccgagattgcgtcatgcgctccagcctgggcaactgagttagactttgtctcaaaaaaaaaaaaaaaaaaagtgatagagaaatatcattgattaaggtaagagcagtgagatgtgtgatactcacttagaaatgatctttgcagcgtttgtttatacagatataaaatactcaacttttaaaaacatacagtgcacttaatcactaacagcctactaggctgttggacaccaggcacccagaggtaaagccgttccttcaatggtcagccccctgccagcgcccctgggattagggagagcatggccttcagaggctggagcctgtagtcctaactgcacagctggtccagcagggcgtaacgcatctacctagagagtaaaatgaccaacagttgttccctaagctcagcacttgcaagaaatcttttgggaagatctcttcaaatgtctagaactctgcgcaaacaataggtaggacaagtgtgaacctacccaacctctgttgacaaatacagctgcacacccctcagcgaggcctgctgtgaaatgccaccttggtgaaatgagaataaagggtgagtgagccagctgcttttggatgaccaaattaattcttagcctcccattaagacaggcctgctcagcaagattttcatgggattagtgaattggtggttgccaaatgccataataatgcaccatgcagtagacttgctgtaaagcacagtttcatcataacaataactgtaaataatgctactgaacaagctacagagcactcctctgaactcactggaatgggctatatcccatgcaagatgagtaagcctcaagcgcaaaaatctcacccttgtttcccttttttttttggcagaaatcccgagaagatgtcagtaattttgaccctgacttcataaaggaagagccagttttaactccaattgatgagggacatcttccaatgattaaccaggatgagtttagaaacttttcctatgtgtctccagaattgcaaccatagccttatggggagtgagagagagggcacgagaacccaaagggaatagagattctccaggaatttcctctatgggaccttcccagcatcagccttagaacaagaaccttaccttcaaggagcaagtgaagaactctgtgaaggatggaactttcagatatcaactatttagagtccagagggagccatggcactagaaatagttgataatgaaatgagattttatgaagtataccgctccacctatgagcgtctgtctctgtgggcttgggatgttaacaggagccaaaaggagggaaagtgtgaagaataaagtagatctgagaaattctgagccaatcaggcttcttaattcaagagacaaaccaagacgttctgtcaactgtgctgtgctcttctttaagccaatgaaccccaattcctggcagtctacaagaagtctcttaatgctaatgaagaatttaaaggtctttttaaggaaatgaagggctttccaaatagaatgatttactctgaagaaacaaacaatggtatctctgaaactcacaacctaaagcccaatcttgaaaatatgttgtgcaccaagacgactgcttcagcttcttctcttatccttactttctttaatagatatttattaaactgtccagtgaaaaggtgccacaatgcccagtattgtaaacaacaggtttgcattcatgaagctttcattcattctggagtctactaatttacctgaatggtgtttgcattctgtgaaatgcctctccacgttgcatatgtcacacttttgtctgcacataactcttttttcacaagaagggtcactgccacaacagcacagtcagcgggtgaattacaggtgcctgctgcctgcctacctgggtaatctgatcttgtctgtatcgccgtgtgctcatcactgaagaattgcaggccactcatgtcagtgaccagatttgtggcttataaacattagcagtttatttatgttttaagatgcaaagatgtgtgtttgatattcactttaataattagaaatggatcttgtaaacagggcatatatcaaagatgaccttataatatgtacccgaatatacagttcaagaattttgtctgactggaaataaatgcattttgtagcaaaaggaagtgttttgactagaatgatttgtctccttcccactaagacagtagatttccaatcaaaataaaaccttgagcagaatgggtagaactcaactcacagaaaattcctgagaggagaggttgatgtaagttcttctgtgattctctgaagtagatgtggcctgtctcttactgaccaaaacttctgtcctgaatgagggtgatgactgctaagcatagctgtaacagaccaaccctcaagatctcaggggctagacaccataaatgtttatttctcattcacataaagtagcatgtaagttcaacaatcttcctccatcttataactacactatctggaaaatgtagctttccaaagtctccagagcaaggaagagacatggagggggcgccggctgcctgcctgcctctcctaggagggacacacctcacctcttctcacaatgactggctaaaacatggcttccctctaactacagacgggataggggaattatagagcagctgaggagtagctggctagtactgacagtctcttctctgtcataggttcttttttttgcattccaatgcgaacacttacttttgaatgaataaagtagctaggaacttccctttccatttgtgtagcacttaccactcatagtcatcactctcacccacatcatgccactagatcttcatgacgtgcccactattcccactgatgatagtgtgagtactgcagtacatactacaaatggcaagagaggctcagagaagttgagttcattggtttcccaaagggttcaggcttggtaaagagtagatccagctctagggtctaaatctttgatgctgtagtctgggaaagggaaggatcattctgactttgggacttttttggccttcatagctcctccactttgggtcttctattgctctgtgggattgattaactttttgttatggttcactccactctggtaaacaaccacgaaaaataaagcatgcctcctgtttcattcacaaaactcattatcatagccacgcagagccaaaacactgtctttggtaagtctgtgatcactcagcagcttccttcttcacaattgcttctcaagcccactacctgggttccccagtttgggttgagtccattcttttgaggctatttattccatgcctatcaggttattcaatagctaatgtttatatctgagaagagagaagatacacaggatatttacctaaagctcaaatgagtcttcaattcctggttacaattctacttcacatctttcttcagttctgctagacctggcatccccttccaagggatcacaaggctgtcttgcccacacttcctgaagaaggctggcacacagcaggtagcgagccattcaggcaactgggccagagtccactggggctgctgggttccctcagcacagtgggcagcatggaggtcaagacgaggtcacattgggacctttcactccctcaggtccatcttaagacatcgtcaggccttatcatcccactgtccttcccagccagtcctcatcccacacccatttgctcctgctctcccaagctattccacggtgacctaactgaattagacacatggccttgagtgtttgaaaggacaataacttcaagcctttgctttgggatgtgggtcagcctttgactgccaaagttgctttcacttaatggctaacatgttgcatgtttattacatgtgaagccctgttctaaatactttaagtgtatttacttattcaataccccccatgaggtgggtactctcagtttcattgtacagatgggggaaagtgaagtacaagagattaagtcacttgtctaaattcacacaactaaagcagtggggtcaggatttggatcaagcagtttaactccagagtccctacttttagctcagttcagtgaggttcttctatgaaagcgaattctatttttccacctttgtggggttggcaggaagcaccaagataaactgccagctgggcaggacagtattagccctcccctgggtagaacaatttatcagcagtgggactgcatgatttgcatatcaaggggctggagctgctaaccccagttcttggaactggggcaggccagggtgatgcaatcaggacttcaacctccctgaataggggaagaggaagtagtctggttctctctgaatcccgtgagccccatctgaacccctggggtaacttctgagccttggtggagtttccagccctttctcccctcgtagaggagccacttcatgttttagtaactcttcatcacccaccccgccagctcatgcagcagcgtcaggaagaaggtgcgcagcctggaacctaccttggcagctgcatgtttacagctatgaagctgagctggtgtaacatgttagcaaagaaaagagcaaaaatagaccaggcacggtggctcacgcctgtaatctcagtactttgggaggccgaggtaggtggataacttgagatcaggagctcaagaccagcctggccaacatggtgaaaccccgtctctactaaaaaattacaaaagttagccgggcgtggtggtgggcgcctgtaatcccagctactcaggaggctgaggcaggagaatagtttcaaccctggaggtggaggctgcaatgagctgagatcacgccactgcactccagcctgggcgacagagggagaccctgtctcaaaaaaaaaaaaacaaaaaaaagcaaagcaaaaataaaagcatcccatttgtcatttattgatcttaattgaatcctgacctcagatgatctgcccgcctcggcctcccaaagtgctggaattacaggcatgagccaccacaccccggatcttaattgggtacacattgccttgaaaatattccagccacggatttgaccatttcacatgccaacatgataaagctgttcattattcccaggtttggtcatcctggttgcttaatctagcaatgttgacttaaaatgactagacagcccacagtgattgcccccggctcagggtcacactgggccctgtaacttctcattttacatcatccaaggataagactccagtacaactgtagtagatgtttgtgatgaaaatgagccctttgctgagatgttcctctgaattgagttgcaagttggccaaagctggccagagtgcagctgtaaagggagctttgtagtctccttttgttcctttgttgaattgtaaccaaagctaagggagctaccctgggctttatcccgtccccacctcttcacctccactgccctgccaactgttctttccctcctcctgcttcctggctctttactcccctaccgagtacgtcggttctgcactctctctccctgcaccacttgattcttagagccaaactgttatatagccagttttccaaccatcaagatggcataaaattttgatttgcatatttattttataggctcttttagagcccagaaatggcagtcacctttcccatgtgtttctgcgtctttggcatcaccctgtgtcagcagcactgagtgcctaggtgagccaccctaccctatgctgcccgtgcagtctagggggcaagatgtcacatgggtaagagccctggctggtaagagtagtgggcagccctgggggctgaatccacacttactgaatgttcttgagaaaagctagttctttctccaatttcaactttctcatttgtgaaatgggagtgagcatagcgcctgcctgccttctgttaatactgcagggattaactgtgatacattgtcaagcgtttgccacagggctgggacacagaaatgctcaatcgatgttggctattattatcgtcagctctcccacagagggctaagggaaggttgcttgtgatgtccatctgaaaatggacagagagggacactcgtgctctccatgatgcccatccctttggatgccgatgccatgccactccaatttggagggatttcacttttctaactggctgcagaacctcctcaggagaccttattcttttcctaggatgttttgagtccatcctgccccaactgacatacaggttcagccttaagtttgatattctgctgctctcctttgaggccaagaaatatccacaattttcccaaatggcttttcttaccagtctcaggaattgttttgtccttccagatctaacacaaaggtacattttattcacttctgactgaataacacagggaccacacccagcatcagtacctgccgggcacccccagttactcaccatgcctgtgcgccagttcagagaagaaaggacatgtgtcaagatgttcagtagggtctggcatgcctaagaatttgaagccaatagtagaaccaagaaccaaaggcattttcttcctaatttaaggtatctgtgaagaagtttctagtaaaacaagagtctccatagtcctgtgtattcttaatggaaaaggcctcagcactcctatccccttgcaacagcccttccagatcacccaggtctgcctttcttatgccaccaaggcagttcttaccccacagaggcatcattcttccaaggccttaggccacagttagaagaatttaggctagacaaagtgaagattgtgtaggcaccgagtgtggtcagacatgcaagtggattgcagagggtgagacaggaatcttctttggatacatttcaaattagaaaccaggatagtctagtagtcatttgacctgaaagagccagaaataacttagatgacctctcgagttcttgtagccttgtactcatggctaaaagtgaacagagggatatggtcagttggtctcccctgatagacgccaacccacactactcccaccatatagaaaacctctgtcactcgaattttctccctgtccatctctgtacaacctgcatgccctagcacacctatgtgccttctctgcatgctctctcaatcccaggattcccttcaggctcacatagatcacttgtccctcaagtcacatacttgacaatatcttatacctgattgcctttcatagttctcatgctcattcatacgtggaaaacaggaaaactttacaaagttaaaatcagcacaagaagttcacaagaaatataagcccccttctgacaatagagcatttgtggatgaaagagaaagcaggattcctcaactctgttctttttttttttctcaaggagaatgatttttgagatgaaacaagtacaatactcactgataaaaatgaatcgtagcccaaagtaaataaagggattatacgaagcattcaatgagaataggcagaattgcagaacaattattgaagcagtaatttatgagcactggaagtggtgttgatcattagggctgtgcaggggtttataaagaacaggtcttctaagtcgaatctcattttcttctttgatggttcctggactggttgatcaaggataggtgaacatttttgcatagctgaacttcagcgacatacatgacaaagtctcgccccatttccttatggccaagctggattcaagacaccatggtactgaaaatgtggggattaataggttagtgtcagtctggaatagtggttctgccaccttgcgtaacccctgctccccttggattaacagacaaatttcaagtcttaatcctatttgagatttcataccgtcaacattatgactaaacacaaaaattaaacagtgggacaaagggctactttgttttcaagctattcatgccctcccagaagactgtgatatagaaaagcacatgagtttagagagtcagacattcactaaactaatatttattgagcatctattatatttcaggcatattgtggttgctggaaaaactagagtgaaaaagacaccaaagatccctgccttcgtggaatttacattctaatcaagacatgttatattgtttacccaaattaacccaatggtaaggcagccctgtggtcggtctgtcttcataactgtatccatggcacctggcatattgtaggtgcttaagacatatatggtgttgaacgataaaatcagagctgggtgtcagacacacactttttgactccaaagataacactctttcatagctgtatgccagaacaaatggaagaaataaactgtacttgggtctgaaaaagctcattatatcaggatgagatggaggcaataggtcttgacagcatgagtaaaaattaggcagaggcaaagagaatacattcaatatatttattcatctgacaaatattaggatttatcagaaccttttccaagtgatagggccagaacaatgagcaaggaagtcatagtctctaccattctggagcttagaatctagtgaatatacaacagggtgctgtggctgccaaaaaaatataaaatgcaatcttagcctccagggttatgagtgtgatgcctcagatgtggggaaggatgagctccactgagctttgccgtggttaggctgtgcctagaaaactgaactcagctctagataccaccacagagagatacaaacctggatcatgttcagaggagagtgaactgagtgatgaagggagcagaaacatggagcacagcaagtgaggaggtaacgggtgagcctctggagcaaaggcaagtggacagcataaccaccttcaaatatgtgaaaagctaatgtgatggttattatttttgcttcccaactatttctagctccctgcctcctgagcacagacaggtgaggtcgtatgaataattctagccaacaagtccagagcagaatggtatatactacttgcaagccagaacatttcagtgctggtgagacactctttttcttccagtgaacggcaatgatgagaggtggtggctgggctctgacagcctgggtccctgagtgattaacatgaataggacccctagcttaccctcaatggacattttgaatgagcaagaaatactagttgctgttatggtttttattactgctgtttcatggcgctgagattacgatcggtgtttgtccctgcagcataacctagcctatcctgactgataggcgtgccatgtgtggagggaccagtctgacaacatatggctcccagggttagaactaggagcacctcaggctgtagcaggagtcatagaatgtgttatggcatagcataaaaatgaacttttccaccaaggtccctaaatatgtaatagacttcctttggagggaagatcactggacatcttcagtctacaaccctcgttggggatgatggacctggaccggagggctctcccaaccctgagaggctggcgtaccacagtgtggaatgggcttagcaagcacactattattgtggcgtttgccctagggggcccactggggcaggcctgagttggcttaccatcatgtttccactggccacatgccaggcccctgctgctttcactgtaccacacagtcatgaatctgtgcatagcatttctgggggctcagcagggtgtacaaaaggcatagcagctcagatggcaatgagatcaaacgaacggcaagggctctctcggcccactcttatgcagaatgataagtagtcctttggggctcatgcttgcatcattagcaacctggaggcattaggaaacctctgaagttcacccctactgatttgtccctcattatccttattctgccctctaggaactagagctgagcacctttcctaacagtgctgaatgccagtgtaaagatctgctctggggaggtgtgtgttcagagaaagccccggtagggggatgaaggaaaacatgtttttagcatcaaagaccgggtttgagcacgtgcccccttttccaatggttggctggagttggatcacactggctcatgagagctgattgtgcacatctctttcaagttagtgctcggagagctcacagtggtagcttaaaattggttattgtgggaatatttacaccatggacattggtaagtgttaaaagtcaggccttttttttttttttttttttttgagactggatctcactctgttgcccaggctggagtgcagtggtgtgagcctagctcaatgtagcctcaaaggcctggatttcctggactcaagtgatcctcccacctcagcctcctgagtagctggaactacaggctcctgcaccatgcccagctaattttttttttttttttttttttttttttttgcttttgtagagataagctattgctgtcaactcaggctggtcttgaactctcttagcctcaagcgatccttcttacctgggcctcccaaagtgctgggattacaggcatgagccactgcatccggccaggacttttattagttttattatttagacagctttccagcacaaccttgcaaatagggaaatagtgagaaaatcatggtctttggaaccaggcaggaccagggtcaccctgactctgctcagctgttgtcattgaagggggtgtggagatactgaaacttccgtgaaccttagtttccttgtctgtaaaattaagaaaccttagtttccttgtctgtaaattaataactaaaaccaaaatattaactacctcaaagggtagtgtgaggatcaaatgcgataatgtccacagattgctaactaaattaagctccttcctttggggcacatagagaacaacttccagggagaaaaacaaaacacccctgaattgcagcttttttgcttttagctgtggaaaacattcccagaagcttcgcagcctcgcatcctcgtaccccattggccagtttagcgtcacatgaccatccctaacaccaatcacttggcaagggaaaaatgacagccaagccacagctcctgagggagccctggagcccctgttggcgttagtgggatttttaacgccccctagatggttccaatgcgcagtcagaataccgaaccaatggctgagagtctaagtctcggacaaaaccttagcccccgggggctggagagaggttcattctctcctgaaggacaaggatagagaaccaagtcagggttccgggagtgtgggatcggggaggaggaaggatcgctgtttatcaggtaatcaaaagtgcagactcactctccattcccagctactggacaatcgtggggcaaagagctcagtgggaaaaatcaaaggcattaaaaatggttattcttagagataaggtgtataactattggaaaacagaaataaagtcttgaattaagctttgagaaatggttctataatagtaggtgggagggagagagttaaaaaagcatttgcaacttatctgagagggtaagacatggccagtgatacttaactgaagaggactgtttgccctgtcagttctgaagctcctgttacagcactgagttaagccctgtgaacacaacatgtgtttatttattgtagacaaaccctgccacaaagccacaggcacagcacacttctctgttaggtctgtatctcttagaatattaggaccctaactgggattctagcaacttacttcctgaggctcagagctgcctcctggattcagagagcctgtcaacagcgtctgctgagtatataacgtggactgtgagaaatatggacttggaatcaggagacatggatttgaaacttgatgcattcatcctgggccggctgttaaacgctcccaatccttgttctcttcctctattaaatgacaatactaataacgatacccacctcataagattgtgatgaagataaaaaaggataagttggctgggtgcattggctcacactcctaatctcagcactttgggaggcccagggagaaaatcacgttaggccaagaatttgacatcagtctagtcaacagagcgaaacctcatctcttcagaaaacagaaaaattggtcagttatggtagtgtgtgcctgtagtactagctgctcaggaggctgaggtgggaggatca

SEQ ID NO: 343 - skipped

SEQ ID NO: 344 - protein, 41 aa, Homo sapiens
MALEIVDNEMRFYEVYRSTYERLSLWAWDVNRSQKEGKCEE

SEQ ID NO: 345 - DNA, 2396 bp, Homo sapiens
aaagtcccacggaggaggcagaatggccagtcgaggggcgcttaggcgctgcctttccccagggctgcctcgactcctgcacctgtcccgagggctggcctgagacgggactcccggttctcccgctgcgaagcagcgcggccccccggggccggggcagcggcgccggcatgtcgtctggcaccatgaagttcaatggctatttgagggtccgcatcggtgaggcagtggggctgcagcccacccgctggtccctgcgccactcgctcttcaagaagggccaccagctgctggacccctatctgacggtgagcgtggaccaggtgcgcgtgggccagaccagcaccaagcagaagaccaacaaacccacgtacaacgaggagttttgcgctaacgtcaccgacggcggccacctcgagttggccgtcttccacgagacgcccctgggctacgaccacttcgtggccaactgcaccctgcagttccaggagctgctgcgcacgaccggcgcctcggacaccttcgagggttgggtggatctcgagccagaggggaaagtatttgtggtaataacccttaccgggagtttcactgaagctactctccagagagaccggatcttcaaacattttaccaggaagcgccaaagggctatgcgaaggcgagtccaccagatcaatggacacaagttcatggccacgtatctgaggcagcccacctactgctctcactgcagggagtttatctggggagtgtttgggaaacagggttatcagtgccaagtgtgcacctgtgtcgtccataaacgctgccatcatctaattgttacagcctgtacttgccaaaacaatattaacaaagtggattcaaagattgcagaacagaggttcgggatcaacatcccacacaagttcagcatccacaactacaaagtgccaacattctgcgatcactgtggctcactgctctggggaataatgcgacaaggacttcagtgtaaaatatgtaaaatgaatgtgcatattcgatgtcaagcgaacgtggcccctaactgtggggtaaatgcggtggaacttgccaagaccctggcagggatgggtctccaacccggaaatatttctccaacctcgaaactcgtttccagatcgaccctaagacgacagggaaaggagagcagcaaagaaggaaatgggattggggttaattcttccaaccgacttggtatcgacaactttgagttcatccgagtgttggggaaggggagttttgggaaggtgatgcttgcaagagtaaaagaaacaggagacctctatgctgtgaaggtgctgaagaaggacgtgattctgcaggatgatgatgtggaatgcaccatgaccgagaaaaggatcctgtctctggcccgcaatcaccccttcctcactcagttgttctgctgctttcagacccccgatcgtctgttttttgtgatggagtttgtgaatgggggtgacttgatgttccacattcagaagtctcgtcgttttgatgaagcacgagctcgcttctatgctgcagaaatcatttcggctctcatgttcctccatgataaaggaatcatctatagagatctgaaactggacaatgtcctgttggaccacgagggtcactgtaaactggcagacttcggaatgtgcaaggaggggatttgcaatggtgtcaccacggccacattctgtggcacgccagactatatcgctccagagatcctccaggaaatgctgtacgggcctgcagtagactggtgggcaatgggcgtgttgctctatgagatgctctgtggtcacgcgccttttgaggcagagaatgaagatgacctctttgaggccatactgaatgatgaggtggtctaccctacctggctccatgaagatgccacagggatcctaaaatctttcatgaccaagaaccccaccatgcgcttgggcagcctgactcagggaggcgagcacgccatcttgagacatcctttttttaaggaaatcgactgggcccagctgaaccatcgccaaatagaaccgcctttcagacccagaatcaaatcccgagaagatgtcagtaattttgaccctgacttcataaaggaagagccagttttaactccaattgatgagggacatcttccaatgattaaccaggatgagtttagaaacttttcctatgtgtctccagaattgcaaccatagccttatggggagtgagagagagggcacgagaacccaaagggaatagagattctccaggaatttcctctatgggaccttcccagcatcagccttagaacaagaaccttaccttcaaggagcaagtgaagaactctgtgaaggatggaactttcagatatcaactatttagagtcc

SEQ ID NO: 346 - protein, 683 aa, Homo sapiens
MSSGTMKFNGYLRVRIGEAVGLQPTRWSLRHSLFKKGHQLLDPYLTVSVDQVRVGQTSTKQKTNKPTYNEEFCANVTDGGHLELAVFHETPLGYDHFVANCTLQFQELLRTTGASDTFEGWVDLEPEGKVFVVITLTGSFTEATLQRDRIFKHFTRKRQRAMRRRVHQINGHKFMATYLRQPTYCSHCREFIWGVFGKQGYQCQVCTCVVHKRCHHLIVTACTCQNNINKVDSKIAEQRFGINIPHKFSIHNYKVPTFCDHCGSLLWGIMRQGLQCKICKMNVHIRCQANVAPNCGVNAVELAKTLAGMGLQPGNISPTSKLVSRSTLRRQGKESSKEGNGIGVNSSNRLGIDNFEFIRVLGKGSFGKVMLARVKETGDLYAVKVLKKDVILQDDDVECTMTEKRILSLARNHPFLTQLFCCFQTPDRLFFVMEFVNGGDLMFHIQKSRRFDEARARFYAAEIISALMFLHDKGIIYRDLKLDNVLLDHEGHCKLADFGMCKEGICNGVTTATFCGTPDYIAPEILQEMLYGPAVDWWAMGVLLYEMLCGHAPFEAENEDDLFEAILNDEVVYPTWLHEDATGILKSFMTKNPTMRLGSLTQGGEHAILRHPFFKEIDWAQLNHRQIEPPFRPRIKSREDVSNFDPDFIKEEPVLTPIDEGHLPMINQDEFRNFSYVSPELQP

SEQ ID NO: 347 - DNA, 43901 bp, Mus musculus
  misc_feature (1)...(43901): n = A,T,C or G
tccgagaatagcttgcagagtcggttctcttccaccatatgggtcctggggattgaactcaggtcatcagcttggcagtaagtgcccaaggcccgagtatgtttaatgaggcaacagggaacagagatacctcgaggcggaaaactggaaatccagttagactccacatgtttagatgtcgagaaatgtttacagccacgtctgcaggacagtcatggaaacagaagatctctgcctacggagaaaacaggggcctctatgctgaggccggcacgctgccctgagcctccatccggctgagcgtgacaaagccctgacgctctatgtttgaaatgaaccggcagtgctgccgtatgcagtgacatgggcagcgatgtagtagtcacagcctcagaagcagcttcatggctctcctgagatttggagaaatggaggatcagcttactccccaaacacagaagtggattaggaagaaaacaaaagtcctggaacgctgtctctcagaaaagcaccgtgaccattgtgtgcatcgctttctcccagactacttccctgtgtgcatacttagaactttacggagtctcttacaatagtgtcattttgaaaatcaaaatggtattacagataaaatctgtagtcttgccttttcctccttcatgcccattaacatcagtttcaacaccatgaaagatgacagtaattataggtattaattatatatgataataaatgttattataatttaaagttctctcttagtcacgtgtagtggaacatacctttatagcaggcgaatctttgtgagttcaaggacagcctggtctactgagtgagttcaggacagctaggaaggactacataatgagactgtcttgaaaataaaaccaatcaaaaacaaaacagttctctgttgggagctaaactccttcctgtcttttgctagcattgtagtacaatgtgtagtgttaaaggcccgggcctcccagccatttaactagttgggaaactctgtcagtcttacaagttctcagttgtctgctggggaaagcccaggttctgagatttgtttaaggatcctgtgacctaacactggcttgttttagaacagctcccaacccatactgactactcggaagtgttgactatgctcttatgaataagacaagcattagcattcacacatgtctccttgagaacttgatttgtgtatctgtttgagacagtgccttgggagccctggctggctacccacgtaatgggattcaagtcctgagccaccatgctcatcttcaatttgtttttaattttaaatttatttattttattttattttattttatgggcctgagtgaggtttttttgttttgctttgttttttttgtttttttcatcatacatctgcctggtgcccgtggaggacaaaagggaccaggagatcctgtggaactgcagttacagtcgtgtgtgagctgctatgtgtgagtgtgttggaaaccttacccgactgccccccagaaatatagcagctgaccaagaggaaccgaggggtggagggaacttctagccttcactctgtaccttggttgaaattttataacaatgtgtttgttacttgtgtataaatgcacatgtgtgtgtgcgcatgtgcctgtgtgcatgcatgtgtgtgtgtatatatttttaattctcaatttactctggtaatatatctctatcaaggagcctgccacctctacttcctcaacaaagtaagtgacattgtcatttaaatctttgtcactttgatgagtgaaatcttaaggcatgtaattcttcgtgaatatgtattgttgccatgggcacagccatgccaaggaccccaatgcctcagtccatgggcgtggcaaagcctcccctggataagcctcagggacggcatagcttgctctggagtgcagatgttgacagaatgtgcagaatactccactgtcccttcctcctcccagatgctcacagactgctccttccaaggtgagctaaaccttccccttgttcagctgtgtaccatggcccccctcctcgtttttcatctgtatgtggtaacttgccctcattgttcagctgaatgcagtacccccacctctctgctcagatggactgaacaagcaggcaaagcttctgggatgctgcagcgcctccatccaagagctcaacccacctgattctagatggtctaggtttgacattacttcatcccactgatgccttccttaggtcaatcttggaagctgtgtacacgtatagcacaaattatctcactaattgtgtttcttttattatttattaacctttatcatatatttttaggtaaatatttacgctgcatgtatgaagaaacttggggctggtgagtagctctgtggtttaaagagcctgctactcaagcgtgaagatcaaagttcatttccccagcgccctcataaatgccgggtgggggtggtggcagggttcgagaggcagagactggatccctgaagcaagctggctagctagaccaatcaaatcagttatgttacatacagtggataacaacccgggaaaacagtcaacatcaacctatggcttccacatgcacacgaacccacacacaaacatgtacttacatgcaaacatgcatacacacatgcacacacactgtacagttaaacacacacgcctgcgtaagtcaaaacggaactttaaagtgtttttagtgtaagtgaatgattttatgcatacagagttaaaagaaaattacagtgatttctatgaatgtatgtcaaagatggccatcccatattaatttaaagcaggggaatgggttaaatttataagcatgagaccatctacatgacactatcttgtgtagctgtttaaaaatttatatttaagcagagtttatgcaacactactttattatagcttcaaggttaagagaaaattagacattaaaatacaacaaaatctgggtgtgggtgtttgcatgtttaatcccagcactcagaaggctgagtgaaggacagtgagcttgaggctagcctgggctaacagtgagacagtaagcttgaggccagcctgggctaacagtgagaagcatcagcccttatctcaaaaatacgcatgagggtcggtgagatggctcagtaggtaaaggtgcgtgctaccaagtctgatgacctgagtttatccccagcatccacatgatggaaggggagaattaataaaacagaactcgtgaaatagtggaaaatgaacacaggattttgtagctaaaaggtgtagaacgaaactgaggttgaatgtcaagtaaatgatagacaaaagagcggcggggtgcgttttcccgggcagctgtgagaaggaagatctcgggtctgcgatttctgcagctgctcctgtacactccaacccagggcccctctcctgagaggctgctcacctttcagatatcccagcgagctgagctcccaaagcgctgcccaagttggggaaagggatggctggctgctcagggggccagctcaggcatgcgcagttccgctcaggctatgtctcccttctgtggtgagtacagatttaggccacagcatactccaaccgggacaaggaaaccaactggaagagcagatgggttcaggggagcccttgggtgaagggcatcttgggaagcctgagagatgttaaatcactcccatgactgtcactaaagtgcgattcgaatttataccagaaagtttattcctatttccttgatgacgctcctgccagcttcttgttgggacgaattaggattgcttttgctcattccttcccttgcgtctgttctattttaagtgctcaagccttgggtcttggtagttgccaatcacgattacattctgagaagtctggagccaagtgtcttagcctatgcacaaggcagaagacccaaggacccctcctccattgaggattcattcacaataatgatcgttcatcctcatttacatgaatacattcacgataatgaccattcaacctcatttacatgaatgcctttctctttcacctactgtttgcctaacaaacctctcacctaaatggccaaattccaggcacagctaacggtagctgcctacgtaagacctgctcagggaagctcatctcaaagtcctgcagtgctttctggctatactgaggtgtgttcactcataacctctgtcattctccacagtgagaggcccttggcgttgtcctcactccaaactgtatgcgcggatggtggatggtaggaatggggggttatacctccaggccccatccgcacagccctatccacaggcaggtatggccccaactgagtgagaagtcctggcagcctgaggttgtattggctgtgaggtttggagcaatcaaagctcctgggcttacatcagaatggttaactctttagtgaccttatgcaagtcctttcttcctgtctgtttttgttgttgttgttgttttgttttgtctataaaacagggttgactgtagtcagtctcctaagcttgtgtctcctcgggacttcatgtagtcaggcatgtctagggccagagtcgggaataggtgcctcttccacggcagtctcttctctttctatggtggttcagagactagaactgtgccccccccccaatatggtcttaaggagtgactaatttggcagttcccaagacttacaaacactatgaacaaaaaggggggggggggagagatcgagcagtggaggaattgctgacattttatctgggcggtaagggcacaaaaggcacacacaaaaaaaagcatataaaatactataatcttctatcacccagattccataaaggaaaatcttaaccatcctgtttgtcacaagaggaagaagggcattgcatacagataaactcagcctggggaacatgtctgccatgtcttttgttacttccctggaaagtgatgcggacaccacagcccttggatcctcaccgcatgcccccactttataggagcacatgcaagctgctctggacaccagagatggtttgtgcggctgtgccggagttgtaccggaatctgggataggagtaggggtctgggctctgccctcgggaattggtctcggagctgcactttcttacggttccatttttctgaagtggagatgtgataatcaaaaagatggtgtgagaccctaaggaaaaaggagcttcaatttgtcacagacattggatatggcatagtttgagggagtaaactgtctcagaaactagaattcacttgaaaatattttatcccacaaaaataaagcaaatttcataaatatttgaaaggtttcataataagcattcaattattaatagtaataataataatgatagacggtagcaaggcaaatggaagggatggtgttacttactgagaagtcctcagcgaggtctgctctccattggtgtcttcaccagccttgggcagacagagcgagggtcaggaagtgattttggtttcctttcttcctcgtgctgtggctgggcgaggggagcctcctgccccttcttaaggcaagtcactatctgacagacccaaccttactgggggccggtgggctactaagcacagccaaccagcatgagggcctatgaatatgcaaattggagcccccgagctggttggctgacccccgtgatttcccacctccagggcaagccaggttctctgaaagccccgctcagacagtttcttgaaaagccttctgttccatctccgctaagaattttcagagccctttgaagatctggagcatggatttgcttggcttctccactgctgtgtgtcagctcctgatctcggcctccaagttccccgttgtgagacacctccaaagtgatcatctttcttcagacccctccagcaatctcagggggctgagttctatctagcactaaaatctcgcacctcagatctcaggaagaacaggctgcgaggctgccccagcagtagaagaagttggaacactggccagttgccgatagacccatctctgatagagttgaggagaactggcctacgcccaaaacatcacccagaattttccatcttctccacttcaacctgggaagtgaaatgaatgttgtaaaaatacagcaatgaaaatcagtgcacaggcttttaaagagggctccaaggttaagagcacctgctgctctcttccagaactcccgggttccatccctaaataaaactttaaagcttaaaagagagagaaaatcaatgtaccatcgctcatcttatcaacatgaattaatcctcaaaaggtaatgcagagtgaaaaaaatcggtcacagagtggtacaaggactacgattccgtttctattaaaaaaaagcccccctccccacaaagggtatgggttttcactatagataaatctattcattgttttaagttataactgcatatatcaatagatgaaatctgggtaacattgctatacacagagaccctatacaagctttagtccatattttaaaggagcctagagttgaaggacaggctatatagtctcatccagtaatattcatatatatgtgtatacatatatatgtatatatatatatatatatgtgtatatatatacatgcacacacgcgcgcgcgtgtgtatgtgtgtgtatgtgtatgtgtaaatgtgtgaaagcatggttcagaccacatacacagatattagaggatttaaggtaaaaagaaaaaatgtgttgagtgtattattcaaggtgaactgaccactgagccgtgttttccattcatggaactagttaatcctttctagaaatcacaaaattttgtgtagtttgaaagtgtagatatttaaaattttttaaatataaaaaatttaaaatgaaaaaattatgtgtatgcatatgcttattaaggctgtaatggaaacttgaactcagaaccctgaatcctgctaccacttgctttcatgggtgcttggccctgtaggccaggggttctcaacctgtgggttgcgatcctttggaacttgaacaaccctctcacagagtcacccaagatcattggaaaacacagatatttatattatgattcgtagcagtagcaaaattacagttatgaagtaacaacaaaaataacatgatggttgggggtcaccacaacatgggaactgcattaaagggtcacaatactaggaagcttgagagccactgctaaagacaatgctgtgcctagagagactccaaaccaggagagtgtcctagcttataggattgcaccttgcagaccatggaagctcatgggtaaatctcaagggaatcaatttcaacctttattctcgaaggaggactttgagtgctatcatgtacaaaggtttttgtatgtattaaaacatttttggcagtcctggggattaaacctaaggtattatacatgctaggctttggttaatggtctaccactgagctatattccctgtctactctcttttgagaaaggatcctgctacattgcccagactgctgaccaccttctcctcctccttctccttctccttcttcttttcttctcctcctcctcctcttcctccttctggttcttcttttggtttctctgtgtaaccctggctctactttgactttcttaattctcagattataagcttgtgtgaacatgccctgcctaagactacaaaatcaggatgaatttgggtgatcaataaaatgccaggagatatgcttgctatacctcagcttgagtttctaaaccttagagaagaatctcaaaaattaataatagaaaccatgaaaaaaaattatgtaactaaggaaggggaggctgggtgtagcctagtggaagaacttacttagcatgcacaaagcttcaacccccagcacaaaacaaaaggattaggcaactatcttagaaaagttagtagcgacctcagcagctagagattgacatacctcctggctattcttgtgttcctcaaaagtgttgtgagcacggaagtatgtagtcatttctcagttactcattggctagcttcgagcagacaattcagaaagagagtggtttctttgcttctctcctaattagtcaatagaagtgacagatttgttgttattctttttaattttgtgtgtctgttctgggagggggggtgtgcaggggcccatggagccagaggagtttgatcccctggaattggagataaaggtggttgtaagccacctcgtgccaggtgccaggaagagaactctgggcctctggacgagcaatgaatgctcttaaccactgagccatctctccagcttcaagacagttctaagcaagtcatcacagtagtgatgcactgtagtgacagagacacactactttggaaggaagcataaagtacctgctcactttgccagaggggaataggaaaggtttcaggaagagatttaaaggggaattaaaaagcccctagataaataggaaggaacagcggacgcaaacatggggaatgaaatagtgcattgggtggggtcgggagtgaggtggggatcggggcagatggtcagcagcgaattatggctcagtatctgtgaaaatgagagctcagaagccacgagccggataattaggtgcttgggctagctgaggagtttgggctgtatagacaggcaggcagtagcaactggaagaatttaagcaggggagtggcaggattaactctacactaacaaaggatctttgacagaggtgtgaaggcggagtggagagagtgaaagtggagtcttagacctgctacaaggaagctttgaaggaaacagatgaagggcattacaggctcaatagtgagggcagctgggacagatgatgtctctctttctaatcagggcttctgcccaaggctcagagattccaatgccattggatccagggtttggtgagcagaggctttgtgaaggttttgaaaattaggcaaaataactcaaaaaaaaaaaatcaaaggcactacgtggttcatttattcattcagacattaatttgatatttattcagctgagctcatggaatactatttctgttaggaagccagggttaaaggcctagggatttaagagcgagcaagtaagcagggtaagggtggcaagcgctttcaatgtaaggcaatgggcagaatggtatacacaaagctgcggggggagggggcgcaggaagcctacaagcgtttctacaacctctgccaatggggcatgacattgaacaaaagtgtaacccccataagattagtatgtcacattcccagagttgggtagcaaataacttccagagttcacaagctgggtggagcacagttagcttggctggagagtttgctcaggggcgggagaagatcaggagctaaagcacagtggggctagttggtgaagtcttacaggtcctttaatacagttcctcttgtagtgatcccgggccataagattattttgttgctacttcataactgtaaatttgctactgttgtgagttgtaatgtaattatccggtatgctagatatctgatatgtgatcccactgaaagggtcgttggaccctccaaaggatcgcgacccacctgcccaagtccacataagcctaatcaccggcctgagatctaagttcctagccatttccctctcttcctagaatgcagaggcagaaaggctaggtttgggggcagcagaaaacggcgccaaacagaaccagctctgaggaaaggcagggaaggcttgaacccgggggcgctccggtggccggatggttgtcctcgaagaatactaacccaagttggccttctcttgacagcgccacagatgccccgcgctgggaccgctaaggatgcgagcccggctcacaccgcccggcacccagcacggttagtggttcgctccgaacacccctcgccgcttggctggtgccgcggccggtctcacttccggttgctgccgggccctgtatccggtgtccgcccgccctccatcccgctgcctccgcgatgctgtcccggtcacgctgcgtgtcccgggcgttcagccgctcgctttctgccttccagaaggtactgtctggcggggcccgggctccgatgggtgccgaacatggctgtgggcggacgggcaggccgaagggcagggacgctgtgtgctggccaggccggccaccaagggcaccgggacgcggtggctgccgacgcccgcggagccgcccagccgcgtgtacggagccccggagcccctgtcctctcccaggcagcccgcgccggccgttttcccgctgtcccgaaccctttgctccggggctgggagccgcgcccgcagcgacattgacttagagttaagagaggaggcacggcccccaaccgtattccgcggcctgtctcttcgcggtctccaaactagcgcctggcaggctcaggggaggatgacagagtttggccgactcggtgttttgcgtctactttcggagttaagagcacgataaacgtgtcattacctgtcagcagcacgataaacgtgcccttaaaaaaaatgtttgtttgtttttttcccccctcttttcattttgggtgacgtcgataatgtcttctttctcaacaggggaactgccctctagggagacgttccctgcctggtaagttctgcccttgcggtcacctaaaatgcacttctcgtgggcagagcagcatgggaggaaatctgatgtttcttctcatggtatttaaagacaatgaattcagagagatgcgaagcaaaagactcccttaagtataactgctgtcatgtactcacccggcgcatccttactgggttttgttcagctttttgtggtgctgaggatagaagctagggcatgggaggcaagcacttaaccactgagcaacaccagcggcccacggttactgaatttacactgtcagggcactgtgctagatgctcgttagaaatacaacaatgcaaaaagtcttgtcctccaggagcctgaggcgtaagggaaaggcatggtgtaaattgctgatcatcaatcatctaagtgtttggaaacatggacagaacaggtttaaataggtgacattaaagttgtggcttgcaggatgtgacagtcagtgaagagaagaagaagagagagaaagaaaggggtagaatgcatgaagtcagtgaagaaggaaacaggtgtggcattcttttggaattggaaacaaagtgactggtcagaagccattagttaaaggaaacagtatctcgaggaagatgatggtgtagaggctttcggaagtttagatattttttcccttaaatttatttttctttatgtgtactgtgtacacacttggcattctgtgcccacggaggccagaagaggtgtgggatcccctgtaattggagttgcaggttggttgggaaatgcccggtgcctgggtctctgcaagagcagtaccggttctgaacccctaagcctggaagtttggattttcattctcgtagctgtgtgtgggttgttgtctttggtagaggagaaagttattaacaaccttccatagcttacttttaatcaggtgcctggcagatatgtatttatccctgcccaccttcacttttttatttttggagacaaagtcttgctgttaggactgtctgacctagagctaactatgcatataccaggctggccttgaacttcctcttgcctctctgcctcagagagctaggattacagccttgtgctaccacatctggctctggcaaaatacttgttgaaagattcagtcctatgtatgtaggctttctcgtgccagtcgttgttctgaatgcttcctgtgcagttttgggttaatcataactaagtgagatttagtagcatagtcctcgatttcgaggtcaaggtcactcaggcaaaactattggttaaatgaggctcacctaactccttcctcagctcaaactgctttactgaaagaagggttggaatttccttgtgaactcaacagagtatgtctgtgtctgaatgatagggtctgatatagcccaggctgaactcaaactagataagtagtctgaggctgccattttacttttgaacattctgcctctctttcccaagtgctaggatcacaggattgcaccaccaggcctgggtttatgcagtgctggagttcaaacccaagactttgtacctgctgggcaagactcttagcagtcatctgaactgtgtccgaactcagtcaatagagtgcttcttaggttcctaggttcctaggtagggatacagccggtctctctctgcaagaatctcttgggctagctggacagacaaagcaaatgcacggttatgtacccttagggagaaaacagcattgtggttactaagtacaggctgagaagacatgagggtagtatgataataaagcccagcttggtaggttagagagtagaaggcccagagaagggacatttaagatgagacttaaagaatgtatgagttagccagggaaatgctattccaggcaaagggaatttcctgtgcaaatgtttccaagcaggaagagacttgagcagttgtacaaatggtaactagagagacaaggaggcctgatacagaggaggtggaggactgtaagcgcctggactttatcctaagccaggaggacataaggcttcgagcacggtccatagtgcattctcagttatgacctttctgctcagctaggaatgctggaagatgcaacaagtattttctccacttcttaagctgtgaggaaaaggaaaagccttgtgcttaggggtgggcatcttgactcaagtattctggttaggctagtcaccaacctagttgtatatgaaatagaaataatggcaggtgactattctacttcagggagttgctattgagagtggaaaatgaagaggccattgtgtggaatctccttatgagcctacagtactgtacaaataaaacttgttataggataaattttgtaggactccagtttccaaaaggctgtgtgggctgctgtgttctagttcaaagacaggctctgcttagaatctgcacctcactcattggctgctgaacacagagatgactggctgacctgactctgggaatgtttgtgtgggagtgtatgtacataaggaccagttgtctctcagtcaaatgggttattaatagacacaaatagcaaaaaaaaaaaaaaaaaaaaagaaaacataaataatatattccgaagaagcagctgtgggtagtagatattggggaaatgaatttatgataaggccagttggtttagtgggtagggactctcccctcttcctctcccttttcccttatccccctccctctcttgctcaaggatcattttattagaatttgagagaaaaatggcaggtcaggcaaactgaatctagtcgctgccacaccgcgaggagggaaatggccaggccttttggattagggtccagggaagcacccatgttcagcagtggaagttgtgggctagcagttatagaaagggcagggaagccgggcgtggtggcgcatgcctttaatcccagcactcaggaggcagaggcaggcggatttctgagttcaaggccagcctggtctacaaagtgagttctaggacagccagggctacacagagaaaccctgtctcaaaaaaaaaaaaaaaaaagaaagaaagaaagaaagaaagaaagaaagaaaggaagaaaggaaggaagggcagggagtcttcacagaaagagtaagaaaccccagagtgacctttggccagtgtcagagaaaagggcaagttaccctttttgaattggaactcccagagactcatcttttattaagagtgaccaggtggaaagcgtacatcagaggaaggtagactgacagggggagaggtggtttctgctcagttgtaggacaagtggaagacctaaagccacccagtctttgccgctcgggttcagtcagttcgctttctagcctcatccactacacccagatcagctcctctgcctcaggttataagaagtcacaggacaagctatcatgtgtctactttcaagcttcaaaggtagtagagacattttactatgcaaacatagtaggctaatgaaaattcgtgactttttaaggcaggtagattatacaagccttaggactgtacctctttccctccaagtgcacatccactcttattctcccatacctatatgctgccaataaggcaggtcgaacatttgagaagcaggattctaaatgataaagattctgctattgcctgaagctggcccactctgtctgggctctgtgggacgaatagttctatttaatcctgtgtgggttaggagctgttgattaagagttgtttgtttcttgcaggggtctccttatgtcggggaccaggttaccctgacaacaggaagatggtgtaagtatcaatgggtgatgcagatatgtggccatggtagatttacttagacacagattctaaatttaaactccgatgtcttcacggatctccagttctagacattaagggcattaggttggatccatagacccatcctggatggtcatggtcgttttatcataatctacctttgtcatcagctcagtggtcaggtgttggaccaaaagtatacttcgaagtatacttaataactaccttcgcaggtagttaaagtataatgagtgttaacttgaaactatctttcttatctttttcttaaaaatgagaatgggcatctcagagaacctaatattctagttggatacaagtgcagctgagggctgcaggtcacgtttgcttcagagaattgagagaattctctctcttggtagcactgttactcatcttaaaatcagtaaacgcaaaagaccagttaagcccaggacttttgactggtttggtaagaagctattattgcctaatgcagagtttggaggagggccatccacgtgtggtccagattaacttgttcttacgagtgttgctttgagttactttgcattccaagcatctttagggttctgagaggctgctttctagtacctcttgaggaactgtggggctgcctcgttacagggtgaagccttggcaggaacaagagctttctccttacgcagcacaatacattttgctttcattccaaactgtttcattagcgtgctgttacaagtacaaaactcttgaaatctttgtggtttgtttgttgggttttttcaagactgggtttcttaccctagaactcgctctgtaaaccatgctggcctcctctggagcaatgggattaaaggtgtatgcactatgcctggctctgagatgtcattgctaagaatttttactgaagaatttatatattcaaatacctttcaaaaaggacaagcagccagcggttaagctgtagtgttttaacatgttcccactatgataagtaagaaataaaagatttatagaatatttcagtttttgatgtgtaattacattgtaaagagtttttttttctgtttctaatactcagcagtaagcaagtaatgctttcataattcaaaaaatgattcagagtcataacatattacttgttcagtttaaatggagagtggggtaatgaggagtaatcatgactttatgtagtaaatacaacacataactgaagttaattgtggaaaactaaacttccacttgagtcaccctcaactgtggcatgctagtaacactgtctgtgtcgcatgctgtcttttcttctacgcatgtctattttgtttaaaagatctttacacaatattctttgattgcatttgttcgtgtagtagcagtgatgggagcacagcatgaagaacttgtgggaagctggttctctgtccactgggtgggtcccagggagtcaagcgcaggccaccaggcttggcagaccttgtccactgagccgtctcacctgctcaaaagacctttttagtgtaaaacttttttgctttgctttttacttaataggcaatttcatgtttcaaaagtcttaaaaaaggctatcagttttgttttttgttttccaaatagggtttctcagtgtagccctggctgtcttggaaaatgctctgcagactaggctggcctctgccccctgggtgctggaactgaaagcgtgagccaccactgctcagcaatacgtcttttatccttagcacattgagtgcctcttccaagagtagccagtgcaccagctttctaggtgtctgccagagcaaccccttttccacgttagtctctgctcatggacatatgtttttattagattcttatgtatgtatacaaactttatacgcagtgttctatgtgctgtatttttgtattgttccccttgatactacatgtatacattttaaagttatcctggcataaaagagaaagggcaaaaaggcagttaagtctacttatgtattgtaaaaataacctgttaaggtaatgaatgcctcaggcctttaatctccgcattgagggagcagaggcagggcagacctcttgagtttgaggccgcttaatctatagattgaattccaggacagccagggatagtgatacttagtctcgaaaaacaaaacaaaacaaacctgttgagaagatcccctaaattttttcatcagtttaactcattctctcaaactatataaatagcggttgagtggcagataaccttagtaaccaggtgtatctccactgtatctctactgtatctccactcctcagctgtaacttagtgagtttgtccagagggtgatagctatcaccttccagcgtgtactaccccatgttcaaacggcatggttttgaggttcctttgcagtgagtccaggaagggcagatgtgctgcctctgtgtatgggaatgttagaggaaataccatgggtttttttttggggggggggttgttttgttttgctttgctttgttttcttttttgttgctgtttttgttttttaattattttggggggcggggttagtggttgcctaatactttgctttttgcttctgagtttactctcattttgctgccttatggaaatctaatcctgagggtagtaacacatttgtgtttggcatatctgcgtgctgcagaggatttggttaaagaaacctaattgggaggaaacatcattttggttagtttgcaaaggactaagattctttttacttcctagaaccagtgtgtctcactcttttgagaggtgacatttcattttagtatggagcactgtttaaggcacttagatcatcaggctttggggtgctacttgctgagtcagaatctgtccaggtctggcctgacatgtgtgctttgacaaggtcccctgcaggagaatctgcttaagatccaccagtttaagtaggtaacccttggtacctggactggactgagatattagtggctcacattctaaaaagaattaacatttgtgtttcttttgtagcattaacagtggtagcgtcttcagggttcgcttcttccaaaccacggctgtgtgcagttaagtacctgatttcttgtgaatggacttttactgggaagagaaacaactgagtgagattattaaagacagaatgagcacttgtggttttcctgttttgtttttccctagagaatgatgtgataacagtccaaaccccagcgtttgcagagtctgtcacagagggagatgtcaggtgggagaaaggtgagctttaagttaaaaactaaggtctcttcatgaagcacagcaagtgggaactggctccaccttttcctcacatacgcatctacttcctgcccagtcttgtaggaaagtggtcttttcacacagtgggttaacaggggccctgaggctcccagccaacaggtgtcctttgtctttcagctgttggagatgcggttgcagaagatgaagtggtgtgtgagattgagacagacaaggtgggttcatcctaaggatttattacagattacttttgattattcagtcgtatgtagtatgtacactagtaacttgaatcagtagctactttgtttgctttgtggttcctgggctgctttcagtcttcttccttgtatcacttggaaacatagtaactaaagcatgttttaatgtttctaagaaaagacagaaggtgaatcctcaagatagcaatcacttgtctttttctgactgaaaacatggccttaggtatttctgtgtgcagaggagatgtaatatccaggtgtaacagtgttgtaactctttctactcatcctgcttgactaatgcaatactatacaaatgccgataggatacaaatgccggactctgtctccatttctttcctttccagacttctgtgcaggttccgtcgccagcaaatggcatcattgaagctcttttggtacccgatgggggcaaagttgaaggaggaactcctctgttcacactcaggaaaactggtggtaaagaagttctttttcctggtggttaaggtctccagtgtttcctggtgggattgaggctgagcatactgtcctagcaactcccctgcctctgactggcattctagttacacctttagttgaagggtagaagaaatcctgttgatggatggtgaactttcattgtcaagttctaagccaacagggtaattttaaaaacccacaatactctgttctttccatatttctcagattggatctttttcttaaagaactaacagggggttggggatttagctcagtggtagaaagcttgcctagcaagcacaaggccctgggtttggtcctcggctccaagggggtaggggtggaggtgacagggatggggggacggggatggacggacagacggtcagactagcagaagtcaggtatctgaagagagtagtttccctgcactgacctggatcacatggagctttaaaaaagatacaaatgaaaaggcttccagctcctgagatttctgatttaccaccttgctataatagttggattgttgttagttttgtagcattctcctaagtgattctgacatatagtcaggcctgagagccactgtgttgacaattgagtgtagtttccttttttctttacaattacatttgtgtgtgtgtgtgtgtgtgtgtgtgtgtgtgtgtgtatctgtgtggggagtgtacacacaaaggcacgagtgtggaggtcggtgggtaacttgagagtcagttttcccttcctgtcacatgggccctagcgctcgaactcaggttgtcagacttggtcctgtgtgtctccaccactgaatcacctcctttccgtgtagtttcttctcacatttttctcaggaaaaattggcatttctctttggaagaaatgccaaagaaagatgcctgtactggaccttatagtcaatattggggttagaaaatctgtttttctgacttgtaagtaaagatttttgtagttagagtatttaactgttaagatagtcaagcagaaagatggtagattagaccattaaagttggtcagggcaagatcaagttcaaagtaaagggaaaaaaatctgaagtagctaggatgaatacacctgtcagtattcatgctgggacccctgagacatctttccaggcgccaaaataacattttaatcaaatgctcatttaagattaaagagttcagaggctggagagatggctcagtggttcagagtagatactgttctttcagaggacccaagttcacttcccagtgcctacatggcagctcacagttgtctaagactcccgctccacgggttccaatgagcctttataggcatctccattcacgtgcacatatacacagttaataatgataaaataattctttaatttgatttatttatttaaaataaatgttctttttttttaacattcttttaagaattattttatgtatatgagtccactgtcactgtcttcagacacaccaaaagcgggcattggatcctattacagatggctgtgaaccactgttatagttgctggaatttgaactcaggacctctagaagaacagtcagtgctcttaaccactgagctatatcccccacccccattcctttttaaaaaatttttaatggttaagagtattccttttgcctggtggtggcagtgcacacctttgtggatctttgtgagtttgaggccagcctggtctacagagagttccaggggagggttacacagagaaacgtcttgaaaaacaagagagccgggcatggtggcgcacgcctttaatcccagcactcgggaggcagaggcaggcgaatttctgagttcgaggccagcctggtctacagagtgagttccaggacagccagggctacacagagaaaccctttgttagctgtcttgaaaaacaaaaacaaaaaaaccaaccaaacaaacaaaaaaacccaaaaaacccaaaaacaaaagagaaagagtatttcttgtacatgttaactctaaaatagaagattgttagcagcgtgtcacatttatgtgtgcatttaaacattttcatttgctttgttgtttttgcttaaaacagtggttctgctggtcaccaacccctttggaggttgagtgactctttcacaagggtcacccaaaaacctacgcatatcagatatttgtattatgattcatgatagtatgaaaattacagttatgaagtagcaatgaagtggctgtggggggagggtttactaccacataaggaactgtattaaagggtcacagcattagaaaggctgagaatcattggcttaagttttatttccttgggcttagtatgtgctttgaaagtatttgctgaatttgaaagtctgtagatgttagttaatatttgtgaaatcaggaaggcatctgaatcgagccagcaggacgtttagggagacctgagactagagagtagtggctcgtgtcactgtgtatcacttgatgctttgcctatagcaaggacctaggagacatttgtttgaggctggaaatagacctttctctctgaatcctctttagtagctgtggttaattgccttccatggagtggtgccaatggcattctctctctctctctctctctctctctctctgtgcagctgctcctgctaaggccaaaccagctgaaactcctgctccagcccacaaagcagagcccgcagcaccggcggcccctcctccccccgcagcacctgtgctcactcagatgccaccagtgccctcaccctcacagcctccttctagcaaaccaggtaagaccctgtaacagaatacttcacggagagctacttagatttattttagcttgttttgaggatgaagagtcctttatgtcagggaaggtgtggtttcagtgcacggcagatggtcacgtggccattgcagccaagaaagtttgtctgctgctccattcactttgttagctaaacgctactcacttccagaccccagcccacattacagtgctgcctgtattcacagtaagtctctccactctgagagcaagaattcagtttctctggaaaaactgttatagacatggccaggcttttatcttcccagtggttctaagtcctgtcaaattgacagtcaagattaatccttacagtctctgactcccagggagaagggacttcgtgtccctcacagttacagtctgatgccatggctctgaatacaccaagtttgctgaagaactgggtttgcaaaccagccttctatttatttgctaaccatatgacactagtttaattacttctatgactagattgttcatctgcgagtttggaatgatgctgataaactttagtatcttgagggtaaagggttaatacggtgcagaaagtattgctgtccgtgtccgatgtagctgtgcactctcttcattttcagtgtctgcaataaaacccactgctgcccctccactggctgaggcaggagctgctaaaggtctgcgttcagaacatcgggtaagcctccgacaacttccagggaagtggcagagagtcgctgtggagagtaatggagtgtggtcaccgttagaaagggctggcacctctttgccttggccttgagaagggggagaaagttacttgttcatggtctcgtgactgtcagagggaataactagaactcagtgtctcccgaatgttggggtttctactgtattgtgctgttggtgaaatgcttccactgagtaaaatgtctgcagagaatagacgcacagcccctctccccacagtgacacgcatgtcacagcggtagtcacagcagtagtctgctgagcgctctctctctctatacttccgggatatttcgccgcagctggggagccagtggggccagattgttgcactgtagcagtactctgtcagaggagacagaaccctcaaggaagtatggtcaagagtgtgggttctttgcctgagaatgcttcctaaaaataccatagcttcaaaagcttgctttagagtttccgttccccaagtagttattctcacgccagtctttatcaagagaagtcgccctttctgaaatgactcttaagctggctggatctacaccacagtcttccttttgtaaattggttttggtttttaaatcacactatttcctgagcttctgttcttggtcaaatttcaggtatagctgagtgaaaaccttggtctctgagtctgtgtttttgctggggctactccagaaagggaaagcctctagctttaactgtagtgattgagcccagcactgtggcacatgccatgaatcccagtactttaggaggtagaggcgggagggtctctggtgcttgtcatccatcgctgacaggctgagtcctctcactgactagggatggtctcatggtcaactcgttccacttccctttcaggagaaaatgaacaggatgcggcagcgcatcgcccagcgtctgaaggaagcccagaacacgtgtgcaatgctgacgactttcaatgaggttgacatgaggtgggatctctagtccctctagtccccacatctgtgtttctagaagtagaacgcgggaacttgctgtagcccttatcagtgctgcttccaaaactagcttgacctgggagaggtatttatttctctgcttagctccttgctgacttatacagcatgacccactggcttaatttgctagtttacttctctaatactatggaatgaattagaaagcgtgtaagaaaatagtgagctttactgcaatgtaaaaagcttagttttttggactttcatgcctgaactattatggtctctgataaattatcctagggtaatcatttttgtttaggcttttatatttacttttacttatgtatatgtgtgaatttggagcaggggtgccaacagagggcagaagagggatcccttagaactggagttacaggtcttgggggctcactgacatgagtacaagcccacatttgggttctcataactgctccagtccctgtttggtttttgagacagggtctcaaatatatagtcctagctggcctagaactcactatgtagaccagactggccttgaactcacagagatttgcctgcttgtgcctcccaagtactagggttaaaagtgtgtgccattatgcccaagctggttggttggttggtgggtgggttttgagacagtgtctcatgttgcctgagctgggcttgaactctctgtagctgaggatgatggtgatggtgctgccatgtcctgctgctagtaatggcccacttcttgctaccccttggaatgggaacccttcacaatgtgcctaaaaggacaccacactctccttctttctgacagtgattgtttcttgtatagttcccaagcaactcagaatctagcaggcaaaaggacagaaacctgccacctcttactctaccctgtttggattatggaattggaactaaattaagttcctctgtgtgtgtgtgtgtgtgtctgtctgtgtctgtgcaagcaagcacatacatatgtacgtgtgggagtgtgtaggtgtgcatacatgcatataaaagccaaagatcaatttcagttgttgttcctgggagtcatccaccttgtttattaaggcaggtttctactggcctcgagtttgttaataggccaagctgactagccagtgagccccagggatctgcgcgtctcctacgtctataactctgagatttcatgtgtgccaccaaacccaggatggtttgtttgcttggttggttttatatggattttggagttcaaactcaggtcttcatgcttacctgggaacgaggatgtcttccctagccctaacagttaaactctaaaatgtaaaaacccccagttcactatacccattcctgtaatggcctaatggttgatttccttgtttttttcaagattttgatatatctaagtatcagcattttgggaaagagaaaatagttttatttaacaagtattttaagtgtttatcatatgcagattactaaagtgaaatttaaggagttatggagatgagtgtaaaagctctttggatcttgccgggcgtggtggcgcatgcctttaatcccagcactcgggaggcagaggcaggcggatttctgagtttgaggccagcctggtctacaaagtgagttccaggacagccagggctacacagagaaaccctgtctcgaaaaaaacaaacaagcaaaaaagctctttggatcttgctatctcattttggtgaacactaaataaaatctagaagaaaaaaaagcatcaaaaagataaaaatgagtatgaagtggagaagggagtgttgtttgctttcggagtttgaatgacaagcatgtaagccagggagagtgtgtcatctgtcatcctggtacttgagaggtggaggcaacaggaccaacaattcagggttcaccttagctgcataaagttcagaatgagagcctgtctcaatttaaaacaaaacaacatgaaaatgctaagtagtgttacatagaaactcattccaaatggttttagcagtttggatcatggcactgtcaagaaaatgcaagaaacagaaaagatctgggttggttttgtttttgtttttgtttttgtttttttttgccaacagttcacataggatatgaatggtgaaggttggatctgtatttgaatatcagtgtaagaatgaattaagtcaaagatgacgtctctaaggtacccatctccctttgctttgagtattaagtctttccctctgcttctcagtgaggaagtttgtttattggaaatgtatgtagggatctggttaattttattgggaagcccataatgtagggaaggacttttcctagtgaatcacaaagactgcagccgtgtttcctgcattagcggcaaagtgtacacaaattaaattggactttgaaattttacccatttcttaagacgaagcatgtaaatatttatatctctaaaagatgcagttggcccaacatccttgattgcaaatctgtgtaatagctggatcttctttcagtagccaatctagtgtcacttagcagtggcctgagacttcccgggagccggtaatgtggtttagatcgagtgccctttgggtcttatgcctatcagcgaacccagaggagtctttctgagacttgccccttcctccactggctcagcgttgcctccaagggctaagctctgaaatagaaactccttaatgaccagaaaatggcatctaggcaggtctgagaacagagacacccaccacgcctctttctgcagtaatgcctttagggtggtaattctagcactaaatgaggttagactcaggaaaataaacattttaaacccaatcaatcccctcaggaaaatttccttttttcaaaaacaaaaggtctgaagtgggcagttaaagggtaccacatcttatctttcctgctaatgttgaattaagccattatagggggaaagggagacgtgagcatttgggcctgagataaagttcaactcaattttcatcatggaatggtattcctataatcatagaccttcctgtgggaaaacaatgggagagacgtttctcactaactctgcaatgcatatgtgtatgtgggggtggggtggggtggggtgggggctagcttgatagaccagaggatgttcaagttgcagagtcttctcagaggcaagcccagcgctgaatctgaaagacaggccacagcccacacggagccgctttctaaataccaaggaaaccacagtcggtgaaactaatcttaagggcagacactgttgtgttgttgtatcttggtgcccagcccagtccccctcccccacacataatgggcattagtaactgtttcatgagcaagtagaaagaactgctaactcagaggaaagagtgagtctgctgactttgcataagccgggaagaatattggacttagctcctgcgtataattagtaccgtttggaatggtagtattcattgtgatctttagattatctgtcactgaaatctgtgactcatagaactaaaaggatctccttaaaagggctcaaccatcttaagggacaggatggcgctgattcttctaggctggtattttgtgatagagtactttattacattgactactagagaatgtttcaaagcttgaacttagatgcttcaggccaagggaaagcccatccatttgtatacatgggtgaaaacttgtgaaagtccaaactagggctttagctgttctggtgggtagtacaggcctgccatcccagctcgttgggagattgaagcagaggaagtgcaagtttaaggctagatcatgcaatttcagtacacctagtctctagactttaaaagggtgggatgcatcagtagcccccagccccttagcactggctcagctttaactgtatcctcagccaatcagatgttgaagaccatgggggtcctcttgtttaatttgtccttgtgtatctattaaaccttgatcagggtttctagaatggctgcagtagattttgaaaacagacttaccgttattgatttggggttccccagagatccagttcacagttgttggactctaatacaactgaccattgaaaagcgaacaacggcttattgttttgtaaccgtgtcaggtgagccctgacatttcaattgaaacatgaattgtcattataactcaatgcaaattcaacagttgttgaattattttaacaaataacagttggagttaaattattttaacaaaaaatttatttaatgaaaaaaaaaagggtaggatgcaggggtgggttggggagcacggctcaggagtaaagccgttgccagcgtttctcagaggtcctcgacacttagcctgtggcagtatgtgcatgtatatacacaccagagcttcaccaacagtttctttgcatcatgtatttacagtaacatacaagagatgagagctcggcacaaggatgctttcctgaaaaaacataacctcaaattaggcttcatgtcagcatttgtgaaggcctcggcgttcgccttgcaggagcagcctgttgtaaatgcaggtaagtttcctgaggccagtgtggaaaagactacagacctgctgccacatttaggggtcaccaaagctttttattcacagtctatggaaacatgatcaccttcaccaaatactaaaagtaatggtaacatgattactttctctgtaccaagtatgcagaattggcacttactctggcagtaggcagctctgggatagcttggcttcccaagctgtcttgtcatgggcgatctcaagctctggctgctcctcacccccacgcaccctttacttggaggcttgactttcatgtttggcataggctccaggttgacctctgacctggggttggggcctcattacgaaggcttgggcttcgtactcattgtctttcctcttctcagcgctgaagtgttgatctagcttgcatttcttgttttgtgttgtgttgaggcacttctgtgttccttagaagataggagaggggacagtgacactttgcagtcctcagcctaaaatccttagtctgttccccattgagtgctgtgcattaggcacacaggagggctttctttgctcttggcatctctcagagttctcgttcacttgacatgtactctaacaatccattgtagactctggaagattcccaagcctgcttttcttttcttttctttttttttcctctcctcccctnnnnnnnnnnnnnnnnnnnncagacacaccaggaaatggcatcagatcccattagagatggttgtgagccaccatgtggttgctgggaattgaacttaggacttctggaagagcagtcggtgctcttaaccactgagccatctctttagcccccaagcctgcgtttcttgtaggtaggtacagttttcagtaattggttttatattttaagatgacgtatttgaaagccaggcctcctccaccctcctctgccttttccagggcacttgctatctagccattctctgctcagggaaggcttgcatagataggccactagtgtgcttctactgaggttacctcctgtgagctctgggagaacatgctccatcgttcaggttgattcagacgcttgggaaacactgatatgagttgggatgggagccagaggagtgttcgttacttgtaatgtagttattttcatgtcgattagtcagcccacactgcattggccactgaagactttcactctgttaactccttatccttggccaagaggttgtatgtaacatccgttttctctttcatagtgattgatgatgcaaccaaggaagtggtgtatagagattatattgacatcagtgttgcagttgctaccccgagggtacgttgggcaagacttggaagtgcttacttagatcctgtcttggtcatttctatttctgtgctaagacgctaggaccagggcaacttacagaagaaagaggattgggtgggcttcggtttcagagggttaagagaaattacaattacattcatgttacagaaagtggtagcaggcatggtacatgagagctcacatgttgagacagtcacaaagtagagagaactaactaactgggaatagcatggcttctttagaacttaaagcctgcccacagcgacacacctcctcccaaaaggaggccacacctcctaatcttcccaaacacttccaccaacttcagagcagtgtatgatcctgtggaggccgttctcagaccaccacagagctcacctggaagggcttatttctgtagctccggattgctaggagactgttagtaaaagtgcatttttcttttttttaaactataccccgttcctttatcttagtgtaagtctttttaatcacagtgagtttaaggtgttctggttggggaaattgtaactataaagaggactgttatttgcaacttaaaataactttccactccagggtctcgtggttcctgtcatcaggaatgtggaaactatgaactatgcagatattgaacggaccattaatgaactaggagagaaggtacagtagacggaagtgtgtgcacggcctgctgggcagttgggggatcagagcctgcagaggctgcgctgctcaggcctctggagtctggctctctggggacagcataacctcctaggaaggcagcagctgtgttctaaggagaggcatgtggcaggcagagcctgcatgctccagtgactgagatctctaagtcagaatcttctgtagagtcagggtttctctgaaggcggtcacagtcacctgagctgagccactgtcctgtttgcacctgggctctcagataagagttttctagattcactgttttggatcagagaagcctggtttgacttaatgtttgttgttcttaggcccggaagaatgaacttgccattgaagatatggatggtggtaccttcaccatcagcaacggaggagtttttggctcactttttggaacacccattatcaacccccctcaatctgccatcctgggcatgcacgccatctttgacaggcctgtggctgtgggaggcaaggtaggaaccattgtttctgagatttttaatcgctgaatggctggctgtaagagagaaagctaaccaaatccttactataaagcatccactgtaattttaattactaagtgacagttaagacactggttctcaaactgtgatctggggctattgacatcatctgggaacttgtcaaaaatgcaagtgctggaccggcgagacgaatcagcagttaagagcacttgctgctagcaaagtagctagattcagttctcagcatccacgtagtggcttgccgccatcagtaattccggttctgaggtatcgggcaccatcctctgtcctccttggctgctaggcacgcatacatgtaggcgagatgctcatacacagtaaatactaatttatttttaagtaaatgcttagactccccctcccccactcccttcccctcacacacttagtctactgaagcagagatgctcagctctgatgcatgctgacgtttgcactggcacttgttgccgccttgtcagagcctcagggagtcagaaaacggcacagtgcacagcagtctgtgggctacagaattatgtgagaaagcttacaagtttctttgagtgttcaaggtatgagggaggcccaagagcttgagttagctattggaagataagttagtttaaaaaaataaagttttctgagacttctgtgtctagaatatatctgggtcattgactcctttataagtcaaaaaactataggtctttttcttggaaaacagttaacacacttagctttgcacataacagacttatttttttagttcatggatttttaagacagggtttctctgtgtagcttatttgtcccagaattatctatgtaaacaaggctggccttgaactcagatctgcttgcctctaccttgggcaagttaggtgcttgctaagcatacacaaggcctggtgttggatctgctcattgcaaaaaaaaaaaaaaaaaaaaaaaaaatagtaatgacaaagattgaacttgaaagtagctcctacaggcagccacaactgcagaacaaacctctgtgctcattgcaaataaataaataaataaataaataaataaataaataaatagtaatgacaaagattgaacttgaaagtagctcctacaggcagccacaactgcagaacaaacctctgtgctcattgcaaataaataaataaataaataaataaataaataaataaatagtaatgacaaagattgaacttgaaagtagctcctacaggcagccacaactgcagaacaaacctctgtgggtaacagtagctgtagagcacagtgtagcttacttgtgtcaaggcggttttgagtggcctgtttccttgtttaaactttggttctaaatctcagagctttgctcaaaagaaaataaacctaagttatccagaggcagcagtgggaggaaaggttttgcaactagaaccattgggtgggctttgctttctcacatttccctcagcagggctttgtctctgatctgctggatacagatctgttgacctctcctctctgcaggtggaagttcgacctatgatgtatgtagccctgacctatgaccaccggctgattgatggcagagaggctgtgactttcctccgaaaaatcaaggcagcagtagaagatccaagagtcctcctcctagacctttaggaggaagccacacatcctacctatcgatcatgcaggaactgaaaaccactcttctccctgtaccctcatcaatcccaggttagcctgatgacaggcaggcacatactattggcctcaagcacggaagccagggcacgatgtaaccagcgttcacaagtctgttcttagtgttccctcgaggctctttctctctccctgagactcttatcttctgctatcttggacctgagagagagtgagagccttaatggatgctcattaatgttcctgcctttattccagtcctctacaaaggcaattttgcttttctccagtaacagtatgctatagggataccaccagggaccatgtgatttgagtttctatcttaggaaagtgttctccagagatgcctaggggatgctttgcctccatcccagctgtgcacactctgacttgatgccacctgtgtggaggtattgaacacaggcaaagaggtgctgctttgcttcttaaatgcaccatcattctgacctgtcagtggcttcaaggtgctctacctcttccagaaagcacaggctggggtatttggggacaggcaggattgtgcagcatcccctgagcttacctgttatagtcacaggtgggagttgaaccctggcttgccctctctggctccattgtatgctggcactgggaagattcattttggcataattacgtacaactgtcgtcataccaaccctttccagcttctaggaatcgttctaggacactgttgtcacttaaagcagattttagcacatcatggcagtggggcagcctgacgaagggactgttctcacaagatcaggctgaagagagcttttaaattccaggtggtgtgagcatgttctgggaagaggctgtgctctccctccctgggatgtggcctgtggggagcaaggtcttgttgcctctggtgcagggcacagagacaggggagggtggactgcggtgggaaccagcctcaggagttaggacagcgacgagatgatggtgtcatctctaagatcaccctcaggtgcaggtacagttgttggaatattcttgaagcatggtaaaatgcttaagtggttttgagcgctcctaggcctcgtatcctgcactgagcctgagcctgctgacagttgccgtggccattagtgctgaatgcccttttttcttgtaatccaagacaagctggggggaggggaagaggtcagtattgagtgcctgcagcatctgctactacatctacaccattcagaacttgtaactaaaatatttaaagagactgattttgaatgaaaattaaagggcaaatgttctcaaacagggctccgggatctgtgctccttttgaccctcgaggctttacagcctccatcattgttggcaaccacaatgtcgttatcaccgaaagctactacttcctcctgagttggctatcttggtggagctactggtggacgcaggatctttgtatattcttatctctgagcagcataccaagcccccatcccatattttaggcatattgcttttaacagccagccaggagagcccactaatgtcttagtgccctgggttcctgtcagggggccccatgcccctgagaagccaattcttgagaaattgaggctcccacctatgtgaatccccttcaaaacaccaggggcagtttccctttgaagggcttgcatcatttctgagatagagtggggaggcacgaacactcctaataccatttggacttggttgccacatgtgcatcattataagcacatgtctggttatgaacggtgagggccatctcctaggagcaggagtgtgcgaggggcaatggacaggatagggttggtcaccaacccaggatgaccccaatggataggcatgatggagtagaggcttcaacagagccttactttcccacacacctctcatctgctgatcctgtctgcagggaggccctccctctggtgccctgtcccaggaagaagcagggtccttaagaattgctgctggtaggggaattcagtgaattatgtaccaggtctagtgtttggtatgttgcaagttttaaaaatttctactaaacttctggagtagctgttctgttttattgaaaggccgtccataaggcctctcagaatcgggacctcggtgttccaaactgatggctccacagagttccagatgtgcagtatgatggctggttaagccagaaagcgacctgcactccataaagcagtggccgaagatgtctggcactgtgggttaccacagaacctacacctgggagccagctctagaaggtcctacgttaacctctcaagatcgttttctcaggagaatcttccatgaggtagattagattatatgctcctcaggcacacctcaggtgtctgtctcttcgccttcctccctttttctgaggctgttcctcaggctgcttccttccaggccacttgcactatattaatgatgcaaagatgccacagaaagaataggctttattagagggtagacgagccccaggcacttggagccccagacacacgcgtgcacgcgcgcgcacacacacacacacacacacacacacacacacacacacacgaactggggattggtcaagtgaaatttgttgcatgtaccatgcatggcccagcaactgggttgtcttgaggcaagccctcagacctagggagggggctgtctttggacataccacttacttcagagaccagaaatacctttctgaaggcactgggtaaaattggtccatatgtatctcattctaaaagtcagtaggcggtgaattgaatagaagctcataccaaaatgcagagtggaaaacaacacctgagaagaactgactgctggtcctgtggagcgagctcttctgacacaggagagccagccagagaataaagcgctttattctgttttcaaactccgtcttaagtggtacaaccgcattcttatcccgctcttaaacacactggcttctctttgccttgattttattctccaaagtcagaaatcagaagttaggggtcaggagtggcgagtggctcacactgtgtcccacctctccccacttcaccctacagactttcctacagaccctcccagcacccggacctctgtaggaacggcatctggttgtagcagcccactggtagcatgactaaagtggatccaggacagtcctggtttgggtctactgagccagaggttcagtgtcctgagatgtctccagagatgccctacgtggtgtacagatggcagtgttcccagattcatcagtcggctcaatgggtgttgagcagtttggaactagagcaacagaaggcaccctttgagatgctaggtcccagctaaaggtccaagctgtgtggtcagcaggtatctgttggctggtgagcgtaggttgctcgacggggtgcacctctctgcccttgcagcagcttcaccagtctgaggcccaagcaggttgtgagcagaaaaagtggctgctgcgccacatgcttcccctgaagtccactgaggggaggggccagcccagctggtagacagtcaagagaactgggccagccacactgtccattccccgcctcctaccccattagccggctccactggatagtactgaaaaagggatgggacttgagtctgctggtgccaccacctccagctcctaggcgccgctggggctcaaactgcagcagctgtggggagagagtcaatcactgcagcccttccccatcctagagggagatatccccctcctggggctactatcaccaaagttcctagggtgttctttcctcgctaacccagtcagtaagcccctccccaggactttggaggtagcaagcacaggcattcaagggcatttatgcgttccagcacttgaattaacgtgtacaggcggttcctctcaccccccacccatataccaataagccaggggcagtgagaacctctcacctcagttagcagagaagctgctgggtgactaagccactcaggcagctggagttgggtgtgggcctggaatcctgaagggtggctctgggacagtgcctggagagtgggggacacaaagagagaccatcctggggaagcttaccccctagtggcagccaaaacttgcacacatgtgtcacagtccaagaggaagatcttgatagctgccttttgctaggatctactaatgacttggaccgagctacaccccaaacattaaagaagctggctcagggaaaaggggacttgggttagcactggagttggaacctgcaactttttagaaccattgtctttatgcagtagacactattgggaactcttaagtctctagaagctacagatgcaatggcaggcctgccatgcagccgttgaggccaaggcaggaatgtgatgaccagtggtagtatattgagataggatgagctagctgcaagaagagagacaggtgagccttgtggggcttagggttcttttttttatcttaatgaagggttctcagagaccctgagttatgaccaacaaaggcacatcaagtctggcctttaggtcactcacactgtcgtcttctggtgccactcaaactgttgcctgctcaaatgtagtttgtcttctcccttgcttcccaatcagactggtcccacatgtcattctgagctcatctgagtggagtacagaggctaaaacctggccaagtgggtggtgtgtatatgtatatgtgtgtgtatgtatgtgtatatgtatatatgtgtatgtatgtgtgtatgtttgcgtgtatgtgtgtgtatgtgtatatgtgtgtatatgtatgtgtaatgtatatatgtgtatgtatgtatgtgtgtatgtgtgtgtatgtgtatatgtgtgtgtgtatgcatgtgtgtatgtatgtgtgtatatgtgtatgtatatatgtgtgtgtatgtgtgtgtatgtatgtatgtatatgtgtatatgtgtgtatgtatgtatgtgtatgtgtgtgtgtgtgtgtatgtgtatgtatgtgtgtgtttgtgtagggtcactgaacctgactggttgaccaggaagctctgggaatgctgctgtctctcccagaccccgtattagttacagaccccgtattagtcatcacacttgacttttgcgtggttgctggggatcagactcgagttttcatgcttgagcagcaggcactttaccaactgagcccctgcccagcccgcaagtgtgcttggccgacccagctgagaaggcaatggctgacttgtatggaggagccttctcccatctccatctagggacaatagcctttaagggtaagggggactggatagtaggaaaaagatttaggttataatccagagaccttccagggaagggttgctgcttctccagacctcaggccagacatgctcgtccataagcctctggtcatgccaactcacatagttcatagaagccggcaaggctccttagccactggccctcctgcggtaggagttctattgccagtggtctgatggatggaaggacatccagcccaatggtcaggcacggagaaccaggcagcctctgttttgaccctggctaagcctctgctcagcctaaacccaatggtccccaccagggttctatacactccctgcccagctactcaccattcctgtgagcagttcatacaggagtgagccatagctccaccagtcacaggcttcagtcagctcagaaatgcccccaacctctgcgagaacgagaacacacacatgcccacctcacaggagggccctttctgttctcattctagcacccactgcccatcccgtctttaacccgtgcaaaggcagccaagatctagacgcctctcccaactcccttcttgcctggagcactgtacagacagtccacggcctcctggctgcatcgcggctccacttctgaccactggccaaaatacgtgagttggatgtgaccttcttgtccagtgtgcagggaggaacggtgggacaaaggttgaaactagcatcaccgagcatcgggaatctccaggcagtccaaggcttcccccaatacaatcatgtcaggggccaaaggtcatcccaggtggaatctccctaagggtgtggccccttgctgcccagggcccaggggtgttcctgaagctgccctggaccccaggttcatgccttctctaaaggaacagatgaaggaaggggagggggaggaacagctttataatcttggggcttctgttgactctgggctcccatgtgcagtggggttggagaagggaggctgaggctcttacctgcctggtccaggagcaggttctgtgggttgaggtcccggcacagcaccccctgctgatgcagcgcctctaatgccagcagcatctcagctgcccactgcttcacctgtccctccctcaggctccaggcagctcttccgctccccaggctggccctgtttgctgatggggggttccgacccctgcctcggccataggctcctagcacccggtcagccccttctcgtacccagtggagcctctgcgtgggtgctgggttcgaactctggccagctcgcctaacttgactgtgcgagtggccacacggggcctctgtggggtctgaagagaagacagcactgggcctggatgaaggctcagcatcggcctctttctgaagctggagggctgggggtaggctctgggaagtccgtggaggctccattgggattctgttctgcctcagggtatggcctggtgtgagctccgctggggtcatgaggctgaggcgggtgctgagttgggcttgcgacttctcctgaaccgagccagagttaagcccagagtattgaaaatggtcctgggagagtagatgtgaccaaagggtgcctcctgggccaaagagggaatgagagcgtaggaagaaagaagagctcggacataggcccaggccccatcctgctttccctccatttcatcccgccccctctgcctcctcagagatctgatcaccctgctctgacccacctccagggaactcagcttcacagcctgcacactcgattgttggtgaacttaaactgagtgtgtttgaacaccagtgttcaacacgttacacttcctcttcacaaaaggtaaaggccacgcatggatttacagtggccgcatcacgacccaaggatgtgcctcacattttagaatcactaagtatctgctgcgcggctcagttcccgtctttacagttttagtcaccagccgcgccatgtggccattcaggaatgggcactgaccaggaaagccaagactagaggaaatggtaacaaagacagctgaataaatgtcccccttcacctgcctagctagggtgggaacatccttccggggatgccccctgctccctcggcaccatacagagctccacagcagctcggccccgccctcaaccttcagaaactctaggctcccagtctgtaccccacgtgtgacgcaagccatagtcctcctcagagctcagagttggggagaacagtgagaccccaaagctcagaggaactgatgggccctcaccttgcacatgctccaggtgcaggaagatggagtcctcgctcacgaagtatcgcaacaattttgtcatgtaggggacgccatgtgggatgatcgtcagccgctcccggctcaccatgtgacacctggggaggctctggagaggggacagggtatgtaaatgagctgataccgcccaatgctctggcttcagggcaccggaagatgaactgggagccaggctgagtagcatctgcttccaccagttcctggtccagccctcacccctgtaatcccatggaatccacatccaaggatgggatacagtgtgtgcatgtcagtcgtggagccttgggcaacgctcggaggaattggcagagttggtctttggaggaagcatggacttcatacgcacattccgggggtggggtgggggtgggcaggggtctcaagagctctgagaaagttccaaaagaaacgctgcacgccagcagccgggcagcacctgccttcacgatgaaggttcctccagttgccgggtcctgaaccacctgcacctgccaaagtccaggaggcaccggtcaagctgtgttagttcccgggcgttccatggcccgaggccctgactattcccaaacatctaagccctggtgcctcttcctccagcatctgcaactcctacctatgtctcgtgctctctgggctcccgctctgtgggtctaccccacaggtctgtgtagtgcgagggaggatggaatggatactccacctaggctggcaagaggtctaagtacccgctgttgggtttgccataactctcatgagaacatctccccgccccccaacctgcctacactagctagaccctgtgtggcctagaaggacaaccaaaatcaacacttcaactgcaggctttcgccagaggtcatcatcccagcagggattgaaggtggcactgagtcagtcaattcttttgtgcacaaatgaagctaggtgtgcatgcctttaatcccagcagtgattgagagaggcagaggcaggcggaccttgttgagttcaaggccagccaagtgcacagtgagcccttttctcaaaacagaacaaaacaaaacaaaaaccagaaaaacaaaacccccaaatgcgttaagagcctgaggcgtctgagaatgtggttccagatcaggacggctgccttcagcaggctccacacactccaggaatttctcttctttgctacacttcttttgaaataaagtgggtgcagttgtgcacaccagtcacctgtcctttgacagtagccgtctccttctcggggtggcttcggtaagtggggagctgggtccacattgctagacagtggtgaaaaacaaagcctaggaatggagtagggggaagagccctgcagtcttttttaatggtactgggcctcctgctcaccaggctagagctctgttactgacttatatccccccagctcagggccctggttcccgagcttgggcaaataagctgacttttttaactaccaaagagggattagaaatgtccagctttgctatatcgctggtttgttaggctgtaaataggagagtccttaatgaagccatgatgatattacatgcttgccaagtcacgcaccttctctgaaccttgtgcttgtttctgagttgtgcttgcgtgcgtgcgtgcgtgcgtgcgtgtgtgtgtgtgtgcatgtgtgtgtgcgcgcgcatgggtgtgcgtgcatgcgtgtgtgtgtgcgtgtgcacgcacgcatgggtgtgcatgtgtgcgcgcgcgtgtgtgtgtgcatgtgtgtgtgcacgcgcgcatgggtgtgcgtgcgtgcgtgtgtgtgtgtgtgcgcatgcatgggtgtgcatgtgtgtgcgcgcgcgcgtgtgtgtgtgtgtgtgcatgtgtgtgtgcacgcgcgcatgggtgtgcgtgcgtgcgtgcgtgcttgcgtgcgtgtgtgtagagaccaggcttgaggatgctggtgtcttcttcctaagccactctccatcttactttttgaggcagtctctcgctgaacttggaactcacctctctggctaggttggctggccaacaagctcctgcctaccgcctcaggattggagttacagacatgcaccctactatgtctagctttgtacgtagttgctgggaatcaaactcaggtcttcatgtttgcatgggaagttctttgccaactgagccttttccctaagctgcctaaaaatgggggtctcagcagttcgtgctttctgacgtcattgtgcttgttggtaaaagcaaagactccaagtgtcaaatcctcctcagccctggtaattaccaatgtcattgtagcagaaacagacactgctcattcagtgctaagggcttcgaacggctcacttcaccgtgttctcctaccagctttcctggtgaaattgaggttctgaaacgtgaaaccactcactttcaagcctactgctaaaaggctgtagcatcagaatttgaatacagacagtctgaccgtagagaggggtgaaagtgcctgccaggctgggccttattttctccataatcaggaaagcaaaagcaggggctaggctcgccccacccctccttcctataccagggcacctacaccagagcagcagtatcccttttgaccacaagaggtcgccctctaatggctaactcacctaactcagggtggccttggctccctgaccaaacttgtgcaatgtttgaagacagaggcagaaaacactgggttcatttaggaaaagattcccataagtattgccccccagttagttccccaccatccttccccaagtggtattccccgctaccacctccttggccaagtcctctgatttacagtctgaaaactcagtcaaggatcggagccagaaattaagtaaggacccatggtgtcaaaaacctgtgtattcaaaacatactctgccctactttcttttggaaggaattagaccaaaacattaacaacgactactctgaagttaggtggggcagtgaattgatttcttttcctttttcctttttggttatacactctccactctcacagaatacttccagcagagcgaacattttcccattgatacaaccaagcaggcaagcacacacatcctctccctctgataagtggcccagaggacagaagagccaacacctgactccctggatcttagttgttctctctctctgatcattgttaaggggctggagatgtaggttgctcgggagagtgcttgcatagcacgcatgaaaccctgggtttgctcctcagcatcaactgggaacagtgatacgcacctgtcacctcagactcagggatgaaggcaagaaaatcaggagttcaaggtcattcttggctacgtggcaagtgtgaggtcatcctgggttacatgagatgctgtctaaaaagtgcgggcaattatgaaaacacagcactgccaagcacagctttccctgccttgtgcactggggaagccgtcgaccccagtggtggtggagcccatcaacggagacacagaaaactaggttttaattaatccacaaatgggagcacagccttataattgggaaggtggaaggcaattgtggccactgtttgtttgttttttaacattttattatttcatcagatcccattacagatggctatgagccaccacgtggttgctgggaattgaactcaggacctctggaagagcagtcagtgctcttaaccactgagcaatctctccagctctggattaggcctttgcctttttcctttttttttttttttacaatttatccctaacaaactttcttttcttttcttttctcttctcttctcttctcttctcttctcttctcttctcttctcttctcttctcttctttctctctctctctctctctctttctctctctctctctctttccagacagggtttctctgtgcagctctggctgtcctggaactcactttgtagaccaggctggcctcgaactcagaaatccacctgcctctgcctcccaagtgctgggattaaaggcatgtgccaccactgcccggctcctggtttccttttttaattaattaattataagtgcattgcctgcatgtatgcctgcaagccagaagagggcaccagatctcattacagatggctgtgagccactatgtggttgctgggaattgaactcaggacctctggaagagtagccaatgctcttaacctctgagccatctctctagcccctgattaggcctatttttaagtaggaaatctaaatcctgggtggaacctctcttgaagcaggcaagccccaaaacttcaaagatgtttgagtctctctattataagccctgactgacctagtagtcattatatagaccaggctggcctcgaactcacagagatctgcctgcttctgcctccagagtgctgggattaaaggtatctaccataccctgccagggtcaaacaggctcctaaaggcttagaggga

SEQ ID NO: 348 - DNA, 2063 bp, Mus musculus
cggttgctgccgggccctgtatccggtgtccgcccgccctccatcccgctgcctccgcgatgctgtcccggtcacgctgcgtgtcccgggcgttcagccgctcgctttctgccttccagaaggggaactgccctctagggagacgttccctgcctgagaatgatgtgataacagtccaaaccccagcgtttgcagagtctgtcacagagggagatgtcaggtgggagaaagctgttggagatgcggttgcagaagatgaagtggtgtgtgagattgagacagacaagacttctgtgcaggttccgtcgccagcaaatggcatcattgaagctcttttggtacccgatgggggcaaagttgaaggaggaactcctctgttcacactcaggaaaactggtgcacctgtgctcactcagatgccaccagtgccctcaccctcacagcctccttctagcaaaccagtgtctgcaataaaacccactgctgcccctccactggctgaggcaggagctgctaaaggtctgcgttcagaacatcgggagaaaatgaacaggatgcggcagcgcatcgcccagcgtctgaaggaagcccagaacacgtgtgcaatgctgacgactttcaatgaggttgacatgagtaacatacaagagatgagagctcggcacaaggatgctttcctgaaaaaacataacctcaaattaggcttcatgtcagcatttgtgaaggcctcggcgttcgccttgcaggagcagcctgttgtaaatgcagtgattgatgatgcaaccaaggaagtggtgtatagagattatattgacatcagtgttgcagttgctaccccgaggggtctcgtggttcctgtcatcaggaatgtggaaactatgaactatgcagatattgaacggaccattaatgaactaggagagaaggcccggaagaatgaacttgccattgaagatatggatggtggtaccttcaccatcagcaacggaggagtttttggctcactttttggaacacccattatcaacccccctcaatctgccatcctgggcatgcacgccatctttgacaggcctgtggctgtgggaggcaaggtggaagttcgacctatgatgtatgtagccctgacctatgaccaccggctgattgatggcagagaggctgtgactttcctccgaaaaatcaaggcagcagtagaagatccaagagtcctcctcctagacctttaggaggaagccacacatcctacctatcgatcatgcaggaactgaaaaccactcttctccctgtaccctcatcaatcccagggctccgggatctgtgctccttttgaccctcgaggctttacagcctccatcattgttggcaaccacaatgtcgttatcaccgaaagctactacttcctcctgagttggctatcttggtggagctactggtggacgcaggatctttgtatattcttatctctgagcagcataccaagcccccatcccatattttaggcatattgcttttaacagccagccaggagagcccactaatgtcttagtgccctgggttcctgtcagggggccccatgcccctgagaagccaattcttgagaaattgaggctcccacctatgtgaatccccttcaaaacaccaggggcagtttccctttgaagggcttgcatcatttctgagatagagtggggaggcacgaacactcctaataccatttggacttggttgccacatgtgcatcattataagcacatgtctggttatgaacggtgagggccatctcctaggagcaggagtgtgcgaggggcaatggacaggatagggttggtcaccaacccaggatgaccccaatggataggcatgatggagtagaggcttcaacagagccttactttcccacacacctctcatctgctgatcctgtctgcagggaggccctccctctggtgccctgtcccaggaagaagcagggtccttaagaattgctgctggtaggggaattcagtgaattatgtaccaggtctagtgtttggtatgttgcaagttttaaaaatttctac

SEQ ID NO: 349 - protein, 406 aa, Mus musculus
VAAGPCIRCPPALHPAASAMLSRSRCVSRAFSRSLSAFQKGNCPLGRRSLPENDVITVQTPAFAESVTEGDVRWEKAVGDAVAEDEVVCEIETDKTSVQVPSPANGIIEALLVPDGGKVEGGTPLFTLRKTGAPVLTQMPPVPSPSQPPSSKPVSAIKPTAAPPLAEAGAAKGLRSEHREKMNRMRQRIAQRLKEAQNTCAMLTTFNEVDMSNIQEMRARHKDAFLKKHNLKLGFMSAFVKASAFALQEQPVVNAVIDDATKEVVYRDYIDISVAVATPRGLVVPVIRNVETMNYADIERTINELGEKARKNELAIEDMDGGTFTISNGGVFGSLFGTPIINPPQSAILGMHAIFDRPVAVGGKVEVRPMMYVTYDHRLIDGREAVTFLRKIKAAVEDPRVLLLDL

SEQ ID NO: 350 - DNA, 42024 bp, Homo sapiens
atatccctggagagctcccgaagctctgcccaagtgggacaaaggggaagggctgcctatgaggccagctgaggtgagactggcagctcacaggccatgtctccccttctgtgatgtgtacacatttagggaacagcaaacacctttgatgcgcttcagctgggtcacaagagaaccaatcaataaagcaaggtgggctatggagagtccttaggtaaaaggtacctcgtgaagcccaagagatgctaactcattctcatcactgtcattgaagctcaaatcagatttatacaagcagttttattgttatttccttgataaaattcctgcctggtttttgttgggaaaacatgtttttctttgcagtattttgttcattcatttcctagattcagttggattccaactggaccagccttgtgcttagtagatgaccacccaacgtgattggaaaggtatggaggaaaatgccttatcctgaaacagctgcttttaccttcatcaacactcattatgggatctaagggcccaccactggcatttcataataatgatgacttaatcacatctgtatatgaatacatttttgccttacccattgtactcctgaacagccgcccatccaaatacttgccagacagagctaacttttgctactgatgaagacttgttcagggtagcacatctcaaagtcacatagcgtttttatgcttttcaaaggcattttcatatacagccttgtcctgttttattctctatgatgagaggccccctgcactgtccccactctgctacaggtcggaggccacccatccatctctggtccagccctgaacaggctctcttcactgcactggctaatgacagaaatgaggagagggggtcagactgacaggcccaggccacacagccctgtccatccacagacacagacacaatggagtcagaagccctggtggtctgcatcaaccactgcatggctgtgaactatggaatgatctaccaggtattagacctggggggaatcgttagctattttttttttcttttgagatggagtctcgctgtgtcacccaggctggagtgcagtggcgatcttggctcactgcaacctccacctccttggttcaagtgattctcctgcctcagcctcccgagtagctgggactacaggcacgtgccaccatgcccagctaattttttgtatttttagtagaggcggggtttcaccatgttagccaggatggtctcaatctcctgatctcatgatctgcccgccttggcctcccaaaatgctggaattacagtcagtcgtgagccaccgcgcccagccctttgttagctcttatgtgaacttacacaaattaactctgccttttccccttcagtttctctggctgtaaaatggggttgataacagtcactctcttaggattgtggtgaggatcacatgtggtgggccttgcattctctggtgcgggaaataggcactccttaaactggtttcctttcctcctagggggggttcaggagcccccacagccatagaactccagagctggaaagggcttaggagcatctggtacagtggctggtctccagatttttatatttttagatgtcaaccattaataaaatgaagaggtcttctggccccggccaaggtgccagtcgcctcctgagatcctgtgccttcaaaccctgagagtccatatttttaaaaaaacaaaatgaaggaattaaggcttaaggaactagagagtcacctgcaataagtggatggattcgaaaaggccaagctacttctagaacagtatcccaccaagcttcacattgcagcatgtatgctgtatgcaatccatagcacttatgatgacattgaaagtgaagtttttgcagatctaggctgtagtggtggaatgcttagcatgggaactgcagtgtgaggagcagggttctgtgttggatttgacagagatgaagatgtattggaaatagttaataggaatgtggaagagtttgagttaacaaatattgacatggttcaatgtgatgtgtgcctgttatctaacaggatgtcaagtcatttgatacagtaattatgaatccgccttttgggaccaaaaataataaagggatagatatggcttttctaaagaccgctttggaaatggcaagaacagcagtatattctttacacaaatcctcagagaacatgttgaaaagaaagctgcagaatgggaaatcaagatagatatgatttcagagctttgggatgacctgccagcatcatacaagttttttttttttttttttttgatatggagtcttgctctattgccaggctggagtgcagtggcgtgatcttggctcactgcaacctctgcctcccgggttcaagcgattcttctcactcagcctcccaagtagctgggattacaggcgcccaccaccgagtccagctagtttttgtatttgtagtggagacagggtttcaccatcttggccaggctggtcttgaactcctgacctcgtaatccacccacctcggcctcccaaagtgctgggattacaggcgtgagccaccgcgcccggcctatacaaatttcctaaaaataaatcagtgggcattggagtggacctaactcagttttcattttaaaagcccccaaaacaaaagtagtttaaaacttatttaaaatgaataaaaattggtttactaaaaataaaaaatgaaacgaagaggaaagatattggaccagtttgagagttactgacattttattttgcaggtgaaggcacaaaaaataagtatacaaaagactactatctaccatcacttttatttcctctttaaaattttttcatctcccttcatgacacatgatttttatttcttaaagaatcttagctgggcggggtggctcacgcctgtcatcccagcgctttgggaggctgagatgggtagatcgcctgaggtcaggagtttgagaccatcctggccaacatggtgaaaacctgtctctactaaaaatacaaaaattagctgggcgtggtggtgcatgcctgtaatcccagctactcaggaggctgaggcagggagaattgcttgaacccgggaggtggaggttgcagtgagctgagacgtgccattgcactccagcctgggcaacagagcaagactccatctcaaaaaaaaataaaaaataaataaaataaaatcttaaccactttgtttttaaaagaataaaagggggaaatgcataatatgcaaataagtttagctttgcgaaaaactctttacattgtcttttctcatttttctaaaaaccaagggaaatgtcacaggctagcgttaggggtccgaggatcttcatgacatgcctttactttatggatgaggaaccaggagcccagagaggtaaggtgacatgcccaaggtcacacagcagctgcaatgcctccttgctctctaggaaaacacccctggacatcagagatcctttcatgtggctgtacaagcacttgggctgggagttaggaggtctgggcactactcccagtcattggccctaaagccgcatattctgcgtttcagcttttataaaatggagatgataatcatcccttcactgagaacttgggtgagaatctaatgaaagaagagcttcaaaagggctccagagatgcatacacagtattatggagtgaggaattagggagtgaaatgtctccatgtctataatttgcctgaaagtatttcagccaacaaaaataagcaaatacatatgaacaattgttaaatctaggtgatgagtataggggtgggtattgctatgctactctgtctacttctctgcatatttgacaattttcataatgttccataattttttaaaaagtactctggcaaggtaaatggaaaggatgatgttactcacagggaagaggtcctctgggaggtccttgtcttgggctctgtggccaggtggggccaaccactctagaagacggagcagcccactcttcaccagccctgggcagacagagccatggtcaggaagtgcttctggtttccctgcttcctctccaggcaggccgggtgcccgtggctgggtgaggggaggctctggccccttcttagcacaaggcactgtctgacagacccagtcttgctgcagccgctgactctggggacagtgggggctgcttagcgcagccaaccggcatggggggcttatgaatatgcaaattgaggccagctggttggctgcccccatgccatttctcaacgccaccccaactcaggtgcccagaaaagccagctcagagagggccttcctgaaatgccatctcttctgtctttgcctatggaccacagagccctttgaaaacttggggactgaatcacccagcttctctcattgctctggcctccagcgggaagctcctgacttctgctttcaaattccccagagaggcagctccaatatgaacatcctctccctgtccctcaagcatcctgagaagactggaatcagcccaacagcaaaccatggcatctcagatctgcaggaaggagaggctgcgtggtccctccctcccacagaggcctgaacactgctgaggaagctgctgctgggccaaaagcacccatccctgacagatctgggagaactcactggccaaacccacctactcccgaatgtaacccaaattttgccttcccctcctccttcagcttgagaagtggaggggatgttgtgaaatacagcaatgaaaattagtaaaccacagctcaactcatcaacgtggacaaatcctcaaaatacaatgttgactgaaagaagtaagtcacagaggctgggctcagtggctcacgcctgtcattccagcaccttgggaggctgaggcgggcagatcacttgagcccaggagttcaagaccaacctgggcaacatagagagatcgcatctgtaccaaaaataccaaaaaaaaaaaaaaaaagaaagaaaaaaaaatgtgcttttggtcctagctacttgggaggctgaggtgggaggatgaggattgcttgagtccaggaggcagaggttgcagtgagccgagattgcaccactgtactccagcctgggcgatagagtgagaccccattacaaaaaaaaaaaaaaaagggtgggcgcagtggctcacgcctgtaatcccagcactttgggaggccgaggtgggtggatcacaaggtcaggagattgagacctcctggctaacacggtgaaaccccgtctctactaaaaaacacaaaaaattagccgggcatggtggcaggtgcctgtagtcccagctacttgggaggctgaggcaggacactggcatgaacctgggaggcagagcttgcagtgagccgagatcacaccactgcactccagcctgggcaacagagcaagactccgtctcaaaaaaaaaaaaaaaaaaagaagtaagttacagaatgatacaggcactgtgattccatttctactaagttaaaaaatagaccaaaaaaaaatacccacacaaaaacatgtctagattttcattgtgtattcatcagtccattattttgaattacaactgaatgaagagatagacagatagatggaatctaggtatcataggtaacactgagtgaatatagggcatagtccctattttaaggagcccaaagatggaagcataggctatagccccatctactagctggccgataatattcataaactcataggcaaggatgtgaatgtatggttcagaacacacataagaaaaccgggggatttgaggtaaatgagctacttaatcctttctaaaaacacaccttttttcttatttaatttgaaagtaaatacatctttcattttcattttttatttttttctatatcagaccactgctggagacatctttttcttaatttaaaaacacaggcaaaaatgtgtatagaacataagcatattgaagctataatgaaaacaaggggatggttaatatataattcagtatagtagtggctaactgggtgtgatgatggaggagaccacagggaacttttccattccttcagctgggcagcaagtatgggaattccttttattatttttcttttaaactggacacatagatttttatatcctttttaatacgtattttacaatgaaaatgtttttaaaaattatcttttgggccgggtacagtggatcacgcctgtaagcccaacactttgggaggccaaggtggaggggtcactacgtcaagagatcgagaccatcctggccgacatggtgaaaccctgtctctattaaaaatacagaaattagccgggcatggtggtgggcgcctgtagtcccagctactcatgaggctgaggcaggagaatcgcttgaacccaggaggcagaggttgcagtgagccaagatcatgccactgcactccagcctggcaacagagtgagattccactcaaaaaaaaaaaaaaaattctcttttgagccctgccacaatttatattcataaactcttgccccagtagatggtgctgtgtcttgggaagctctaaatgaaggagtgccctagcttattgggttgcagcttggagtccatggaagctcgtatgtgaatctcgaggaaatcaatttcaacttttaccctctcaatgggattttgtatgaaaccatgctcgagtgtgtgtgtgtgtgtgtgtgtgtgtgtgtgtgtggtgtctttagactgtaatatctaagattaacttgggtgatcactaaaactccagaagtgctttgccacattataaccaggcttgaagtcttgaagcctctacatctttttttttttgagacggagtctagctctgtcacccaggctggagtgcagtgacatgatctcagctcactgcaagctctacctcccgggttcacgccattctcctgcctcagcctccctagtagctgggactacaggcacccgccaccaggcccggctaattttttgtatttttagtagagacggggtttcaccgtgttaaccaggatggtcttgatctcttgacctcgtgatccgcctgcctcagcctcctaaaatgctgggattacaggcgtgagccaccgtgcccagcctgaagcctctacaccttctataagaatctcaaaaattgttaaagactgtgaaagcctgtaatcccagcactttgggaggccaaggcaggcggatcatgaggtcaagattttgagaccatcctggccaacaccctgtctctactaaaaatacagtgacaccctgtctgacaccccgtctctactaaaaatacagaaattagctgggcatggtggcacgcacctgcagtcccagctactcgggaggctggggcaggagaatcacttgaacccgagtggcagaggttgcagtgagccaagatgagatcatgccactgcactccagcctgggcagctgagcaagactctatctcaaaaaaaaaaaaaaaaaaaaaaaaaaaaaaagaccgtgaaaggactgggtagctatctaagaaaaatattaacagcaacactggcaagaaattgccatagcccctgactaccgttcttggattcttcagctgtgtccaccaatgttgtaaacatggaagtatttagtcattccacaaatatttattgagtacctacagagtcccaggaactctgatgtcccaggtgttgtgtttggaaaattcaggaaaatagagagtggtctctttccacctgctgctctatgcagcatgggagacagacaggtaaacaggacattacaataaaatgcaatgtagaaacccagacacagtgctttggaagcatagaaaatgtatctgttaactctgccagaggggttaggaagggattaagaaggagatttaaaggatgactaggagttcctaggcaaataggaggaggaaacagcccatgcaaatagctcagcaaggctatggccagtagtgtggtttgactaaagctcacaatctgtgagaatgtggggagagaatcagaacataatcagaggcctgattatcaggtgcctggccaagttgaggagtttgtactttatcctacaagggagataaactttatctcccttgctttatccgaccaggagaagcaatgaaagactttaatcagaggagtgacaggattaggtttgcatttcagaaggatttcttttttttctttactttctttttttttttttttttgagacgaagtctcactctgttgctcaggctggagtgcagtggtgcaatcttggctcactgcaacctccatctcctgggttcaagcaattctcttgcctcagcctcccgagtagctgggattacaggcattcactaccacacccagctaatttctgtatttttagtagagatggggtttcaccatgttggccaggctggtcttgaactcctgatctcaagtgatccacccacctcatcctcccaaagtgatgggattacaggcgtgagctaccacaccaggctcagaaggatctttgacacagatataaaggatgatgggctagagaaagcgagagcggaggcttagaactgcttagggagcttttcaaataattcaggtgaaagctactgaggagttaattgtgggtagcagcagggcagagctgttttctctatttctagttaggactttggcccatccttccagaatttcagtggcagtgctttcagggttcaggtgagtgaaggcactgtaaaggtcctgatggaatttgaggccagcctgggcaacatagtgagaccccgtctcaatttatattaaaacataaattaattagaaaaataaaaaataaaggtcctgagggccaggcaaaatgcctcagataaagaaatcatcatgaacggcaccaagtggttcattcattcattcatacatttatgtgttactaattcagccagaggtttaaagcacatctttttcattaggaaggtgagccttaaaggtgaatactcaaggggcctgaatacttaaggaggggaaggggatgctatatgctttcacttcaagtcagcgggaagaatggcacactcaaagtggggaggtcagcctggcatggtggcacctgtagtcccagctactccagaggctgaggcagagggatcgcttgagcccagagtgtcgaggctccagtgaactatgaccttgtttcttaaaaaaacagctgggagtttatattctagggatagggtgacaaacgaacaacttccaaaatgcacaagatgtatggggaacaattagtttggctggaatttgcgttggggggagatcagaagctgttgagaaataaggctatagttggtgaagatatccgactcgtaaaaaggcaatgggatttagaaattcctgggattctgtttctttgactcggggttaggaagacagggaagtaacaagtgcctttttttttttttttaatagttaagggacctgagactgggggtggggggcaatgtcatctgccccaggccacacaagtgtaagatcaggcatgcatgtctgccaaggtttcagttcaatgtccgtgcccctcttttgctctcttcccaaggtacagaggcggaacggcgcggtgccctcgggtcccaagagagaagggcgccaagctcagagccagttctgtggaagggtaggggaaggcctgaccccgggggcaatgtggtggcgggacagtcgtatacaccttcaggagaaccacctcaggctgacaggcagtgcggagggccccaagagcgccttagggttgcctgctccagagagcgggactcctgcgctgcagccgggatactgggcgccgccgtgcgcccaccccctgccagtggttcgctccgaacacccctcgtcgggcggcgggtactgcggcccgccccacttccggttgttgtccggccctatatccggtgtccgcccgccctcggctcctccgccgtgatgctgtcccgatcccgctgtgtgtctcgggcgttcagccgctcgctctccgccttccagaaggtacggtctggccgagccggggccccgacgggtgaggagtctgttggcgggcagagaggcggcctggaaggcaggggcgcggcgcgccggccgggccgggcaccaagggcactgggacgcggaggccgcgcgggctgggcggcccggggccgtggttgccctcgggaccgttttgcggagcccagcggccccctgccttctccaggcagcctgcggggaacgtttcctgctgtaccccaccctccgcgcgggagctggggagccgcgcccgtccagatacttgactcagagttagggaggaggcgcggcggagtcctccggcgggattcggcgcccgtctcgtcttgctctgttaaaatcagtgggtattaatgagtcccgttgggaagttgagatagtttggcaggcccagcgtgttgattgggtctgccagcacggtgtgttgcatttaccttcggagttacgagattcacctgtcaccaccactgggacagctttgagcgtgtacttaaaagaaaaagctgggtttttttttcatcttgggtgacgtcgataatgtcttctttctcaacaggggaactgccctctagggagacgttccctgcctggtaagttctgcccttaccgtcacctaaaatgctctcctcctgggcagagcagtatgtgaggaactcgggggtgcctgtgtttctcataatatttaaagacagtttggttcagagagtagtgagacgcaatgctacataatcacgagctatcgcttattcatttagctcgtagttgagtttctactgtgttaggcactgtgctagacgctagggatacaggagtggatacagaagtgtacagttcttgccctcgtggagctcctaggctagttggatagtgtcagttgctaaacaagccaacaaaggcaaatttttgtaactgctgagaaggaaacgagggtggacagaagagccctttttgaggaggtgacttaaaagttatggccatggccgggcgcggtggctgacgcctgtaatcccagcactctgggaggctgaggcgggcggatcacgaggtcaggagatcgagaccatcctggttaacacggtgaaaccccatctctactaaaaaatacaaaaaattagccgggcgtggtggcaggcgcctgtagtcccagctcctcgggaggctgaggcacgagaatggcgtgaagccgggaggcggagcttgcagtgagccgagttcgcgccactgcactccagcctgggcgacagagcgagactccatctcaaaaaaaaaaaaaaaaaaaagttatggctagcagaatgtgacggagctaacccagtgaagcccaggagaaagagaatggcattcacaaagaccctgaggaagaaaagaggttggcagaacttaagagctggaaaaaaggtgatttggccggagtattttggttaagggagagagtggcaagagatagaagatggtatagagactgaaggagtttagattttatcctagcagttaaaaagaaaaaagtgtcatccatagctttttttctgttatatgcctagcctaagtatttgttgaatgagttgaccttgttgtgggctttctttgtgccaagcatttatatgagtgctttctgtgaattttttagttaatcatctcaaaacagtaaaaagtattttctctattttacaaatgcataacccaagacaagagagcttaaaagccttggccatggtcacccacccagctgttgataagccaggtctacctgacccatcctgaactcttaacccaccatgttctcatttactcatggactcaacagatcatttattgagtgcttactatatgccagccactgttctaggtaacaggggtatagatagactctagcctcgagattttatgggctagctggagagagagagcaaatatacatttatgctccgacaagggcataaattttggttactacgagagaggaattaaagggtgtgatgagagggtgggatgatgtagaccagcttgggaaggttgggaatgtcagtaaaggcttccctgaagaagtgacatttaactgagacctgaatataaaagagccaagaaaatgtattccaggcaaagggaattgcttgtgcaaaggttttcagacaggaaaggacttgaccagtgatagacatgggaagaagcctgtctggcaggaaagatagagtgggctggacggtacaggatcgcgtaaagtgtggactttatcctgagagttacgagaacataaagcccctagcacaatgtcggcttgtagtggactctcaataacaaacatgtttttcaagtgggaaccctgaacaatgtcagtaaacattttctccacttcataggtgggcaggacaatggaaagagccttgcacttggggatttgcatttgggctcagggattcaccttgggctagtcgcttaacctccaaaagtcctacttatatgaaatgggaataatggcagatggtcgttccacttcagagagttgtgagactgtaaaatcaaaatgaggtcattatgggaaagctttttataaaccctaaagcactgtacaaatgaaatttgctgtaggatgaactctgaattggactccaggttcccaaaatcagtgtgagccgccatctattctagttcaaaaacatactatgcttagaatttgcactgcatagtcattggctgctggacataaaggtgactggcttacctatcttgggatgcttgtgaggaggtgggcataagagagggctagctctcatttggtgtgtcctgagcccatggttcagaaagagttgttaatctgaaagaaaaaagacataagaaagaattcagaagaggcagctgtagttactagtcatcagttggggaaatgcagttaactatgataaggacagctggtgggcagaaagggtctctcaccttgttgagagtgaccagggtggaagacttcagaaaggcatgggaagtcaataaactgaaagatggggacatgattttctcagctctaggacaaactggagaccccgagcctaaagtagccaagtctttgctactaggattcaggtgataagatttccaacccaatcttttcaaacccagaccaaacatcctccttgcttctcaaattgggttatgtatagtcacaggataagccatcccatgtctttctcaagcttcagttgtatttgaagacttggcgagtagagacattttattatgaaaacatacaggaataatgaaaagttctggctttttaaggtagatgagattatataatcactttgggctgtgccatcaaattttttctctttcctccccagccaaacacatacccactcgatctcacatacccatttgctctctgccactaaggctactttggaaaagtttgagaagcaggactctatgataaagattatatccgttgccgttgatcctgctctgtctcagggttgggggtgagcagaccttttccattcccagcatgtatcctttgtgagataagagttgttggttaagagttattttgtttcttgcaggggtctccttatgccagggaccaggttaccctaacagcaggaaggttgtgtaagtatcactggggagtacagatatgtggccacgggttatttatttaaagacataaagttctaaatttgaccatctgatttcttcactggcctccagacctagaaattgaggtgattatgttgagtccctagactaacctcaatgttcacttttcccatgtgatgttccttgagcatcagctccgtgtcaggttttggactgggagtgtgcccactctccacaggtgtttggattataatgaaagttaagttggaatcctctttttatgggatatagaagggtgctcctagatattctgtttggatgtaagtgcagctgaaaggctcgaggttacatttattgtggagattgagagcatcctctcagtagcatagttactcatttttaaaaacagtaaaagcataaaactggttgagtcctgggactgactgactagtttggagggaatgctgttattgcataatgcagagtttggagaaaggctacccatgtgtgtttcagattaacttctgcgtatgaatgttgcttaaatgctgctttgcattccaagtgtttttgtggtggtgctaagagaatgctctctagtaacctgttcagcagctgtcaggctgcttactctacagggagaatcctcaaagtgaagaggtcagcggatgagcttcttacttactctacatcacaatgagggtttttgttgttgttgttttgagacaggatcttgctctgccactttggctggagtgcggtagcctgatcttggctcactgcatcctcagcctcctgggctcaagagatcctttcacctcagcctcctgagtagctgagactacaggcacatgccaccatgcccggttgttttttgtattttttgtagagatggggttgttttgccatgatacctgggctggtgtcaaactcctgggctcaagcaatccatccacttgccttagcctcccaaagtggaggatacaggcgtgagctatggtgcctggctgattttttaaaatttgagtaaatgttgcactcagtactagaaatatgaatcccggtgttattttggagggcagtttgatagtcataagtctttgaagtgtgtgtaccttttctttttttctttttttcaagatggagtcttgctctgtcacccaggctggagtgcagtggcgcgatctcggctcactgcagcctctgcctctcgggttccagcaattctcctgcctcagcctcctgggtagctgggattacaggcgcacgctaccacacctggctgatttttgtattagtagagacggggtttcatcttgttggccaggctggtctctgaaactcctgacatcaggtgatccgcccgactcagcctcccaaagtgctgggattacaagcatgagccactgcccggcctgtgtgttccttttcatctagcaattccatctctaggaatctatactgaagaactcctggtatatttatctcagatttaatatctgataatataaatattatcagatttatcttaaaatggcaaagagcaagggattggctaaactatagcatgttcacatgttcacactatgaaaagtgggaaaaagcaggttacaaaataatttcattttctactgtgtggtatgatcccattgtaagtattctttttgctatttctaatattctgtagtgaacatctagttatttagagattcaaaatgtattactcatctgcaatcaaatgaaaattggggcaatcatgactctctacaataaatacactaaatatttgaaagtaaataatgaagaaaaagtaaactttgtgtgggatcaccccaatcatgtcaccctaatccagtatctttgtgtgtgttgtgccttttttgtgaataaggtacccactttatttaataaatcttttattgtaaaacaatttttggttttatgtttttactaatagtattatatttacatgattaaaaattcaaaaagtaaaaagggtgtccatgagaagacttttttatccttgtcctctagccccccgaatgcctcttgggtagtggtggccaccactccgggttcctggatgacttgcagagcagcctctgcacttgcatgttacctgttagttcttgcctataggcatgtactttacaaggttacaaactatatgtagaacaatttgtattcttgtagtttttaaatatcttcattttttcttggttatacatagaccttatagttattttgacattataaaagtaaaaatacctaaagacaacttaaatctcttttacttttctattataaaaatgcttgttgtggaatattcagacaatcctgaagtgtaaaaagtgaaagtccccatccaaatcattctcccaaattgtgtaagtgtgcaacacataaccagagataccatatatgtctacatctctcacccctcagaggtaaccactgttaatggctttgtgcatacagggtgagctgattctccagtttatattatttactgtaaaggccatatcagtaaacgccttggtctttgaggttcgttttgaatgaatccagaatgtgttgatgtgctgttttctagcaagagaaccgagtaggagataccatatggggtttgtgtgtggtttttttgtttttgggttttttttttttttttttggcataacaccttgttttacttccgagttaaccttgttaatcttgctgccttatctgatctaaatctgttatcttgagggcagaaattccattataccttgcacaatggcttgtaccctgggcaggccgtaaatctatctcggatttagttaaggaagagacctggctggacatggtgactcactcctgtaatcccagcactttgggtaggatctttgagacccgtctgggcaatgaaatccatagtctacaaaaagtaatttaaaaaaattatctgggtggcatgtgcctgtagtcccagctacccgggaggcagaggtgggaggatcccttaaatccaggagtttgaggttacagtgaactattatcatgctactgcactctagcctgggtgacagagcaagactcttatctcttaaaaaacaaaaaaccaaatcaagaagctaagtcatttcggtctgcaaaggaccaaggtgcttatttttttattgaaagagccaaatgtaagtctgttttgtgagagttggcattgcattgcagcacaggggcctgagcatacttggggagctcaccatttaaggtacctgggtcgttaggctctactccagacctgctgagtcagaatccctgggggagaggcctagacaagtgaactttgaaaaagttcctccccaagtgacactgatggacacccctggtcaagagtcactgtttaaggggaaggtgacccatggggccttaactagactaaaatgtgagtggttcgcctgttaaaaggagttaacgtgtgtttcttttgtagcattaacaacagtgtcttcagtgttcgctttttcagaactacagctgtatgcagtaagtacctgctttcttgggaatggaattttatgggaagagcaacaattgattgagtttaattaaagaaaaatattaaaaaggaaaaatgaactacttatgattttcttttttgcatttttcctagaggatgacttggttacagtcaaaaccccagcgtttgcagaatctgtcacagagggagatgtcaggtgggagaaaggtaagatttagtttcctattttttttttttttttttttgagacagagtcttgctctgttcccagcctggagtgcagtggtatgatctcggctcactgcagcctctgcctcccaggttcaagtgattctcctgcctcagcctcccgaatagctgggattacaggtgcccaccaccatgcctggctaagttttttgtatttttagtagagacagggtttcaccatgttggtcaggctggtctcaaactcctgacctcaggtgatctgcccacctcagcctgccacaaagtgttgggattacaggcctgagccactgcgtgagccactgcgcctggctcctctcacttcttaagtttaagtgctatctaaaattctcccctcccctcaggatagttgtagaatttatagctctgccgttttctttacatatgtactttctgctggccctgtaggaaagggttcttataacatacctgccaaaatgggttttgtggctactggaggctccccgctaacaggtagccttgtagcctttgattgtcttttcagctgttggagacacagttgcagaagatgaagtggtttgtgagattgaaactgacaaggtaggcttatcttatattcgtaccagcttttcatgggcttcccttagttaacctaatgaaagaaacagggacttaaccattgtttagagataatttttaactagctctaacttcagttgtaaaattattggatttgttcaatttaaaaaaaaaacaactttttacatttaactttttttttttttttttttttttgagacagacttgctctgttgcccaggctggagtgcaatggcctgatctcagctcactgcaacctccacctcctgggttcaagcgattctcctgcctcagcctccctagtatctgggcttacaggcgcatgccacaacgccgggctaatttttgtattttttgtagagacaggtgttgccaggctggtctcaaactcttgacctcaggtgatctgcccgccttggcctcccaaagtgttgggattagaggcatgagccaccgcacctgacctgcatttaactttaaattgtttgctgtgtgtgtactatgtacttcatttagtagctttagtcttgtagtgtgtggtgagggggtggggagggtaaataagctgtttccactttttcctgtatcacttggaaacatattaactgaatattgcctgaatgtttctgagaaaggacagaaagtgaatcttcacagtagcgatgacttgttatcacccttgctctgaaattatggccttagatgtttgtgtgcaaggccttatatattgtgttgcaactcttgttactcactggagatacgctgttgttgttgttgttttgagacgtttcgctctatcacccaggctggagtgcagtggcacgatatcggctccacctgccaggttcaagcgattctcgtgcctcagcctcccaagtagctgggattacatttttgtagtttttagtagagatggggtttcaccatgttggccaggctggtcttgaactcctgacctcaagtgatccgcctgccttggcatcccaatatgctgggactacaggcatgagccactgtgcctggcttcattggagattctatacagctaattttctaatgctggataaacatttggacttcctccatctgtcttcctcttccagacatctgtgcaggttccatcaccagcaaatggcgtgattgaagctcttttggtacctgatgggggaaaagtcgaaggaggcactccacttttcacactcaggaaaactggtggtaaagaagttctcctggtggtcaaggtctccagtgttccctcttgggattgggactgagcataatgtgctaattccccgatatgtcaaagactcttgtcattccagctgcccttagttgagggaataaggggtaaatttatatatagtgtgaacttcaaatgtcaaattctaaaagaaaagtgtattttttaaaaaataaaccttatactctgttctttccatgggtgtttcttagcaggagctgagaaactggaccttttcttatagatatacagattgagcatacctaatctgaaaattcaaaatctgaaatgctccaaaactgaaaatccaaaatctgaaatgcttcaaaactttttgagcactgacagaatgctcaaaggaaatgctcattgtcttttatggggaattcagtgttgtttcttttcacatctgttctctcatatctctaggaagggttggtatttcttttgggaagaaatgagaaacgaatttgtactggacctgataggattagagattaataactttatctgactcttagttaaattttataaccactaaaaagtctatttctttttcctaagcgagaatcgtacccgtagaccaacgagtcacagaagtctatttctttttcactgttacactaataaggcagatagaccgcatgattgaggttagtcaggcaagaccagaagctcagagtagaaaacatgtatggtagaaggctgggaaataaggtagtcctcctgttgcagaagtttgtcttagcactaaccctggatataatgtccagatgggtgaaaaacagaaacaaacatttcatttaaagttgtgagattattacttggccacttcagtgatttatgagtcatcctggatgaagtgctttcttaagcctaagtcaaccctcgatgactattttattttttgagatggagtttcactctgtcgccaggctggagtgcagtggcctgatcttgattcactacaacctccgcctccggagttcaagtgattctcctgcctcagcctgccgagtagctgggactatgggcacatgccaccacgcccagctaatttttgtatttttggtagggacgggctttcaccatgttggccaggatggttttgatctgttgaccttgtgatccgcctgccttggcctcccaaggggagtaatcccttggcctgtaatcctgggattacaggcgtgagcaactgcacccagcctattttttaatagtattcttgcatatataatgttaaaatagaggatgaagagtatcagtaattagaaatatgtttatgtatgcatttcaatattttaaattgcctaggtgtttttttttttccttggaagtttacattttcttgggcttgataggtgctttgaaagtacttgctgaatttattcagtggaaacctgtgaaattgggaagggagctaagttgagccagttatctgatggacatttagggaccctgaggactagagaatagtgccttatgtcattgtgtgtgtgtctcatagtgctttgcatattgctgatacccagtagacattcgttacttgattggagctagagtttttgccactaaattttgcttggttgcttctcatttcagacagtgccagtggcatatacttttcttgtttttcagctgctcctgctaaggccaagccggctgaagctcctgctgctgcagccccaaaagcagaacctacagcagcggcagttcctccccctgcagcacccatacccactcagatgccaccggtgccctcgccctcacagcctccttctggcaaacctggtaggcttccaactcccacatgtcatgtgggagaacatctcgtctaatatgttccttcaaagggtaaactctagactgatgatggttctgaacaggccaggttggctgctttgtagaaagaattctagactttgtatccaaaggcctgctttgcatctcagctttctgttactagctgtgtgtctttaggctagtcacttaatttatctgaacagattgttcatctgtgaagttggagtgatactaatatacctcagaatatcttgaagattaagtaacagtacatatgaaagcactggcacaaactcagcagatgtttctttccttgtctgatgcagctttatcctcttttcattttcagtgtctgcagtaaaacccactgttgccccaccactagctgagccaggagctggcaaaggtctgcgttcagaacatcgggtaagcctctgaggaccactttcaggaaagaggcagggggcagtgttgagattagtggagtatgggtgtggtgatgcctacctttgaatgcctggcagctcattccctcaaccttgataaagggagtttaggatataacttcttcatagtcacataaccatcaaatgataggactagaacctgaggtcttctgaacacttgttcagtggttttcctactatattatgctaccagtgaaagccttgggtaagttaaatatttgtaggggtggtagcttagtaactcacccccgtcctcccacgatgtcacacgcttcagagaggtggtttagtgagctctattcctatacttctgggatacttagctgtagctaagggataatactcagtagcaatagctgtcaggtgcagacataaagcctcaaggaagtatggtcaggattgtggttcctctgcctgagaatacttcctaaaaatatgatagcctcgaaagtttgttgctcatgaggttctgttccacaaatagctattcttatgcaaatctttatcaacagaaagtgccctttttcttatgattcttatgttggctagactacactacactacattcttttataaatgggttttggtttttaaatcactgtttctgagccttcattcttggtcaagctttaggcacatctgagtgagtagttttggcctgtgtttgcatgtttttgcttggaggagaaagggccaccacaggaaagggaagcctggagctcgtgtacttagatactgtagtccttggccatctactcgtggcaagccgtgttctttctgactacacggggaatgcttgacccagagagatcagattgtcaatgcttgttccactcttactttcaggagaaaatgaacaggatgcggcagcgcattgctcagcgtctgaaggaggcccagaatacatgtgcaatgctgacaacttttaatgagattgacatgaggtagtgtctctagtccctcttatcccctaggcccctttttcttagagaacacgaacttgccccactccttatctagtgctgattctaaaactaacttgtcagggaagaggtatttgtttattgttttttgtttgtttgtttttgtttttgttttttgagatggagtctcgctgtctcccaggctggagtgcagtggcatgatctcggctcactgcaagctccgcctcccgggttcacgccattctcctgcctcagcctccagagtagctgggaatacaggcgccccccaccacgcctggctaattttttgtatttttttagtggagacggggtttcaccgtgttagccaggatggtctcgatctcctgacctcgtgatctgcccttctcggcctcccaaagtgctgggattacaggcgtgagccaccgcgcctggcctgtttattgttaactttcacagagtgagccgctggcttcttctctaattggctttcctaatactatgcctgcctcctccatgaccttaaccttagccttggctaggtgtagtggctcacacctgtaatcctggcactttgggaggccgaggcaggcggattgcttgagtccaggagttcaagaccagctgggtaacaaggcgaaaccccacctctacaaaaaatacaaaaattagccaggtgtggtggtgcacatctgtagccccagctacttggggggctgagatgggaggattgtttgaccccgtcacttacatattttcctaagtgattcagaatcgagtggatgaaaaggcaaagataggctgggcttgtctttcattttacccagctctgacagtgaaatggaaaacaagttgtgtttttaaataaccttagaatgttaaccaaaggtactaattcactaggtatgcccatttctgtagtgagctaattgttgacttacctgttttcttcaagatttcaatgtgttcaagtatcagcactgtcaggaagagaaatttgacaaacgtgttttgagtgcgtactgtatacagagtactgtactgtggaattcagtggggatagacgctgggcaccatggctcgtgcctataatcccagagctttgggagggtgaggaaggaggatcgcttgagcttaggagttggaaaccagcctgggcaacatagcaagactgtctctacataaaatttaaaaattagccaagtgagggctgggtgcggtggcttgcgcttgtaatcgcaacactttgggaggctgaggtgggtggatcacatgaggccaggagttcgagaccagcctggccaacgtggtgaaactctgcctctactaaaaatacaaaaattacccaggcatggtggcgtatgcctgtaatcccagctactcggaaggctgaggcacaagaattgcttgaacccaggaggaggttgcagtggctgatatcgcgccactgcactccagcctgggcaacagagcgagattgtgtctcaaaaaaaaaattatgtatggtggcatggacctatagtctcagctacttgggaggctcaagtgatcttcctgcctcagcctcccaaatggctgggaccactacaggcatgtgccaccaggcttggccaatttttttagtttttgtagagacaaggtctcgctgtgttgcctaggctggtctcctgaacgtctagggtcaagccatcctcctgctttggtctcccactgggattacaggcatgagccaccattcctggccaaaaaagaatttttaaacaggtcttcaagagtgactagcattttgtcagccttgtggagaaaggtcattccagatgatgttaacagtgtagaccatgagatgggaaagtagaagacacatttgagaaattgtcaaaaatcatttctgttgtgaggattttgtatagcaaagaatggtaaagaaggttggatccttatttcagaatgttttgaatgccagggtaggagtttatatttaattcaggaagcaagtcaagtctcaggtcatctctttctttctttttgtgcctgagggtttagtctgcgaatctacttttcattaagagaaatttgcttttctttgggaaagggtttgaaaaatagggagaagggagtgttttcttgataggtgcgctgtggcattgttcagagtagggctctgtgacctgttttactagatgtcatccattctgttgggaaactttccgaagagactggatgacattcaagccaaagatttctctcttgttcataggatgtaggggaaggaccttgactaatgaatcacaaaggctgcagcttatgtttcagtgcattagggccaaattgtacacaaattgaattggactttgaaattctacccagtttcttaagacaaaacatgtaaatatttgtggccctgaaagatgcagttggcccaacagctttgattggaaaggaagcgtaataagctggatctcctttcagcagctaatcaaggtgtcacttaacaatggcctgcggtccttgctgcagcctaatttggtttagatcgagtgccctttgggtcttgtgctgatcagctaacccataagggacctttctgagaccttctcccttcctctattgtcccagcctttgcctccaagggcagagctctgaaatagaagctacttaatgaccagacaataacatttgggcaggtttgagagcagagatgtttatcacatctctttccctcttctgcagctcttgtgtcttgggaaccagtaatgtctttagggtggtaatcctagcactaaataaggttagaatcaggaaaacaagcattttaaacccaatcagtcccccttggaaaaacttcctttttcaaaaacaaaagatctgaagggggctgttaaaattgtaccacatcttacctttcatgctaatgtcgaattaggccattagagggagaaagggagaactgagcatttggccctgagataaagttaaattcaattttcatcgtagaactgcattactgcattccgataaatactgaggtttatgcagcaaagtgatgggaaagccatttctcactaactctgcaatgtgtcattgaaaaaaaaccagtcccaaaagaataaaggctgctcatgttgtaaaggcttttcagaaggcttgctgcttaatctgaagggaaccagcctaaaccacaagtggccacttttctaaataccaaggaaatcacagccattaaactaatcttagggcaagaactatgtcttaattagctttgtatcttggtacctggccctgaccctcacatgtagtaaggtgttagtacctgtttggaagaataagtggatggaactgccaaccctggaaagatgaagaacggatatgactttccgtgggcctgaaagaacactgggttatacccttccctgcagagtcatgactgctttttcccgcatggagcctcatgtacccatgagctgtttattttagtctccactaatcaagagataggaggaatatcacacgggagttatactcagatttggtggggttttttttttttttttgtattctaacaagaaataaaaagaatattgcttattttgtagattttgtttatactttaaaaaattttttttcaggatggatagctcagttattcagggcaaggatgttggtgtgctgtgtgatctcttgttcatatgatgtgtcactgaaatctgtgacttctagaccatgaaggagccctgtaaagagatcaacccaccttaaagacagattgggcctgattcctgtagatttctttgtaaaagaacagagttactgtgttaacctcaggtagactatttcaaaacttgaactaaggtaatggtccagagtgagggaaaagctctcacctaattgtgtatatggattgagaaacctgtgtgaaagtcaaaatgcaggctttgtggtcagtttgttttgtaatattttcacagtaacatccaggagatgagggctcggcacaaagaggcttttttgaagaaacataacctcaaactaggcttcatgtcggcatttgtgaaggcctcagcctttgccttgcaggaacagcctgttgtaaatgcaggtgagttgcttgtggctggaattggagaggtcctgggaggtaggtgtatgagcacagacctgctcccacatgcagaggatcaacagaccaaggctttttatttgctacctatagaaatatcagtatcttccccagggatttcttggttcaccttcctgaagcagcatcatgattactttctacccgccagctgggcagaacagtttctcttcccagtgtacagctcggcagctgctcaggcagcaggcagttctgggatagcccagctctccaggctgtctcctgtcaaggtggaagcacgtgttctggcttcctcccctcccccagctccacaggccctgttaccttggggcctgacttccacagttggtgtaggctcctggctgacctttgatcttaggtcgatgggcctcactgggagcttcggcttggcctctcatggacctggtgcttattttctttcctttttacttacctacgtcattgtagtgttgacctaacaagcactttgttttcctgttgacacacttctctgttccttgggagattggagaggggtcagtgctacttttgccatcctcagcagtgtcaggggccctaaaggtctagaagtagaagccctagtccctcctgttgagtggtgctctagggaggtagaaggccatctttgttttgcccaaatgtatacctcttctttttcccattcttctcatgcctccctgactggctctcatctttttcagtggcccccttctgcttgcccacacatgtaggcggctctcaaaagttctcgtggcctctttttcacattacatgcttcctctggatgtcttatctaacaatacaacatggactttctgcggaaatgattcccaagcctttattttcccattagttgctaggtgtacattttcagatgctggtttgccatctcttgaggtagcatatttcaaagccagatcaccccgcttactcttggatctcccctcttcctcttgttgagagttggaagcagagaatgggtagtatctctatatcccttttcctttgctaatttgcccttttttggaacatttgttaaccctagtcattctctgctaaaggagggcttgactagagctacttaacgagagtttagtgcatacctatcctatggaagccagtgtgttgagcccttcttagggctgccaaagaaatggatgctcctatgcccaggctcagtcagggacttgggagatactatacttgggatgggagtaagtggaatgccagctgccatgcataatgcagtggtgttcatggtggttggtcagcccacactgtatcaagctctgcagatttttactctgttaatgcacatattacctcattagtcttggccttcctggggagttgtatgtaacatgtattttctctctcatagtgattgacgacacaaccaaagaggtggtgtatagggattatattgacatcagtgttgcagtggccaccccacgggtatgttggggcaggaggtggggaatgttggtcttagaccctcaccttatctgtgtgaaggagatcacacaagagaaatcatttctttaattctgtatttttagaagggagttagtaaaagtaaccttttttttcttttaaaccatgccgcattcttttaacactttctgttaatcacactgagtaatgaaggtattctagggagggcataccatgggttgaatcaagggagttgttaactataaaaggtactattaatttgcaactgaaaacagcttttcacccccttcagggtctggtggttccagtcatcaggaatgtggaagctatgaattttgcagatattgaacggaccatcactgaactgggagagaaggtaaagtagaaagatgtatacaagctgctaagcaggcgagggaagagagccttcagaaggctgggctcactagcaagcagtgctcatggaaagtcaagtgcatagcccctgagaaaagcagttgcccatgagagctaagtattttatatatctggtggagtttaccatgctctggtaactgaaatctcatcagatgagacctgctagaaaagatcatctttgaagtcttcaactgtatgaaattgtgccttttctctggtggagcactggtcatagacaccttagccgaacaactgtcacacggaagctagcgcttgtgccatcgatctcgatacaagctttctggacttcctttgcttttttgtttttagaggcagggtctcgctgtgttgcccaggctggagtagagtggtagagtcatagcttactgcagccttgcactcctgggctcaagcgattctcctgcctcagcctcccaagtagctgggactacaggtgtgcaccaccatgcctggctaattcttaagttttttatacagatgggggtctcactatgttgcccaggttggccttgaactcctggcctcaagcagtcctcctgcctcggcctcccaaagcgctgggattatggactgactttaggtgaaggaaactgggttggcttaatatttcaattatgaaatctgtttttaggcccgaaagaatgaacttgccattgaagatatggatggcggtaccttcaccattagcaatggaggcgtttttggctcgctctttggaacacccattatcaacccccctcagtctgccatcctggggatgcatggcatctttgacaggccagtggctataggaggcaaggtaggaaccgtcacttctaaggtcctagtggctaggtctcgatgaaagggaaatccaactaaatgctaattgtaaaacattaactataatttcaggcctaagttccatttcttagtttctaatagctaaggcactgattatcaaattgtggtctggatcagcatcatctgggaccttattagaaatgcatattcttagaccccatcccagacttaaagaagaagtgcagatgatcctgatgcatattcaagtttgagaaccactgagctgaggaggcttgtttgcttctatggagtgggggatatagttggaaacgtggtcccttgcccctgggaaacagatgacaattatgcatgtcagtctgtgagctgccaagttgtatgataaagcttgtaaatttcccgggagttcagagaattaagtattaaaaggggcttgagctggcccttagaagatacgttggtatcaaaaaagctttctgggaactcctgtgtttagaatccttttgggttactgactcctgtgtgaaaccacagtctgtagatcttcctggaaaatgcccatacacccaactacacatacaattccagaatttgtagaccctggcttaattttttttttttttttaaattctaaccccagagagaagcaagtacaggcagccagaactgaagggaaaactttccttgtaggcagcagatgcgttagagggcagagtatgtttttaaaaaataaaaggcagttgtgagaagacagttttcttggcaaactttgtttctgagtggggaagctttgcactgagggtaagtcctggtctttgaaatactgtaaatatgcagaggcaacatcaataggaaaggctctggaattaggaactttcttatgggctgtgctaaatctccttcagcgaggctggctgtggcttgctggagacaaacctatttacctttcctctctgtaggtagaggtgcggcccatgatgtacgtggcactgacctatgatcaccggctgattgatggcagagaggctgtgactttcctccgcaaaatcaaggcagcggtagaggatcccagagtcctcctcctggatctttaggaggaacccacacaccctacaagttgatcatgcaggaactgaaaaccagtcttctccctgtcccctcatgggtcccgggttagcctggtgacaggcagacacatgctgttggcctcaagcaaggaagcagagcactgtgtaaccagcagtcacaggtcttttcttggcgttcctgccaggctctcccctctctgcacctgtctcatagcctcgaatatcttaattccttaggcttaagagagagagccttaatggatgctcattcatattcctgcctttcttccatcagctctctgcaaagatgattttgcttttccctagtgctggtatactatagagaaacccctggggaccatgtgattaagttcctatcttttgaaagtttgttctgcagagacttctaggaggatgctgtgcctcccaagctcagagcagcctctgtcctggctgtgcacattctcccttgattccacttgtgtggagggattgaacacaggcaaagaggtgctgctttgcttcttcaatggcaccttcattctccgttgtcattgacttcaagatgcctcttctacctcttccaggaagcacaggccaggggatctgggtgtgtgagtgggaggagagggcagaggtcccctgaggtcatgcattgtaatcatcatagaaggagagcccaggcctgccctcacgctctccatcataggctgacaccaagaagactcgtcttggcacaatctcacacagctggggctgtagcaaccctttccaacccctttgctggttgctgggcctcattctagcaccttgttcttagagcagattctagcacatcatggcagtgggaccaagcgtggtcccgaggaagggccagagcctggtagagactagggaagggaggtctcctctagactgactcacattgccttgagcttttcagttaagttgctgtaagcacctgggctgaggaggcagtttttgttccttcctgcgttatagcggggccttgtctcttcctctgcaggacacagatctggaggacgtggactggggtaggaaaccaccctgagggtgttagtacctagtggtgaaacggatgaggtcatttctaaggtgtgttgcccgtggatctgggcacaatcattggaattccttggagccactgggattcatggctttgtatccaactgcatccaggcctgaggctgctgacgtttgacaccagggccagtagagagtgcccttttgtatcttaagccaagtaagtgaggcctgggggtgggggaggggggaaggggtgggagccaatactgagtgcctgcagcatctactactctgtcttcactattcagaacttgtaactaaagtatttaaagaaactgattttaaatgcaaattaaagggcagatattctcaaacagggttcctgtatctgttccttttggctactgaggtggtacaagtccccagcactgttgcactgaaattattgaaagccactcaaggtcctgttgcttattttgtgaaatcagaaatcccttatgtggaacttaacactcataatttgacagaaggtagaaccctgactgccagccgggaaagtgttgccaaaaagagtcaacctctgtaaaaatatttgaagagatttattctgagccaagtgtgagtgactgatggcctgtgatacaactcttaggagatcctgagaacatgtgtccagggtcgtctggctacaacttagttttatacatttaatacattttagggagacataagataccagtcagtacatgtaagatgtacagtggtttggtctggagaggcaggacagctcaagacctggggatgttgtcataggcagaatcaaagattttctgattggcaattggttgaaagagttattatctaaagacctggaatcaatagaaaggaatgtctgggttacagtaaggggttgtggagaccaaggttttatgcagatgaagcctccagccagcaggcttcagagaaaatagattgtaaatgcttctcatcagacttaaggagcctgttttaacagtaattccaaaagggaggggagtataatgaggaatggctggctccctcttcccaccatggcccgaactagcgtttcaggttaactttggaatacccttgactgagacgaggggtccatacagatggttggggggcttaggatgttttttgttttgtttccataaagcatcatagtctcttagtgccccaccttccttgagcctgtcaagccatactctagaatagagaatttggggtcaccatctttgtgaagccctttcaaaacaccagtagacttgcattttttgtgtgggcttacattatttcagtgatggatttgggaggagtgggggcatctcatttcatttggatttgatagccttgtggaccaagatgctcaaggtcaatacacatgaacaggtgagggttgatgacctaggagcagtggtcagtgagcgtgagtgtacagggtgggtagctaacctagactgcaggtggcaggtgtgatggagtccaggcttaaacacagccttgtcttttccagagtccctgtctgctgagctcttgcagtgaggccatccctctgtgaaggtctgtcacaggagggaagtgggtcccagagagtagaactagagctctagtagatagaaaaacaaattaggttgaatgaaaggaagaacaggatttggtgttagaagctttaatttatctatctggtaaacctgcaaaataggcattatttaccccattttatcgaaaggaggtcgactgtaagagctgggacccacagtattctaaactcagggcccaacaaagtgtcagatgtgtagctttgggtggatgaagcacagaagttccagaagggacttgtgcttcatgaagcggtggttggaagtggtccagcctgacttagggagagtagcagaaggaacactaacttgcaactctggctaggttgtgtccttaacctttttgagcttcagttttctcaggagctaccgtctgttgcaaggggtcactgtgaggatgaaactggtattcccccaggcaccatgagcctcttccaaggcttcttcatcctcttccccacagaacctggtcctccccgaccccaccccttcccctgaggcccacatggcatgctgctcaccaccagccctgcgtcctacttcctggcagccccaagctcgctcttgacttcactctggagcttctacaggggagccttccaacctgccccaatgagccgtggtcattgcatggaagaagcgagaacaccgtaggccagagcaggctttattggggccgtgtaaaccccagggagaggcaggacgtggaccacagagagtcatgtacaggctgcgctttcacttgtcttctctgtctcagtctcctgaagagcccgaggaagtcaagtctccccaccatgagtgaggggtctggtctgacagttgggccttcagagccaggcacgtggaccgtgtcagaagcgccacctggtggtgactgggatgctggcagggaggagctgagggcaaaactctagtggaaatttcccaggtcggtcccacgccccggtgacagggtgaaccctgagaggagcccccaaactggaggcaattgtctttgaggtaaccactcaccccagcttttcagagaccagaggcaagacatttctggctaagagccatggatagttgttccatgcgttttgtggtttcttatcccaaaagggcatgaagtcacagtaggcagtgacatggtaaacagccagggcctgagagggagtcctgatgggcacaccttgtctaaactgctttggcctggaagctgaattgctgtcctcttgcacccctggggcaggctgcccctcttcccccacacaggcccactggggaggaggactcttgattctggtttcagacttgctctaaggggcagacccatgcattccttcctccccccattactcttattttcttcccctcccttttgctctcccaagtctgaaatcacaagatagggggcatggtcaggaatcgggggtgggggggtgggggtgggggtcatcctgtcccctacctcatccctccctgcacaacagatggcatccctgcttctgggcctccccagctgcacgaacagcttctggtggaagaggcctactcgctgtgtgactaagaggactagccaggacagtctggtttgggtccactgagccagtggatcagtgtcctgagatgagtctccagagatgtcctgagtggggcacaacatggcagtgagtgagtcacagaacctcacagtagggtgcagcaggtggtcaacagctcagcgccagtgccacagaaggcaacctttaacatggtgagtccacatgctcaacgggtctgttgactgatgggtagatggttcaagctgcttagcagggcaagccttgactgcccccacctccagcttttccaggagctggcccttcctgggtggtggccataattctgaggccccagtgggagcccagcaggacagacagtgccctccattcctcgcccaaagcccgctgatagagggccagccctgggttgggtgtcaggcaaggaggagaggcgatccagaccaggccagctgcttccgtcacccgctctgccctcttaccccaccagcttgctccattggatggtactgaaaaagggatgggacttgagtttgctgacaccaccttctcccatgcccaggcgccgggtaggctcgaactgcagcagctgcagagagaggcccagtcagctgggccactccagctgtggaggcatggggtgacctccagggactccaaccactatggcctctagggggcctgctccctggcagcctggcccacagaacccccattttaccctgggaacattggtggtggttggccaccaacatatagaaatgtgttgcccctactgccctctgcacccacatcagacactgagcacgaagcacacgtggttcagacacagttctgtgcccctcccagcaccttcctcaggctaggcagctgcttcctctggccgggctacacctcacctcagtcagcagagaggccgctgggcgactgagccactcgggcagctggagctgggtgtgggcctggattcctgaagggtggctctgggacagtgcctgggaggacacagggaagggcctctgaggaggcaaccccaggaccgtctacactccagtggcagccaggattttttttccccatgtcacagcccatgaggaggatgacaataatgatagttgctacagccagacacagtgcctgatggctaagcagtgcctttatgttatccacgaaaggcaagaaacaggcccagagaggtaaagggacttgtgctgagttcagggtttgaacctaggtctcttggctccaagcttgctagaagcaactatcttgggttgcaatcagggcaggcactcttgggaatagtgatggaacttgtctccttattttaaaaatccacacgggctgttcatttggcagcaggccatggcatgctaccatcggggccaaggcagcggcgtggcaataaaagaaaataggacctctccacaccccagaaaggcacagctttgaggagcagagggtctgtctggagggaagtatgagcttccaggaacccccaggaggaaggccaagagctctgggctggagaggtgggaggagacaggaaaagagagagccactctgggggaaattgcagccaggactttcgggaccccgtgccatgggacgaaagcaggagggagcctggatggactggtcagctctggacttcagttcacgctgcatccatttcggctatttcctgctcaaatgcaatttggcctcccccttgctgcctacataactggcctcagttgcagtgttcagctcatgaggggaggacagaaggcagagccatcaactgttcccaagagtgcctgctctgattgcaacctgcaaacacaggttcccggagtgtttgcagggggatcttttgagctcttggctgacccaggctggacagggcagctgcttgcctgggtgaaagagcccctctctcccatcctccagctaaggtctgggggtgacagccaacgaggtcatgggtgggaggagtgaacagcgggctcaggatgattgaacagccttccagggaagaagggctgtgtcacattccgcgcttcctccaaatctgacaccacctgggcccaggctctctggcagaaaccttccctgaccatcccactctactcgtattcatagaagttgacagtctccttagctatagccaactaatgtgttgggagtgctaagtgtgtccctggcttcgggggcagttgtgctggtaggacagccaggcagtctctgcccagactggctggatggactaagcctggcccatcccacactcagtggcacccaccagggcactacacccagcccagccactcaccattcccgtcagcagttcatacagtagagacccaaagctccaccagtcacaggcttccgtcagctcggaaatcccacccacctctgtgggaacaagaacacaggtgtcccagcctcacctaagagggcctcttccattctcctcagcctacccagacaccacccacccgctctgtcattctcagactctgggcacaacccacacaaaggcacccaggtgctaaggcccaccctggcctccccccttcttgcctggggcgctgtagagattgtccacggcctccccgcagcactggggctccacctctgaccactggccaaaatatgtgagccggatgtgacctccagtgtgtgggaggaaaaaggaggggacagattgaggacagctgatacaggggagggggttgcagggcttcccccaacagtcatgcggtaggagccaatggccttgctgggcagaaactcggcaggggcacagcaccctccacagaggcacagcactctgaggcccacagagcccacagggtactcccaggagcctcggccaacagactccagcctaggccccctgaaaggctggctggggccagggaggagcagacaaccttggaggtcccctcgactttggggatctctcgtcctctgcctggacgctttgggggccaccccactgaggggtgaggagggcacctacctgcctggtccaggagcaggttcccggggtggaggtcccggcacagcaccccctgctcgtgcagcgcctccagcgctaccagcatctctgccgcccactgcttcacctgctcctctctcacactccaggtggccctgccacagccccggccggccccatctgctgacaggcagctctgatccatgcctcggccacagccccctagcaccgggccggccccctcaggaacccaagtgagcccccgagggggcccagcgtctgagttctggccagccctcctagcttgaaggtgcaggtggccacctggggcctttggaaggtccgaggagccagaggtgctggtcctggctgtgggttcaccttcagcctccctctggggtctggtggatggggcctccccagctaggagaaggttcggagaagtcctaggaggctccagggcgattctgtcctggccaggggcatggcctgagggaagcctcgctggggtcaggaggttgaggtgggggttgagctgagccttcatcctctcctgggtagagccagagctgagcccagaatgtcgggagtgcgcctgggagagcaggtgggaccagagagtgcctcctgggccatgcagagggagcggtgagcgtggggacagggagaaaaagagtatggatgccagggccggctcccactcctgcctcccttctgtcttgggcgcagactttccgcctctgggtgtcctggcctagttcagcccctcacctctgctccctcccacccctcagcttagaatgccctctgccctcctcttgacccaactaaagtgggcccagccttacaaactggcacaccaccgagagatgtccagcactatcagtgtctgtggtttgggtggtgggttcactagtgtgaacactgtttttagggagaccgatataaagaaatttaaagaaaagtcaggcacacacttatgatgactatatgtcatgaccccagatgtgcacctcactttaaaaagtcatcaatacaaccatcagtatctgctacatggcccagttcctgtcctcataacttcagtcaccaccaccctgtctggccactcccaagggatcggcacaacccggaaaaatgaaaagagccaacgctggaggaaacagcgacagaggagacagctgtgattctcacgcccacccacgatgtggacatccaccccaggatgtcccctgcccccttggtaccacacaggggcccacaacagcctgactggcctccagaaaggccgggtcccctggtctgtgctgtacatctggtgcaagctccgaccctccccagggctcagctttttttttttttttttttgaggcggagtcttgctctgctgcccaggctagagtgcagtggcgtgatcttggctcactgcaacctccacctcccgggttcaagccattctcctgcctctacctcccaagtagctgggattacaggcacgtgcaagcacacctggctagtttttgtatttttagtagagacagggtttcactatgttggccaggctggtcttgaactcctgacctcagttgatccgcctgcctcggcctcccaaagtgctgggattacaggcgtgagccaccacgccctgccagggctccgcattttaagggttgacgacataccccaaaggcctggggagctgacagggggccccaggcctgctcaccttgcacatgctccaggtgcaggaagatggagtcctcgctcacaaagtacctgagcagcttcgtcatgtaggggactccgtgtgggatgatggtcagccgctccctgctcaccatgtggcacctgggtaggctctgggagcagcagggcaggcagatcagccggggacaggccagagactgctgctgttaggggacctcctagccctggcttcaggggcacccgaatgagggtggagcaactgcctccctcagttcctgacctgtccttacccccactgcccctgtagaatctgggtcctccaccctctagccaaagagggggcagtgtgtgtgcatgtgtgtttgtgtgtatgtgtatgtgtatgtgtgtgtgcgcatgcatgtgtgtccatctggaaagtggggcatgttcaggcagaacaaccagcttttgtgggagggagtgcaggcttcaaatgcaggttctgggtaggagtttccaagagccctgagaaagatccaaggggaatgcagagtggcaggggcagggtggcacctgccttcaccacaaaggtccctccggttgccgggtcctggaccagctgcacctgccaaagtccaagaggcactggttaaggcaggtactagctcctggggctccgtgaccccagcctgaccccctcccaggttcctccactgaggctgactcactccagtggcagggcagggagggcgggctttggtggcactcctgaagcagacatcgatcctatcctgctcacccacccctgctagacctgtggtctcagatgctgcctcctccaggaagccttcccaagattacaggggctggggtccctaatctgcctccaatgctctcttagttcacccttaggagagcctcttcacactgtctaatctgtctcccactggactgtgagctcagtattcccggagccctgcacagtgcagggatgtagtaggtgctagacacatgcactgtgagcagcccgggccttggctcactgtgtgcgtggtgggcatgcgagcagaatgccctgccctctccctgcccacgctgggccaggcctcatgccacctgacgggagggctgagaagccctgttccacctggaccccagagatcagctgagaagccctgttccacctggaccccagagatcaactgagaagccctgttccaactggacctccagagatcaacccctcacccaaggccttagctagagccccaacatcctgcagggtctgaggtgtcatggctggaagggacctcagagccagtcacttcctctgatctcttgttttacaactgaggaagccgcagctctgaggtgactccaggtctccccagcgcagccatgttgtgtgggcttggcacgctgcgttcaggcctttttcccactccactccacccccttcatttacacacacccccatgacacaagtttatctatgtgaaaaacctgcacatgtactcctgactgcaaataaaaatttaaaataaataagtaaagtccgcttgagaggccgtctttggagagcagcctctccttcttgtgttggtttccattagaggcagacgctgtcaatcgcaaggtcagggccatgtttggagttgggcccttgactcatctgcatggtgggcaggggcgggccccagcataggagcgggcacatgggtacgtcgagggcgggaaggcagaggattcagcccaggtgagggcatgtggaggcaaggccagcaccctggggttgtgactccttggctgttggcctgccctgcggacattccccagggaggctgtggccagccatggtcggggtgggaactgggccctgaggccaggctgctgggcagtgaggaaggccacagcttgggatcagggtaggggaaggggcactgggcttcgatcctgggcaaattgaattgattttctcatctaccaaccaggaattccaaatgcctaccttccctacatctctggattgttgaagccattctgaaagcccttggtgagggccaggtgtggtggcttatgcctgtaatccctgtaatttgggaggccaaggcgggtggatcacctgaggtcaggagttcaagaccagcctggccaacatggtgaaacctcgtctctactaaaaatacaaaaattagctgggcatagtggtgcccgcctgtaatcccagctacctgggaagctgaagtaggataatcacttgaactcaggaggcagagttgcagtgagcctagatcaagccactgcactctagtctgggcaacagagacagactccatctcaaaaacaaaacaaaacaacaaaaaacaaaaaaccaagaaagcccttggtgagtggaaaggctgtgagaatgtcagtgatcacatctgccaagtcacatggcctctctgaaccttgctctttttaagtacaaaacggggtcatagcagcacttccttcagggggtcctgaagaggattctgttaaagcaggcaattcaggcagagcagcagcctgcacctgccgcagaacacacccttgataacctgtcgtgattattaccagtgtcatccgaggggaagcccaccctggctgtaaagtggttactctgtgctaagcactttacataggttgtttaattttatccccacaatcctgccaaaattcaggcctgagcctcagagaggttatgttgcctactgtcccactgctaaaaagtggtca

SEQ ID NO: 351 - DNA, 3004 bp, Homo sapiens
atgctgtcccgatcccgctgtgtgtctcgggcgttcagccgctcgctctccgccttccagaaggggaactgccctctagggagacgttccctgcctggggtctccttatgccagggaccaggttaccctaacagcaggaaggttgtcattaacaacagtgtcttcagtgttcgctttttcagaactacagctgtatgcaaggatgacttggttacagtcaaaaccccagcgtttgcagaatctgtcacagagggagatgtcaggtgggagaaagctgttggagacacagttgcagaagatgaagtggtttgtgagattgaaactgacaagacatctgtgcaggttccatcaccagcaaatggcgtgattgaagctcttttggtacctgatgggggaaaagtcgaaggaggcactccacttttcacactcaggaaaactggtgctgctcctgctaaggccaagccggctgaagctcctgctgctgcagccccaaaagcagaacctacagcagcggcagttcctccccctgcagcacccatacccactcagatgccaccggtgccctcgccctcacagcctccttctggcaaacctgtgtctgcagtaaaacccactgttgccccaccactagctgagccaggagctggcaaaggtctgcgttcagaacatcgggagaaaatgaacaggatgcggcagcgcattgctcagcgtctgaaggaggcccagaatacatgtgcaatgctgacaacttttaatgagattgacatgagtaacatccaggagatgagggctcggcacaaagaggcttttttgaagaaacataacctcaaactaggcttcatgtcggcatttgtgaaggcctcagcctttgccttgcaggaacagcctgttgtaaatgcagtgattgacgacacaaccaaagaggtggtgtatagggattatattgacatcagtgttgcagtggccaccccacggggtctggtggttccagtcatcaggaatgtggaagctatgaattttgcagatattgaacggaccatcactgaactgggagagaaggcccgaaagaatgaacttgccattgaagatatggatggcggtaccttcaccattagcaatggaggcgtttttggctcgctctttggaacacccattatcaacccccctcagtctgccatcctggggatgcatggcatctttgacaggccagtggctataggaggcaaggtagaggtgcggcccatgatgtacgtggcactgacctatgatcaccggctgattgatggcagagaggctgtgactttcctccgcaaaatcaaggcagcggtagaggatcccagagtcctcctcctggatctttaggaggaacccacacaccctacaagttgatcatgcaggaactgaaaaccagtcttctccctgtcccctcatgggtcccgggttagcctggtgacaggcagacacatgctgttggcctcaagcaaggaagcagagcactgtgtaaccagcagtcacaggtcttttcttggcgttcctgccaggctctcccctctctgcacctgtctcatagcctcgaatatcttaattccttaggcttaagagagagagccttaatggatgctcattcatattcctgcctttcttccatcagctctctgcaaagatgattttgcttttccctagtgctggtatactatagagaaacccctggggaccatgtgattaagttcctatcttttgaaagtttgttctgcagagacttctaggaggatgctgtgcctcccaagctcagagcagcctctgtcctggctgtgcacattctcccttgattccacttgtgtggagggattgaacacaggcaaagaggtgctgctttgcttcttcaatggcaccttcattctccgttgtcattgacttcaagatgcctcttctacctcttccaggaagcacaggccaggggatctgggtgtgtgagtgggaggagagggcagaggtcccctgaggtcatgcattgtaatcatcatagaaggagagcccaggcctgccctcacgctctccatcataggctgacaccaagaagactcgtcttggcacaatctcacacagctggggctgtagcaaccctttccaacccctttgctggttgctgggcctcattctagcaccttgttcttagagcagattctagcacatcatggcagtgggaccaagcgtggtcccgaggaagggccagagcctggtagagactagggaagggaggtctcctctagactgactcacattgccttgagcttttcagttaagttgctgtaagcacctgggctgaggaggcagtttttgttccttcctgcgttatagcggggccttgtctcttcctctgcaggacacagatctggaggacgtggactggggtaggaaaccaccctgagggtgttagtacctagtggtgaaacggatgaggtcatttctaaggtgtgttgcccgtggatctgggcacaatcattggaattccttggagccactgggattcatggctttgtatccaactgcatccaggcctgaggctgctgacgtttgacaccagggccagtagagagtgcccttttgtatcttaagccaagtaagtgaggcctgggggtgggggaggggggaaggggtgggagccaatactgagtgcctgcagcatctactactctgtcttcactattcagaacttgtaactaaagtatttaaagaaactgattttaaatgcaaattaaagggcagatattctcaaacagggttcctgtatctgttccttttggctactgaggtggtacaagtccccagcactgttgcactgaaattattgaaagccactcaaggtcctgttgcttattttgtgaaatcagaaatcccttatgtggaacttaacactcataatttgacagaaggtagaaccctgactgccagccgggaaagtgttgccaaaaagagtcaacctctgtaaaaatatttgaagaga

SEQ ID NO: 352 - protein, 451 aa, Homo sapiens
MLSRSRCVSRAFSRSLSAFQKGNCPLGRRSLPGVSLCQGPGYPNSRKVVINNSVFSVRFFRTTAVCKDDLVTVKTPAFAESVTEGDVRWEKAVGDTVAEDEVVCEIETDKTSVQVPSPANGVIEALLVPDGGKVEGGTPLFTLRKTGAAPAKAKPAEAPAAAAPKAEPTAAAVPPPAAPIPTQMPPVPSPSQPPSGKPVSAVKPTVAPPLAEPGAGKGLRSEHREKMNRMRQRIAQRLKEAQNTCAMLTTFNEIDMSNIQEMRARHKEAFLKKHNLKLGFMSAFVKASAFALQEQPVVNAVIDDTTKEVVYRDYIDISVAVATPRGLVVPVIRNVEAMNFADIERTITELGEKARKNELAIEDMDGGTFTISNGGVFGSLFGTPIINPPQSAILGMHGIFDRPVAIGGKVEVRPMMYVTYDHRLIDGREAVTFLRKIKAAVEDPRVLLLDL

SEQ ID NO: 353 - DNA, 24231 bp, Mus musculus
  misc_feature (1)...(24231): n = A,T,C or G
tgattgcaagccagagccgggagggttaacctttttccagaacatttatttcaccatctcactgactagagagggaggaggggctggcgggcgggcgggcgggcgggcgggagagcctgccgcgttgagaggctgcggatcacaaggccattctgatagcctcctgtccccatggcaactgcaacggcatttatcagttccttctgcgcacaggcaccgcaaatctgcattgcacatggcaggcttccagcatttcaaatgaaagagcactttgaacggctgccaagtttggaaggagcagaactgtcagggctgcttaaagctggcagtttatactggggaggttttcacttcccagaatcctccgggcttggcaagctgccaagtacttagcggaagctaaaaagtaactcgctccnnnnnnnnnnnnnnnnnnnnacacacacaccattcaccgcagtgctctcaaaattttccacatgtcctgtgtcaccagtgcagactgtacaataagaaccagaacaccgtctgtccacgatcgggcttttctcaataatggagggtttagagtaggttcagaccctgacagcgggttcccgctgtacctgccttaaccccataaccactggatggaaacgcatggcatgtgtgcctttcaaccttaaaaacaaaaaacaaaacgtgcattaataaaaaaaaaatagaaagcggcttcagaactagaaacaccctaagtactgggtggggtagagcatgggggcgggaggagggtgctgggtggacagaccggagctgcatggggtgtggagagtcttggaaacgaatacaaaacgtccacatccagcttttctaagccgtggggaagagggtggttactgagagctgaaccgtttctggccgctttcttggttctctcagacgtcatgatgaaagctcacaagctcgagatggggagggaattgggagatgatttttcaatgcaaagtttaccagataactttgaccctgcaccacccaagagcacccagagcacccgggcttctactggcagaaagtgggaaccgacacaatttttactgtgctaatttttttctttctttctttacatgaaaatctacactgagatcaagggcttgagctttatttcctgcacaaatagaacaaaaattgtctgccgcttaggcggttggatagagttcaggaaaactatgtctggcattaattccaaagtggaggttttggttcaagcgaggcccattaatttcagtaaactgttttcactggtccagaccctgctgtgtgagcactatttattaccttttgctaacctgatgtctgctgagttgcaaagcagaggggagggggaatccggggtggagatatctctatcttggatcaaatggctttgcaccttcccgttgggggtcatgtttaatagagagttctctaccctggcttttctttatcggagccttgacctccccccccccaaaaaaaaatccatcttgcaacgaattacagaaaaacaaatctgatggagagagatctggtgagtgcacatagccattccttccccatttcagaaaggcacatcccagtcccgggggatgtttttgtgcccgcccccccccctcccccaggctgcaggtccagggcaaagccctggcgtgattcaccctgacgattgggtctaaatccaccaagacagtcaattttggcattcgttctcccttaggaattttactagctgccttagaaaagcacataaattagtccccctccctcttctttttccatgccttcgccttcatccaccagcactcccccccccccccagtccatcttgatgtcatttcaaagagaaggatgaaaagagagaaaagaagggatttgtcaggcagtccagtctgtgagtatgtcttgccaggccccaacgcgcacgcgcgcgcgcgcgcgcgcacacacacacacacacacacaccagctgagaatgctaataagaattaaaagcaagtcagtactattaaagcatcaaatttgaagagttgaaagaggaggggggcttggagaaagagagggggtggggtggggtgggggagagggaatgggaacgaaatacaattgggtccttgaagctgagaaggaaagaggtgtcagtagccccatttggtctgcttgtcaaatgtcaaatgtcaaattcattggtctctctccttttaaactactccccctctcgcggccccgccccaacagtcaagttctgtgaggttcccaagtgtgattaatctttggcagaggccagaaacaggagtaggcttcttggctgcctgtcctgataaacaatctgttcttgggaagagtaggtgaaggggctgcgggaggtaatctgcgggcatgggagagagggtaggaatggggggggggggggcaccgcaaagcctgccctcagggagaaatgcaagtgcccctcctcccgcaccggtggtttaggggtaggtcaggtttcctgcccttaatagagtgggtagacagtggatcttttcttcctgccagttcctaatgtccagggcgcgccactgggccacggaaggcttaaaggagaagaagagagcaaaaccggtgcgcgccacacggtttcggaccatctacaaagctgtgctctaggcgcgacagcccatcccccagcgcgtgggcgcagaacctgctctcgatcaagggaaaccaaggcagtagcagagaatgccgagttggggcggccgctgtagagcttattataaagcataacgggggaagccagactgtgggcaaaacaaaaggagagactatttggcggagtcggaggtcgctgggatcgaaactcccgaggcaagaaagctggctgtggattttgcagcggggatattgtgtgagcaaccaggcagaaattggcaatatgtaaaagtgggaggggggagagagtgggcggaaaggcaaatcagtgcctagaaggctgcgcacggctgggaaatgtcaccaaggagagcgcagtggcaccgaataaaagatgaatgatagactaccttttggaaaacgaatataaaaatagtattgaaggtgagaagtccgcctcttcgctgaaaagcggatccattccgcactgcttgccttcaagccccgacatccaggcagctctaatctcccttgtatccaagaagtcagggccaggctcgctttccttcgggtttaattacacgaaaatgctgaacaaaaaccctgtaattacacccttagtccccgccactcaggccctgcgcacttcctgcctagttttgtttttttgatttttgttttgttttggttttttgttctctctttttttaatttttttaaaaagaggggtcattgcctctttctttgcaaattggccaaaacaaaaaaacctaaaggcactaaataaatctttaacactttaacagctttgtcttcatccacatccccacaaaacacacacacacacacacacacacacacacacacacacacacacacacacacacgggaggggaagcccttgtctctaggagagcccagaagaagggcccaagtgtgctatattgtcttgctcccgctcctaggctgagatgagaggcagtccttgcttattttgtctgtcacaccaacaaggtgctaggctggtcacctcgaggaaacctgccaaggaacaaagaatgtggaggacagggtgtagcaccaggcctgactttcctctttcacctggaagggttgagtgctggacgagatctgggtcaggactggcctttttacctgccctccaggcctccacattacagtcgggaactcgaagggatggtctgaaggcagaacataatttaggacggacaggtgagaaaccaaagctgaagagaacaaacagattgctgccggagtcagtcccactgctgcaggaagtcctgcacagtgttgctgcctcttccggctttggggggctactgcatcaggaaactaggacacctaggagcaatggaagctggctccattctgggctttagatacccagcactgagacagaaagtgctaagaaccaggcctgatcgtacagatctcttagtccacagccactgtggaaggcgaggcagaagaccacacgttcaaaacctgtgggctacagaatgggttcaggatgagcctagacaacgtataaggatccaatggaaacatgaaaaaagggctggagatagggcactactctgcgtgctccaggctctaggttttatccttggctagggggcagtgctctctaggtaaattattgactaactgaatagaaggcagggggctaatatgctacaaccctccaggctgcaggggcaggtgcatttcagtacacttaggtaaaagcaaaagggtattatgcctgggacgtaactttggggtctggaaagagacctttcccacaatgtgtttgttttccaatccatgtttcttattttcctccttcgccgccgacttggttcactgagttctttctcactcattttcctttcagtgctggggttccaaatcaaggccggccttgcacgggataggcaatgctttcccattcagctgcactctctagtcccagacacgtacattttaaaactgtcttgagggcaactgggcagcttcctcagcctttcagcctttgaggtcaagaacttcacattttcctctatcacccctgcctgcggccagggcacagaaatccgaaggagtgagagaaaggtgtctggggattgctgggaaagggtggctactcagtgatgctctgagctctatagtgattgattttttttaactccaagacaactggtgctcatttatacctcaccttgcagcctacagagacagtgggaccattaacctgtagagtcctgtgggcagaggatttttcttcttgtgtaagcttcctagatgaatctgggacccctaaagggcctgcttttgctaactctggatggactacctctggctcagcgtccctcacctgtacaaaggctgacgaaaataacattcacctcagaggcttgggcggagaacagtgagataatgtctggaaatgcacttttggagccctggacaaatgtcagttattggtaataatctctctcacattttattaaacatactataatacgctgtcatccgcacagaccaatgagacaggcaaaggaagtggagtaatagctccacttttactcagaacatgaagtgcaaatgatttgctcaaggtcagccaagtccaaggttaacagcataatgtaaatatgtaccaagtaccgcccctttttcttgctctccctccctccccctctctctgcccagtgagttccaggctgaactgctaagcacaggcaagcccatagacccatggacccaattcaaggaaagcaatgatggctgtcctgtaccagccttgacccaggaatggtgaggacctaggaggagctttctgctcgggagacctcactttctggctgtccaggcagaaaagtgcctgcggcaaaggctctggcttgtggaaatcccaggattattgtagactggtgggaacttccctttaaggcccagggctcctagaagtagagggccaaggggaggcacacctgtggtcttcatggccactgaccaccgcgacaggtcccgcctactcgaagccttccttcctctcaagtttccttgttgggggtttgaaaatttgttccaactgaatcagtgaatagcacccttgtctggatcttccaccctcttcctctaggcccgtttccctggacagctcatttcagactttttttttttttttttttttttttggaagtaagaaacacaccagcttttgcggggagctcctccaaaccctggcacgacagcaagaagaggatgccgggaggcaggaactagtctcgactaccccctcttctgcgcctttttttcccctccctggtctccgcccctccaggaagaaaacagcctgagaccggatcggtttttcggccactgtgccaaccccaacccctctgcccgcccgcccgcccgcccgcccttgccttctccccaatttctctctaagtgctcgacttgcccatgcgcccgaggctgggcaggtcttggcgggcggtgcaggctcagctccccagggcttctcagcgaatcacgttgttcctgggatttcatgctctagtggctcttgtgtaaccctatgccctggactaactcaatactttttttttttaataccaagattaatcctttagggaaaggcaaatacttccgccacggatccgactgaggagtaaatgtgtaaatcacacagcagcctccagcccccacagcccctttgccctgggggtttgcaaagctcaataaccggccgcacccctggggttcctggcgcaaggcgattcctagcctcgccaaggccaaaggagggcccagcccacaggtttgttttcaactactcttaagcggctcgcaggccaaagaacagggcactgcttactgtgtgttaccaaaaaaggcttttctctctgcggagcgcttggcggcgcgctttgcagcggggtgacgcgaggttcagcctcggcctggagagcctgcacgccaagagcacccctgaccccgccccatttgggttccaaactgagggggcctttgagggcgggccggagtcgccgggatgcatggaagtgctgaagatcctgacaacccttcacccgcctaacactaggcaatgttgctccgcaaaggccaagtggaaagctgaccttttgctctagtttagatcagtgttgtctgagctatcttagatggaaagctgagaagaaaacagctattaagatggaactttgcgcggggcgtgatggcccacgcctttaatcccagcactggggaggcagaggcaggcggaggatttctgagttcgaggtcagcctggtctataaaatgagttccaggacagccaggtctatacagagaaaccctgtctggaaaaaccaaaaaccaaaaccaaaaccaaaaaaaaaaaaaaaaaaaaaaaaaaaaaaaaggaactttgctttgtggggcttcgggctaacactttataccttgctctacaagtctctgtagttggttgtgcccccagaacctagcgccagagttgtgtctctgcttcccccacttctcacctcccttgattagtgcttcccaagagatcacagtactgctgcaagagcagaggaatgggcctccaaacactggagttctcacctccccaattgctgatgcatccacaaacagggctgtctgagacacgcggttaagaagcaatttatcaccaagaaagatggtgatactttttgaggggggatggagagctgtgatttttaaataaaaggatcatgagagcgtgggttgtgatgggattgtttaaatgcatgctgatgcgtagctgtgttcacaaataccttgttttggggtgtgtgtgtgtgtgtgtgtgtgtgtgtgtgtgtgtgtctttagtaaaaggagtcaagaagatggggacatatttgtgtgtgcacccaatgtaacactgtgacatggaactcagcttgctttctctagctgtctgtctgcagggctgtggctaagctgttatttctaaagtggttttggtttaataaagagaaagataaataatgtaaagaaatgggtcaaccagccaaggcaaagttcgggctggtagggatggactgttttcaccagggtagtggtggcatgaggaagggtgacttctaagggtgcagagacactcctgagcagctcgccacacagcactctgcttcaagccagccaggctaagttgattattgctctggagcacacagtgagctcactgttttttttttaaaacagaaactgggttgctctgagatgaaagcagctccctaagggctcttctccttctccttgcaagctctcccttccgttgcacttagaacccagaatgaagatcttgatgctgggaaaacgcccgaattgcttctggagatcaagtgtcaaaattaaagtatttcttgttgcttcaactgactgtaatagcggtcataagtaatgatcataatgcctcatgcaccttaatactgtcacaggttagccagtgacagtagcgagatcatcagcactagtgtctgactgtggcagtttcctgtgagtgcaatcatgaggtcttcatactgtttggtggttcatttatgcttcttcagtctgcacagcgacatcgtcacagcttctctatgtggaagaattcagtagtacagtctggagttggaccctaagggctcattatgaaggggcacttgcatagcactttatatacaaggttgtatgtaacaaaaaaatgggatgctgatagaaaatcttggccccctacatcatcatgtctgggagtcttagcttgtgtgcaccaccacctctcaaaccaaacttactggatttagatcccagaccagctgctgcaataacttcagactctctattgtcctagtctgcaaaatggaatggaacctactttgtataaggcattacaggtttaataacataaatacctctttatataatgtatctatattatagtgaaaacaataagctgaagcaaaggaattacttgcctagtacttatctttttacctgtctcagagtagtctgtcacaaacacaaggcacaaaatgaagtctccaacaacccatcaagctgagataattccattttgcagaaggaaagtattatataaacagagctcaaggttacaaagcccggggtagcaacagtgaagaaattccaacccggtaggcccaacccagccttatcaaatcccctcccccccaccaccagacttccacagggattatcttaatttacataagaaaaaagcaaactcaataaatagaaaaaccaagggaaatgctctggtcagagctcagaccaaccctatcagtttttacagtaagcaatgatgatgggagatgatcttagaagagcgagggaaatcgtgacctctccaagtgcgctggggcagtgtggaaagaaatcacaacacacagaaggaactttgaaaactgtctatgctttatttatgtatggttctaaggatggagctctgagcctgggtcattctgaacaagccctccctcggtctagcacccagtattgttaaatgcccccccacccccatcccctttatgaaacccagaaagccactcacctgtttggccaattccacactcccccttccctgccctccactgcagctgtattcagaaggtctctgagtgctcatagcttctttagacattcggtcaaaatatgttatagagttcggccagggagagggtggctcatttaacgcctttctctcaactccgcttccattcttaggctgagtcgcaaaagcaaatctaaaaaggtaatttctggaagattggggaaatgctaattctgcaggtgtttgggcaccaatggtggcaaggaatgtaatattaacaggggagggagctctcattgcagattaaataggtaatacctttatatgaaattcaaagtgaaactcgtcgaacagggcatttaattttacagcctggggctttggtggggtgggaaacggggaatcggaaacaacactcgtggctcttaaatgttttgttacttgggaaagcaaggcaggaaaaggaaaggtcatcgcctgtttcatcccgcctccccgccccgaaccccccctcctccccgcacccaaaccctggacttgcagctttagctcccggggcctcagctgtggtacacacaccgccgaagaggggggaggggaggagagggtggaggcgcggaggaggggccgacagggaggaatctgggcatgctgccgcgcatgcgtctttcgcgagcaacaagtgggctccacagacagaggaagtgtaaaggggggggtgggggactggtgcagagcatggcggtgacgtcagcgctccgcccgggcggcatcccgcgcggccaagccggggacagcgcgagccgcagcccgagcaggagcgctgagacgcgcctccggaacgtagagtaacaatcacaaccccacattccaggcgagcgagagcgggaagggatgcgacccgggtggaggcgccgagcgagcgccctgcagccaacgtgagcgccgccagcctctgtggccggagaggtgctcaggccagggggcggtgggagcctgcgtgcgtgcgctcctctcctctgctctcgtgtgtcttggaaacggtggccgcggcggccggctccctccggcgtgcaaacccagacgccgccagcgcaacggccgtcgctgcggaggggaaacgctcctctcttggcagccaccacctcctcccccggccctcccggggaatcagcggcttcagcaagattggacctgggcaccgggtggcacaaccttctaaccctctccccggggcgcctggcgtagagaggactcagatcgtagggggacccctccgcgcttccacgcttcaatcactccggggagggggccaagaggccactggcagccggccccggacaccgtagccccctccccccagacccggagctcgcagccctgatccgccgcaccaggaagaaggctcccggtgctcttctctggaccagacagccgcagtaggaggtgggggcgaggagcgtgcggaacccgtcggccgcctgggtggtggagcccccgccgagagagaggcactgctgcgccggctgtggagactcgcgctctctcctgccccaggggcagaactttctcgctcccctccgcccccctcccccgcagctggacttcttccccagccagctagtccnnnnnnnnnnnnnnnnnnnnnnnnnnnnnnnnnnnnnnnnnnnnnnnnnnnnnnnnnnnnnnnnnnnnnnnnnnnnnnnnnnnnnnnnnnnnnnnnnnnnnnnnnnnnnnnnnnnnnnnnnnnnnnnnnnnnnnnnnnnnnnnnnnnnnnnnnnnnnnnnnnnnnnnnnnnnnnnnacagtcttgctacctgtgcgacctgcctcgcatgccctgggccatgatctgggacttctccgaacccgtatgccgtggttgcgtcaattacgaaggcgccgaccgcatagaattcgtgatcgagacagcacgccagctgaagcgggctcacggttgcttccaagacggtcgctccccggggccgccgccgccagtcggggtcaagacggtggccttgtccgccaaggaagcggcagcagcagctgccgccgcacagcaacagcagcagcaacaacagcagcaacagcagcagctcaaccacgtcgatggttccaccaaacctgcagtgttggccgccccgtccggtctggagcgttatggcctgagcgcagcggccgccgcggctgccgccgccgctgcggtggaacaacgcagccggttcgagtatccgcctcctccggtgagtctggggagcagcagccacgccgcccggctgcccaacggcctgggaggtcctaacggcttccccaagccggcaccagaggaaggccccccggagctgaaccgccagagccccaactcatcctcagcagcaacatcggtggcttctcggcgtgggacgcatagtgggttggtgaccgggctgcccaacccgggtggtggcgggggacctcagctaaccgtgccccccaacctattgccgcagacgctgcttaacggcccggccagcgccgcggtgctgcctccgccccacgggttggggggaagccgagggcccccgactccagcacctccgggtgctcccgggggccccgcatgtctcgggggtcccccgggtgtgtcagccactgtatcctccgctccatcatcgacttcgtcgacggtggcagaggtgggcgtgggtgctgctggcaagaggcctggatcggtgtcgagcacggaccaggagcgtgagctaaaggagaagcagcgcaacgctgaggccttggcagagctgagcgagagcctgcgcaaccgcgcggaggagtgggccaacaagcccaagatggtccgcgacacgctgctcacgctggctggctgcacgccctacgaggtgcgcttcaagaaggaccactcgcttttgggtcgcgtctttgccttcgacgcggtctctaagccgggcatggactatgagctgaagctgttcattgagtatcccacgggctccggcaatgtgtactccagcgcgtctggggtggccaaacagatgtaccaggattgcatgaaggactttggccggggtctgtcctctggcttcaagtacctggagtacgagaagaagcacggctctggcgactggcgcctacttggggacctactgcctgaggctgtgcgcttcttcaaggagggcgtgcccggcgcggacatgctgccccagccctacctagatgctagctgtcccatgctacccacggcgctggtgagtctcagccgcgcccccagcgcacctccaggaactggagccttgccacccgcggcgcccacgggccggggtgcagcgtccagcctgcgcaaaaggaaggcatccccggagcctccagactcagctgaaagcgcactgaagctcggtgaggaacagcagaggcagcagtggatggcaaaccagagcgaggcgctgaagctcacgatgtccgcggggggctttgcggcgccgggacactcagcagggggaccacctccgccccctccacctctgggacctcattccaatcggaccaccccgccggagtcagccccccagaacggtccgtcccccatggctgccctcatgtcggtagcagacactttgggcacagctcattcgcccaaggacggcagttcagtgcactcgaccactgcatctgctaggcgaaacagcagcagcccggtgtcacccgcctccgtgccgggccagcgtcgcctggcatcacgcaatggggacctgaatttacaggtggcgcccccgccgcctagcgcccacccgggcatggaccaagtacacccccaaaacattccggattcccctatggccaacagcggacccctctgctgtaccatttgccacgaacgtttggaggacacgcatttcgttcagtgtccgtctgtccctagccacaaattttgtttcccttgttctagagagagtatcaaggcccagggggccacaggtgaggtgtattgccccagcggagagaaatgccccctagtcgggtctaatgtaccttgggccttcatgcagggcgaaattgcaactatcttagctggggatgttaaagtgaaaaaagagagagacccttgaaccgcagggcagcgacctcctttgccctagaccacctcctcttcaatctagagggcccttcccccacctgcctccacctcccctatccaccaagatgtagaattgtgaatataactgcaaaaagttagtcttatgtatagacattattttcgtcgtatgtttctatattttgaaacaggtatgtaacttcttcatttgaaggataagctggtttgtgttaagcagtataatattgattgggtctttcgcatcatattcgttagcatttatttggtggcagaatgtttgcctaggtacagaattaatagcccttagcaacgactgctgctggtgtgtatttttgtaaatgttatgcactctgaaaggaaaacacacaaaagaagagattttgtcgttttttgttttgccaaggccagtgttgctgcctaaaaaaaaaaataaaataaaatacaaaaatacaaaaaaacattgatactataaaatggtaaaaagcgtcttctttctaaacagccccagtgttgaagtctatacttaattttgttctgttctgttttgttttcctgttttgtttgcaaaatggtaaggggggtgttgggaggggatgggtggtttgtttggtttttttttttttgttgcaagtttgtgaagggggaaaatgttttgatttgtttctactgacctgaatgtgttggatcttcacgtgtcgttttgttttggctttattgatgcacggatgcttttgaacagtagagcgaaatgctagacatggagaacttgctctgtttgtcctttctacatttctgtagttaacagaacactgtaatgtgccttgcagcttagtaacttgtaataaattcaattgatattaattctgccctgagtcagcaaatttgtctttctagggttgaagctatgctactccaattaaggggggacaactgtttacctcctacttggatggaacctggcatcctggttccttggaaggctcttgagcaggctgccccaccccctgggtaccagactgtttacatttacctcccctgtaatctacagttgctgactaagcgatttctgtttactcttaagcatctttacccaaccccccatacaggacccagctgcaaaaaaaaaaaaaaaaaaaaaaaaaaaaattgtcaggaatgctctttggtgtctttccccggagcgatgagtagatcctggtacccagtgcagctgtgacttaacaagtgggaacagaagggagtttattttgcctctacaggcaaggcagaattttctgtccttgcacacttaaaacaaaaggtgtctggctgggctttgcctcctgtgtgtagatgaaaatgtgaccagccagcttcctgcatctcctgccattgatgtgtcccttaactgctccaatttctaagctgccatcatggactatccctctggaactatagactaaaataaacccttttcttcaaaatttaaaaaaaaaaaaagcctaggtaggagtgggggcagggaagggtgtgagcatctgggaggcaaatgcacgttgattgcaaagcggttttcacctcattcattatatcccaccccttaatgagtgtttcttaagtcaggacacagctgatcagagcagacttgggggatgggggaaagggaaagaaaagcaaaggttgcttaggtaccaaatggaatccatttcactggcaaagaaacacaactatcaactttgttgctgagcatggtggggtggggaaagtacagaagtagcgaaggcatcctctggagctcagaagccccagcaggcaccagacaagcctttcatctagctagagcaaggcaaacagtcctggtttgaaccttgtcctttcctggaggcaacagaggactagaaaacagaaaggaagcacaacaacaggggtgatctgatctgaaattaattcctagccactccccattcctggctgggagaacggacccaatctggattgcctgtccttgttggaggaaatgatctccctaaggaggagtctgagagcaggaaggtgggaatgggtggcaggaggaaataaaccgtgggatggtcctgaacaccagcactatggaggtttgattgagtcgggatttgcagttaatataccctttggatttctgtccctgcttggccaccatattgaagtggaacccagaaccccggtgtgcctgtatgggtgtgtatgtttgggaatgggaatctgtggtgctcttgatggttctgcagcatgaaacatgggaggtgcctggctcacctctaagaatctccttacatataatataaatagatgttcattcctgtcggctccctgcaaatgtgtccttgcgttttcatctgttgccaagtgttgtattggtgcttatgagtcatgaaacctattttcatcctccagggtaattaacttggtgtcggtaatgcatcgtagactgtaggaagagttaattctaaaacgcatcctggaccagcaaccaatcacttaaaggtctgggctggcttttcttacagcctcattaataaaaacctgagcaggtttcgcctggaagattcttcaaggtgctcccaacccccacaccaaatgtacatgctcttgaaatgggtgaatctaagagggaaaagcccttcctcccccatcaaccaggatgtgaggattgccagtctgggtgtgaacgctgtgagtagtgtctgtcctgttacctacctgtgcacacacaggctcccttctgcctgccactctgtcttcgttgctttggtattatgtccaggaacttttagaattacaaagcccttgattactagtacatatgggcaagcggcctgtcattaagagctgcgaacagtgttgttttctccccctgttgttgctgggtgctattattaggagaagcagcagctggagtaacgaagcatcgagccgaggatcctgggttggtttcacttaaggaagcctgacttgaccagactcagcagagagctgtaaaccggaggaagcactcaagaggtcagggcagaactctggctgccagtgaatcatacataactggtgcagttaatttaagtttacaatagccgtgggctgcttgttaaatggtagctctcttggggcggggcatgatgagtgataagacccttctctttgctggaattgttcagcacccagtgtggttgtcttaactagtctctatttggttctcaggttggttctcccttccctgaaggggtccacactggacacctaggaagcattttccttctctggccctagggattatggtgtatttcagagactcacagccaagcgtctagctgactgactgtaagctccctttatccctgcgttacttgggcgtatccctactccaggtactcatccatctcactttggtctcagaaccatagacagtggcccccatttacagtctatactgtattatttgtatgccttacctgtgagtctaatacaaccttaatgattccttaagtgaatttggggtggaaccatgaaaatgtaacagcttttggaagaataagctggtgggtagataaagccatttttgatactgaaggcaataccatggaagatctatctgcgggaaagctcataatttcaaactcttaatagtaaaattccagctgggcagtggtggcacatgcctttaatcccagcactagggaggcagaggcaggtggatttctgagttcaaggccagcctggtctacagagtgagttccaggacagccagggctacacagagaaaccctgtctcaacaaacaaacaaacaaacaaacaaacaaacaaaaaaataaaattccagatagtccagatacattctcccacgtatccaggactggtgataaaatgagattcagtatttgaatagtttggaccatcccaggtagccaatgctgacttcgaactttcgatactggactataggaatgagcccccaggcccagctttctgaaattcacttttgtttcttcctaaacctcatcaagaacaggaagttggacatgggaatgaccctaaggcctagtgaaaacccgtttatttgacaagcctttatttggtgattgacccctacggctccatcaatggaaccctgtgctctaccgcagagttatagccttagcaccttctttactctttattttgagacagggaactcactaaattggatgagccaatcatgctttgttttgcttttcaagagctcgctttatagaccatgctgtcctcaaagtcacagagatccacctgcctctgcctcccaagtgcttggattaaaggcatgtgccaccactccctgacttcaaacatttttccccccagggtttcactttgtagttgacccggctggcttggaatttgctgtagatgagactggccttgaactctgagggactgacctatctctatttcctgggattaggagtgcaccatcacgcccagcatgactatttctaaagggatgtaggaacagctacagtccatctatggaacttgagtttagaactcaggcctgtgggtgatccggcttttaaactcaaggcagggagaagagatacaacttacctgtggttacagagtggcagagactgaactagattcccatttggaaacagccttagtagacactaaagttaaaaccaactaaccacctgacagtggtggtgcctgcctttaatcccaggatttgggaggcagaggcaggcggatttctcagtttgaggccgcctggactacagagttccaggagagccagtgttatacagagaaaccctgtcttgaaaaacaaaacaaaacaaaaaccaactaaccaacagtccaaatcctctaaagattcttggtttaactacatttgtctaccaaaaggaaggacaatcaatggtgagcaaagtccccagggagtggggcacactgtcttcattaactcttggaagatggcaagcatcattagtctcttggtttttggtcataccttagcaacgtttctagttttctgactataaatgtcaggcaggattgaattgtaaagtcttttcttaacctttcatctctgtaacgccacacctcctccccatttgctaattggaaacttctggaggtttaaagacagacaatggactgcaaacccaactagggacaaccatctgggcgagcaaggaagagagggtgggggagggagagacactggtgactctttcttactctctcaagcttaggggttcttggctctctccttatcatctcttcttgcctggctgattctcccactgcaaagagggaactgaaagagacagtaacaaaccaggctccaggtagaacgaaacacactgagtggccaaccttcaggcgattctgagaggaagatgtgtcatcctgttttatgcggagatcaactgaacacagaaagactgaattaccccgagttcaagcccaggttggcctagatcctgcactcttctgatatcggtttttctgcaccttttagttctgaccttctgacccctggaagccaaggctctgagcatgagtcccagccattcccacggctttcttcccgggtttcagtgtaagccttagagccagcttcaggaagactggaggtgatgcactctcccagcaaggtgcaaggttcagttggggtcctgaagcaatgctgttttcctggagtctccctccattgcctcctactgtgatgtctgataaaatagagatgggcagggagcagatgatctggctccactctaatggctattgctcctgtgagggtcatcaactccgctgaccaactcgatccctgacattttcaattgtgttagtgggaaattggcgcatttattcttggacctggtttggtcattctcccttgttagtggacctcagaaatgcatccatgagcaggacagtccctgttctgatggtcctgagaaagctcacctttttctaagagctgttagctgtgagtctttagtttagacactactagagagacatgcccgagcctcctcactgatctcctcatggctctgtttggtctctccctacttcaagccttgattttgtggcaatgaatccttttccacatgaatatatcaccccttgcttagaacgacccttaagactggacatatagcacatgcctgtaatgccagaatttgggaagtagaggcaggaaaatctggagttcaaggtgaccctttgctatatagcactttatcatgggctataaaagaccctggaggggtggtgtatataattcagttagtaaagtgcttgtttagtatgaaggaggccctgggtttctgaataaagccacatatgatgatgagagcctgtaatctaagcatttaggaggtagaggaagattaaagtttagtgtcattttggctaaccctggaattcaaaaccatcttgggctacctaaagcttaatctcagtaaaagtaaataaaactaaagtagaaagttttgctgtttgtttgttttttaggaaaaggaaaagaagacatctcccttggctataatccaatcctgggcacatggaccaagcgtcctgataacaagaggcggttttgttgttttgttttgtttgctgttgttgttggtggtggtggtggtttttctaaacagggtttctctgtagccctggccattctgaaactcataggccgggctggtatcaaactcagcaatccccctgcctctgcctccctagggctgggattaagggtgtttgccaccacctcctagctgagtgttgtaatttttaagaaagaattaaagggtgtctcagtggtcaagaacacttattgttcttccagaagactcaagttctgctcctagcacctgcacagtgacttacatgcatctctatctcaaggtctagggagtctgacaccttctgccatcctcaggcacgcacatggtgcacatacaaacacgcaggcaaaacactcaactaaaagttactacatgcctttgatccctgcacacagtgaatcttagatgaggccattctactggagatctaacctagagataccttacacaagcaagcaagcaaaaaatgcaccacacttatttatattaagaaaagaaaatattattcccggcacttgggaggcagaagcaggcagatctctgtgagtttgatgtctgtctggtctacagagtgagttccagatcagcaaggactacatagagaccctgtctcaaaagactgagaaagagagagacagagtgacagagacagacagagagagacacagatagacagacagacagacaccatggggggggggggaattacagagctactcagaagaaagaaggctcttctccttttgttctacatcttcagctctccacagaaggcatcacagtgcagtcatgtgtgagggccttcatcagtgctcaaagaagctgagatctataccacagctgtcctgggggttagcacataccagagacaaggagaacagtataggataaagacctgatcttgggtcacagaggcttgctacctgaacctggggagtccacatcccctcagcaagggttagcttatattcttttttttttttttttttggttttttggttttttgagacatggtttctctgtatagtcctggctgtcctggaactcactttgtagaccaggctggtctcaaactcagaaatccgcctacctctgcctcccaagtgctgggattaaaggcgtgcaccaccatgcccggcttcgtttatattctttataaagttctggacaaaaggccagtgtgagctgggagtggtggctatatggtagcttgagtgttctttggaagggatggccagcaacaaggcatggagcaggccaggtatcccctgcaatgttccagagccccccacccccaccctactacccagcagctggcagaattgtaccccaggggactacctgaagagcttggctgaaaggaaagagggcaggaagagggcagggaaggggtataggttaggggtagagagcttgtctagcaagcgcacgagccttgaattctacccttagcaccaataaataaatatgtagataaataagcaaaaaaatgtatgacattttattaactaagattatcagcttatgaattgactcttgatgtttactgtcattattactatgtagatttttttgttttgttttgttttgtttttgttttgtttgtttttcgagacagggtttctttgtatagccctggctgtcctggaactcactctgtagaccaggctgaccttgaactcagaaatctgcctgcctctgcctcccaagtgctgggatgaaaggcatgtgccaccactgccctgcactatgaggattcttatttggggaactagatgagattggtagtcaggaaagacatactataaacaaatgaaagaataataaataaaaatatataacagggcatgctaggagtggtagtatatgcttgaattctaagcacttgggaggcaggaggatcaagaattcagggtcagcctcagctccatagaaagtccaaagccagtctgggtttaatgtgacaactcgtttcaagaacaagaaagaatctaatgtaacccgcagtggaataacactgtcatgtgtaatttctccattattacgactcatctttgaggttggcagtgatagtgttctccacagaaaaacatccctagtaggtcttgtcagtgcctctccctccttcccgaggctcaccctcactcctttctgacagcctcctctagttttgctccctagcctagctccccagtcttccagggagccaggggttttggttgtgaggagaattggaacacttgaagtcccatgccagggcccaggctctggaccacctgtagctctagcagccccaggaggcctggccacagctgagaacaggtttgggtggctggtggtgcctgcagtgctgatggccaacgctctgggagaggcggctgtggaatgctggccctgtagacctgaaggaattaactcaatgccctgggcctcagcccagactgtcatgtgactacctcccacaagctcccctacccctaacctcttgtcttcctggagtctaagcttggggcactactggtcttggatcagagcccgatggcagctgaccactccttggggagtggccgacagtctcactagttcactcttggtggggtccgggtggagttctggaaatattgttgcagggtgataaagggcggtggctgggagcatctccaaggtagaagaggaagggggcggatagggagtcaaagaagcagcagcagggagtggtagtcctccacttcaccagccccctgctaggaagcagcctctttggttccaagccttggctgcccagctgggcctccagacagtgtctgggaaagaggcctgggagagacaaagccaccctagggcaagaagccagtaccaaccacttctggtaggcctcagggaccaggtccccccccccccccagtcttgtgactcccacctgtcctcagatcccaccaatcttgtgcaggcaaaagtaggggtgagcatgtctacctactgcttcggcctctagccactggggcaagagggccttgcaggcaatcaccatttccttctttgttctgtacaggtcaggtcaagcccttgtcactggaaaccagctcagtcaggacctgtggcttcccttcaactcctgccccacctgctgctgaggcctgttcccaggctttctccttccacgctgtggttgatggcctggaacagggctggggtcccttaagatggcagaggtggccctctgagcagacagtgagagtgtgcacagcccagacagtagcttctgctctaatcccctcccacactctcagtcctccaacactcaactgttggtagatgtctgagttcaaattctggctctgctatcagctctgagcaagctacagatctcttccgggaccttagcatcttcctttgggactgatattgtctccttaaaacagtgtgggtgaaaaaaggaaagttgatgctcactgccagtctaggatccggggctgccagtggcgattagccatgacttttcatttgttggttcagggtgtgtttgtgtgtgtgtgtgtgtgtgtgtgtgtgtgtgtgtgtgtgtgtgtaggaataaggatgggaggtcaggaaggggggtggtgctaagctggagaaattactcagtggtttagaacacttgctgcctagcaagaggacagggtttgggttccaagcaccaagtatggtggctcacaatggtctgtaactccaggtcccggggttctaatgccctcttctggcctcctcaggcactgcatgcatgtggtacacatacacgcaggtaaaatgctcatgcatataaaataaaaatcaacaaagagaagctggcatgatggtgcacacgtttaatcccaggattctggcagcagaggcaggtggggttttttctaagtttgagactactctggtctacatagttagttccagggcagtccaaattacatagaaagaccatgtcctgggctggaaagatggcttagcgggtaagagcactgactgctcttccaaaggtgctgagttcaagttccagcaaccacatggtggctcataaccatccttaatgagatctgatgtcttcttccggtgcttctgaagacagctacagcgtacttacttataataataaataaataaatctttgggcctgagcgagcagagttgaccggaatgagtggggttgactggatcgagcagaggtcctgaaattcaattcccaaccacatgaaggctcacaa

SEQ ID NO: 354 - DNA, 3033 bp, Mus musculus
atggcggtgacgtcagcgctccgcccgggcggcatcccgcgcggccaagccggggacagcgcgagccgcagcccgagcaggagcgctgagacgcgcctccggaacgtagaacccggagctcgcagccctgatccgccgcaccaggaagaaggctcccggtgctcttctctggaccagacagccgcagtaggagtgttggccgccccgtccggtctggagcgttatggcctgagcgcagcggccgccgcggctgccgccgccgctgcggtggaacaacgcagccggttcgagtatccgcctcctccggtgagtctggggagcagcagccacgccgcccggctgcccaacggcctgggaggtcctaacggcttccccaagccggcaccagaggaaggccccccggagctgaaccgccagagccccaactcatcctcagcagcaacatcggtggcttctcggcgtgggacgcatagtgggttggtgaccgggctgcccaacccgggtggtggcgggggacctcagctaaccgtgccccccaacctattgccgcagacgctgcttaacggcccggccagcgccgcggtgctgcctccgccccacgggttggggggaagccgagggcccccgactccagcacctccgggtgctcccgggggccccgcatgtctcgggggtcccccgggtgtgtcagccactgtatcctccgctccatcatcgacttcgtcgacggtggcagaggtgggcgtgggtgctgctggcaagaggcctggatcggtgtcgagcacggaccaggagcgtgagctaaaggagaagcagcgcaacgctgaggccttggcagagctgagcgagagcctgcgcaaccgcgcggaggagtgggccaacaagcccaagatggtccgcgacacgctgctcacgctggctggctgcacgccctacgaggtgcgcttcaagaaggaccactcgcttttgggtcgcgtctttgccttcgacgcggtctctaagccgggcatggactatgagctgaagctgttcattgagtatcccacgggctccggcaatgtgtactccagcgcgtctggggtggccaaacagatgtaccaggattgcatgaaggactttggccggggtctgtcctctggcttcaagtacctggagtacgagaagaagcacggctctggcgactggcgcctacttggggacctactgcctgaggctgtgcgcttcttcaaggagggcgtgcccggcgcggacatgctgccccagccctacctagatgctagctgtcccatgctacccacggcgctggtgagtctcagccgcgcccccagcgcacctccaggaactggagccttgccacccgcggcgcccacgggccggggtgcagcgtccagcctgcgcaaaaggaaggcatccccggagcctccagactcagctgaaagcgcactgaagctcggtgaggaacagcagaggcagcagtggatggcaaaccagagcgaggcgctgaagctcacgatgtccgcggggggctttgcggcgccgggacactcagcagggggaccacctccgccccctccacctctgggacctcattccaatcggaccaccccgccggagtcagccccccagaacggtccgtcccccatggctgccctcatgtcggtagcagacactttgggcacagctcattcgcccaaggacggcagttcagtgcactcgaccactgcatctgctaggcgaaacagcagcagcccggtgtcacccgcctccgtgccgggccagcgtcgcctggcatcacgcaatggggacctgaatttacaggtggcgcccccgccgcctagcgcccacccgggcatggaccaagtacacccccaaaacattccggattcccctatggccaacagcggacccctctgctgtaccatttgccacgaacgtttggaggacacgcatttcgttcagtgtccgtctgtccctagccacaaattttgtttcccttgttctagagagagtatcaaggcccagggggccacaggtgaggtgtattgccccagcggagagaaatgccccctagtcgggtctaatgtaccttgggccttcatgcagggcgaaattgcaactatcttagctggggatgttaaagtgaaaaaagagagagacccttgaaccgcagggcagcgacctcctttgccctagaccacctcctcttcaatctagagggcccttcccccacctgcctccacctcccctatccaccaagatgtagaattgtgaatataactgcaaaaagttagtcttatgtatagacattattttcgtcgtatgtttctatattttgaaacaggtatgtaacttcttcatttgaaggataagctggtttgtgttaagcagtataatattgattgggtctttcgcatcatattcgttagcatttatttggtggcagaatgtttgcctaggtacagaattaatagcccttagcaacgactgctgctggtgtgtatttttgtaaatgttatgcactctgaaaggaaaacacacaaaagaagagattttgtcgttttttgttttgccaaggccagtgttgctgcctaaaaaaaaaaataaaataaaatacaaaaatacaaaaaaacattgatactataaaatggtaaaaagcgtcttctttctaaacagccccagtgttgaagtctatacttaattttgttctgttctgttttgttttcctgttttgtttgcaaaatggtaaggggggtgttgggaggggatgggtggtttgtttggtttttttttttttgttgcaagtttgtgaagggggaaaatgttttgatttgtttctactgacctgaatgtgttggatcttcacgtgtcgttttgttttggctttattgatgcacggatgcttttgaacagtagagcgaaatgctagacatggagaacttgctctgtttgtcctttctacatttctgtagttaacagaacactgtaatgtgccttgcagcttagtaacttgtaataaattcaattgatattaat

SEQ ID NO: 355 - protein, 716 aa, Mus musculus
MAVTSALRPGGIPRGQAGDSASRSPSRSAETRLRNVEPGARSPDPPHQEEGSRCSSLDQTAAVGVLAAPSGLERYGLSAAAAAAAAAAAVEQRSRFEYPPPPVSLGSSSHAARLPNGLGGPNGFPKPAPEEGPPELNRQSPNSSSAATSVASRRGTHSGLVTGLPNPGGGGGPQLTVPPNLLPQTLLNGPASAAVLPPPHGLGGSRGPPTPAPPGAPGGPACLGGPPGVSATVSSAPSSTSSTVAEVGVGAAGKRPGSVSSTDQERELKEKQRNAEAELSESLRNRAEEWANKPKMVRDTLLTLAGCTPYEVRFKKDHSLLGRVFAFDAVSKPGMDYELKLFIEYPTGSGNVYSSASGVAKQMYQDCMKDFGRGLSSGFKYLEYEKKHGSGDWRLLGDLLPEAVRFFKEGVPGADMLPQPYLDASCPMLPTALVSLSRAPSAPPGTGALPPAAPTGRGAASSLRKRKDEPPDSAESALKLGEEQQRQQWMANQSEALKLTMSAGGFAAPGHSAGGPPPPPPPLGPHSNRTTPPESAPQNGPSPMAALMSVADTLGTAHSPKDGSSVHSTTASARRNSSSPVSPASVPGQRRLASRNGDLNLQVAPPPPSAHPGMDQVHPQNIPDSPMANSGPLCCTICHERLEDTHFVQCPSVPSHKFCFPCSRESIKAQGATGEVYCPSGEKCPLVGSNVPWAFMQGEIATILAGDVKVKKERDP

SEQ ID NO: 356 - DNA, 23473 bp, Homo sapiens
ccaggtgcgcttgtgcacagactgcttgtcccaaaaggaaaccgaggcaaccacgggggaggctgggtagggatggtggtggtaagaagtattttaaagcggaacaaggaaagccagaagatgtttaaaacaaaaggagagactattgttcagcgtcggaggtcgctgggatggaagctgtaggcaagaaagctggctgcggattttgcagtgggtttattgtgtgggcaaccaggcagaaagcgggaatatgaaaaagtggggagggggagagttggcgtgaaggaaaatcagtgcctagaaagctgtgcacgctgaaaatgtcaccaaggagagggcagtggcaccgaataaaagatgaataatcggctaccttttggaaaaagcaatgtaaaaatattaataaaggcgagaagcccgcttcttctcagcctgaaaagcaaatccatttctcacctcctgcctctcctccccatcccaacacacacaaaacacacacatacacacagctcttctctgccctgcatccaagaagcctcggctaggctcgctttcctttggatttaattactcgaaaatgctgaacaaaaacctgtaattacacccttagtccctgccactcaggcccagtacacttcctgcctagttttgttttttaaagaagaggtcattgcctcttttctttccaaattggccaaaacaaaaaaaaaaagtaaaagccctaaataaatccaactgctccgagcttcactgccaccaccagggatttggggaggggatatccttgtctctctaggagagatgagaaacaaacagcctaaccttgctattgtctttctccagcttttaggcctaaagcttgtcattgcttgtttgtctgccagcccagaaggacatggacatgctagattggccccccaggaggaggccctccaagggcaagatgaagagagtggacagggcttagcggcaggcctggctttccacccattttacctcgaagggcttagcgctggaaaaaagatttgtcacagtgtctcgcctttctacagccctaggcattaacatacagaatttcatagcaaacccctgaagtagggagaacaggttttaatatcaacctttgacaggtgaagaaatggagtcccagagagaataaatagattgctctaagtcagtcatgtggctggtgggagtattgaaaaagctctgcctcttatgacttttgggctattgcatcaggaaagtaggacacctaggaggaaatggaagcttctagattctgggctacagccagtctggcttggttcatccagcactgagatagaaagtgttccctaaataaatagttgaataactgaatgaatggtaaatggaagggcactggttagggagttggggaacagaaacccaccaggccatctggtagccaagtttcagcttcgaaacaaaatgtaagtactgagaatagtttcacaccagggacctatcaagcttactcttctgtgtacggccagagaggggagttcaggttaaagtatggtggtcctctacatgtgttggaggggtcactttgtttccgggctttcttgctccagtgatgcctaggccagatttgatgtcagagctatacacctacccttggctagaagtgcttttttttttttctcttaagagatgaaggctgggtgcggtggctcacacctgtaatctcagcactttgggaggctgaggtagattacctgaggtctggagttcgagaccagcctggcaaacatggtgaaaccccatgaaacaatatatacaaaaattagccaggcatggtggcaggcacctgtaatcccagctacttgggaggccgagacaggagaatcgcttgaacccaggaggtggaggttgcagtgagccgagattgcgccactgcactccagcctgggcgtagagtgagactccatctcaaaaaaaaaggtcttgctctgtcacccagggtggaatagtggaatgcagtggtgtgatcatagttcactgcagtcttgaactactcctgggctcaagtgatcctccacacctcagcctcccaagtagctggcactacaggtgtgcacaactgcactgcacctggtggccagaagtgctttgaggactgtagcctgccacaatcatgtggcccctagcctaaggacaggacagtacatgttgggtgagtgtctatacagctggtgtgacccgtataaggtggcgcacgttacttatgtgatatgacttttgggtatgagaagaggctccttccactataaaatgcactctcttcattttcctccttgtttattgttcagcctggggtctttctcaagagtgcacaatgaaaatgctgctgtccttggtaagggtatctcagtaaattcctaaatgcttcagtgagttctagaacttcagattttcctccatcacctctgccaaggaccggggtatagaaaaggcaggaagagaccagatgcggtggtaatccctgtactttgggaggctgaggtgagagaactgcctgagcccagaagagacaggcctgggcaacatagtgagatccccgtgtctacaaaaaataaaaaactaagctaggtatggggtggtgcatgcctgtagtcccagctactcctaaggctgaggtgagagaccgtaccactgcactccagcatgggtgagaccctgtctcaaaataaataaataacatgtttttgtttttgttttggcaggggctgagcgcagttgctcacgcctgtaatcttagcactttgggaggcccaagcaggtggattgctggagtccaggagtttgagaccagcctgggcaacatggcaaaatcccatctctctctttttttttaatactaaaaataaaaaaaaataaaaaatgagctaggcgtgatggcacacacctgtagtcccatctacttgggaggctgaggtgggagaatcatctgagccagggaggttgaggctgtatgggctgagatggcaccacggcactcagcctgggcaactgaagtgagactttctccaaaaaaaaaaaaaaaaaagaaaaagaaagaaagtaaaagaaaaaaaaaggcaggaagaaagagaatggttttacaggatgccaggaaagcataactactcaattttgcttcaaagctggatagtgattttaactccaaaataacctgtgctaatttatgtataaccttgcatctactgggacatgaacctgtaaactccaatggggagagaggttttaatttcttgcagtttctgaggagcatctgagaccctcaaaaaggtatagcaacaggcggggtgaaagaagaaatgcgttttacagccagggaacctggtttccagtaattctggacttggctttcctcacctatacaggaggttgatgaaagtaacacctacttcacagggttgatgtagggattggtgaaataatgtctgggaatgctcttccgagccctagacaaatgttggtcattgtattgttaataatttcttacattttattaagcacattacattgtcttccacacagatcaacgaggcaggcaaaggaagcagtgtaactttttcccattttacggatgaagaaaccgaaattcaagagatttgctcaagtttacacagctgtttagggtcagccaagtccaagttaaacaacataatgtaaatatgtacccaaatgctaagcgccctcccttcctccctctctcctgagtttcgggttgaactactcagctcacgcaagccaaaatatttgaagatcctggcccatccatcccaaccaggcacagcagtgacagctgccccatgtaccagacctgaccgagggatggcgaggctgcagggaggggcttcccgctctgaggccccgccttctggtggccccagcaggaaagcgccggcggcaacgggtctccgtagccggacggtggaaatccccaggtcggtgtgggccagtgggaactggctggcactcctactccctgctgaggcccaggcgcgcgcccggcggggtggagggtccgggggtatgcgcacctgtggcctggtcggccgccctgccagctttctgcctattcttgccgtccaaggcttccttcctctccaacccccctttttggggtgtgggtatttgttttaacccaaccaggtcagtgaatagcatccttgtctggctcttccctcttttttttttttacctctaggcctggtacctgggcggctcattccagggttcctttatttttggacctaaaaaaaccacaccagcttttgctgaggacagcgctgggctcccccatcctggcacgcgggcaaagagaggaagcggggaggaggcaggaaccagacgcgactccccccgcctttcttcccctccctgttccccgcccctccaggaagaaatcagtcagagatccatcgctcgctgtggccactgtgcctgcactaaacactacgcccgctctccttttccttccacccgattttgcacggagagcccggctgcccgcgcgccccaggctgggcaggtcctggcaggcggtgcaggctttcctcccccggggcttctcagcgaatcacgttgttcctgggatttcatgctcgagtggctcttgcgtaaccctacgccctggcctaagttaatacttttttttttttttttttcaaataccgggattactcctttagggaaaggcaaatacttccgccacggaatgggcctgggagtaaatctgtaaatcatcttgctgtctcccttcccccaccctccccagcccctttgctcgtctctacaggcccagggctcaaactgcgcctctggggttcctggcgcgcggcgatcaggggccatcgaaaggccagaggagggcccaacgcagacgtttgttttcatcttctccaaggcggatctcgcaggccagagaagtgggtcccgcttaccgcggggctgttaccaaaaaaggcctttctctcgctggagcgcttggcggcgcgcgttgcagcagggtgacgcgaggttcagcccgggcctccttgaaggttgagccagctgactgcagggctgccaggccaagagccccccctccgcaacacacacacacacccgcgccccgtctctgccacaaaacggcgggggcaggagagagagtgcagggagcttcgaagtgcgcgcctggcgaccttctcaccactagtaaccttgggctatggtgctccggcaaggccaggtggaaagctgaccttttgctccagtttagagcagggttctctgaggatgccagcccagatggcaagctgggtggggaaagcgacagtaggaaggaactttgggaagatgatgccgccgtttggcgcccggctctgctagtctctgcttgtctcccagaccccatggacagagttctttgagtctctacacctggcagtttacgttgaggctcctccacctccaccacccccctcccaaatcctttccagttcctttccaccgttgtcatagttttgttccacgggactcttcttcagggagaaaacccacctccagaacactggagttctagcctctcaccgtctctcacacatccccaaacggccatctcaggcaacaagagataccacaaatgatgttgattcttttttttggttgggggggggggggcggtttggagacagctgtgttttataaatgaaaggattatgagtctgtaatggaagtctgtttaaatacacgttgatttctaactcagtgtgtctgaaggcaccccagcatgtatgtgtgtatatatatctcctttagtaacagtgaagacagagacagacagggagatggagacatatgtgtgtgcataccaaacataacaccatgacatagaatccaacttgctttctctagcagcctggctggagggttgtggctaagttgctatttccctaatatttttggtttaataaagggaagggctgaataaatattaatgtaaagaaatgggtcacccaaccgagccaaagctaaggagccccaggctggcggggatgtcaaaccatttcccacccctatgttttgactcactccagggtagcggtagtgtggggagggctgaagtctgggagagtgaggcaatgctccccaagcaactctttgcagaggaatcactgcaaagtgccagcaggccagagaaagtttattattgctctagagtgcacagtgagctcactgttttgcaaaaacagaaatctggctgctttgagatgaaagaggggctccctagggctcctcctcctcttctgtccttaaaaactcgcctttcctttgcactcaggggccccagaatgagtgggagattggggctctggggagtgttggataggggaacaggctctggaagtcaagtgtcaaaataaaagtaagtatctcttgttgcttccactgaactttattgcaattactagtaataagagtgataatagtgatcctcacaatttatgcagtttactaagtactgtcacatgtcaaccagcaatagtaccaacactagtatcaatactaataataactaacactaactgtgagtccaacactgctctccattctgtatggtgtatttaagttacagtctggtagtgacagatctacaacttctgtatatagaactcagtggtacaaatgcgcttggaaggggaggctgggggttggttatgaaggtgtattggcatagtacttacgtaagattgtatgtaacaccaaatcaactggggctgatgggaattttgagcaccccaaaccacctctgcaagcctgagcttgtcaaagacacctcaaatcagatttactggattcaaatcccagccccatcactaatggctgtaggcaagttatatagcctctttactttcctggtttgtaaaatggaggtaaaagaatctaccctgtagataatattaagggtttaatactgtaataggccggtcacggtgggtcatgcctgtaatcccagcactttgggaggctgaggcgggaggatcacctgaggtcaggagttcgagaccagcctggccaacatggtgaaagtccgtctctactaaaaatacaaaaatgagctgggtgtggtggcgggcgcctgtatccccaggtacttgggagactgaggcaggagaattgcttgaacctgggaggtggaggttgcagtgagctgagattgcgtcactgtactccagcctgggtgacagagtggactctgtctcaaaacaacaacaaaatactatagataatatccccttaataatgtagataatattaagggtgatgcaagtaaagccacctagtttactaaggtcccacggcaagtctaagtaagcgttatctcttcttatgacaagaaacaaattgaggccgggtgaggtggctcatgcctgtaatcccaacactttgggaggccaaggtgggtgcatcacttgggcccaggagtttgagaccagcctgggcaacacggcaaaaccccatccctttccaaaaatacaaaaaaattggccaggtgtaatggcacatgcctgtagtcccagctactagggaggctgaggtgggaggattacttgagcctgggaggtcaggctgctgccagccgcgagtgtgccactgcactccagcctgggcaacagaacaagatcctatctcaaaaaaacaaaaaaccgaagttgaaatctcaaacaaccctaacaacctgggagctatcattccattctcttttccatggaaaagagagattttgtgggtaactagcttaagggtggagagccagttagtgatggagaggaaatttcaatctggtgggccacacttcagaatccgaaatcccattatattgctttcccttctccagccttccctgggattatctcagttttcatgaaataaaaaaaaaaaaaaagcaaacccaataattagaataatcaatagaaatgccccaactagagctatgaccaacatatccatcgtgccataagcaatactgatgagcagtgatcttgtaaggcagaagaaatcacggccttggccgggcgtggtggttcatgcttgtaatcccagcactttggaaggccgaggcgggaggatcacctgaggtcaggagttcaagaccagctggctaacatggtgaaaccatgtctctacaaaaatacaaaaaattagctgggcctgatggcgggtgccggtaatcacagctacttgggaggctgaggcggaagaatcgcttgaacctgcgaggcagaggttgcagtgagccgagatcgcgccattttgcactccagcctgggcgacagagcaagactccgtcttaaaaaaaaaaaaaaaaaaaatcacggccttgttccgccttctggggcaacatggagtgagatcacagcgcctgagaaagaactttgaaaactgcggctgtgctttacaaaaatgtatcagtattattaaatgctgcctccaccttttaaaaatcaaactctagaaaaaacactcacctgtttggcctctccggcccctccccctccctgccctgaactgcagctgtgcgcagccagttgcctgttttccttaaaggcctcggggtgctcgtatcttcttcagacgttcagccaaaatttttaaagtgcggctggggggaagggtagcgcactctgaattcatttagctctatcgttgaagcccgggttcctagatcagggcacaaaaacaaatagaaaagacaatttctggaagattggaaaacagctaattttgcaggtgcttcggcatcagtggtggcgatgaatttaacatccatgccgggggggataaggttcaaccgcagatgaaatggttaataccttatacgaaattcacggcgaaaaatcctgaaacaggacatttaaattcactgccgaggcttgggggtggggtggggagcagggatcggaaacgacgctagtggttcttaaatgcgtttttacttgggaatgccgggcagggaaaggaaaggtcatcgtctgtttaatttccacccccagctctggacttccagcattagctcgccgggcctcagctgttgtacacacacggcgaggggggaggggagggcggaggcgcggaggaggggccggctgggaggaatctgggcgtcctgccgcgcatgcgccttgcctgagcaacaagtgggctccacagaggaagtgtaaaggggagggggaagaactggtgcagagcatggcggtgacgtcagcgctccgcccgggcggcatcccgcgcggccaagccggggacagcgcgagccgcagccggagcaggagcgccgagacgcgcctccggaacgtagagtaacaatcacaaccccacattccgggcgagcgtgagcacgagcgggaagggatgcgacccgggccgaggcgccgcgcgagcgccctgcagccaacgtgagcgccgccagccgcggcggcccgggcgccggccaggcctgggggcggcgggagcctgcgtgcgtgcactcctctcctctgctctcgtgcgtcctggaagcagtggccgcggcggctccctccggggtgcaaacccagtcgccgccagcagaacggccgacgctgcggaggggagaaggtcctttctcggctgccaccccctcccccggtcttccggggaagcagcggcttcagcaagattggacccgggcaccgggtggcactgaaccctctggccctcgccccagggggcccgtcggggagaggacgcagctcgtaggggggtccccggggagaggaagagacagcccctttcgagcttccacgcaccagccactccggggagggggccaagaggcaacggcggccaccaccgggcaccctcgccccctcccctcgggccgggagcttccagcccaagtctgcagcaccaggaagaaggcgcctgagctcccctcgcgacgagtcaaccgcagtaggaggtgggggcgaagagagggctgaacccgtccgctgcccgggcggtggagcccccacggcgaggcgctgcgccggcggtggagactcgcgttccctccagcccctggggcagaactttctcgccccccctcctccctcccccgcagtcggactccctccccagccggccagtcctcccggaggagaaggcgccgcggagacagcccgggcgggggcctaccttccccagggcaggcatcatgtcggcggcgcaggtgtcctcgtcccggagacaatcttgctacctgtgcgacctgccccgcatgccctgggccatgatctgggacttctcggaacccgtatgccgcggttgcgtcaactacgagggcgctgatcgcatcgaattcgtgatcgagacagcgcgccagctgaagcgggcgcacggctgcttccaggacggccgctcccccgggccgccgccgcccgtcggggtcaagacagtggccctgtcggctaaggaagcggcggcggcggcggcagcagcggcggccgccgccgccgccgcgcaacagcaacagcaacagcagcagcagcagcagcaacagcagcagcagcagcagcagcagcagcagcaacaacagctcaaccacgttgatggttccagcaagcctgcggtgctggcggccccgtctggcctggagcgctacggcctaagcgctgccgccgccgccgccgccgccgccgccgctgcggtggaacagcgcagccgcttcgagtacccgccaccgccggtgagcctgggaagcagcagccacaccgcgcgactgcccaacggcctggggggcccaaacggcttccccaaaccaacaccagaggagggacccccagagctgaaccgtcagagccccaattcttcttcagcggcggcgtcggtggcgtctcggcgtggaacgcacggtgggctggttacggggctgcccaacccggggggtggcggaggcccccagctcaccgtgccccccaacctgctaccgcagacgctgcttaacggcccggccagcgctgcggtactccccccaccccctccccacgccctgggcagccgtgggcccccgacgcctgctcccccaggggctcctgggggccccgcttgtctcgggggtaccccgggtgtatcggccacgtcgtcctccgcgtcgtcttcgacctcttcgtcggtggcagaggtgggcgtgggtgctggtggtaagaggcccggctcggtgtcgagcacagaccaggagcgcgagttgaaggagaagcagcgcaacgccgaggccctggccgagctgagcgagagcctgcgcaaccgcgccgaggagtgggccagcaagcccaagatggtccgcgacacgctgctcacgctggcaggctgcacgccctacgaggttcgcttcaagaaggaccactcgctgctgggccgcgttttcgccttcgacgccgtctccaagcccggcatggactatgaattgaagctgttcattgagtaccccacgggctcgggcaacgtgtactccagtgcatctggtgtggccaagcagatgtatcaggactgcatgaaggacttcggccggggcctatcctcgggtttcaagtacctggagtacgaaaagaagcacggctccggggactggcgcctgcttggagacctgctccccgaagccgtgcgcttcttcaaggagggcgtgcccggcgccgacatgctgccccagccctacctggacgccagctgtcccatgctgcccactgctctggtgagtctgagccgcgcccccagcgcacccccggggaccggggccttgccgcccgccgcgccgtcgggccggggcgcagccgccagcctgcgcaagagaaaggcctctccggagcccccggactcagccgagggcgcgctgaagctgggcgaggaacagcagaggcagcagtggatggcgaaccagagcgaggcgctgaagctcaccatgtccgccgggggcttcgcggcgccggggcacgcggcggggggtccgcctccgccgcccccacctctgggaccccattccaaccggaccaccccacctgagtcagccccccagaacggtccgtcccctatggccgctctcatgtcggtggcagatactctgggcacagcgcactcgcccaaggatggcagttccgtgcactctaccactgcgtcggcgcggcgaaacagcagcagcccagtctcgccggcctccgtgccggggcagcgccgcttggcatcacgtaacggggacctgaatttacaggtggcgcccccgccgcctagcgcccacccgggcatggaccaagtgcacccccaaaacattccggattcccccatggccaacagcggacccctctgctgcaccatttgccacgaacgtttggaggatacgcatttcgttcagtgcccttccgtccccagccacaaattttgcttcccttgctctagagagagtatcaaggcccagggggccaccggcgaggtgtattgccccagcggagagaaatgccccctagtcgggtcgaatgtaccttgggccttcatgcagggcgaaatcgcgactatcttagctggggatgttaaagtgaaaaaggagagagacccttgaaccactgggcagccacctcctttgccctagaccagctcctctccaatcctgagggcccctcccccaacccaactcgaccctccctcccctcacccccaaggtgtagaattgtgaatataacgaaactgcaaaaagttagtcttatgtatagacattattttcgtcgtatgtttctatattttgaaacaaaggtatgtaacttcttcatttgaaggataagctggtttgtgttaagcagtatagtattggttgggtcatttgcatcatatcgttagcatttatttggtggcagaatgtttgcctaggtacagaattaatagcccttagcaacgactgctgctggtgtgtatttttgtaaatgttatgcactctctgaaaggaaaaacacacacaaaagaaaaagactttttttttttttttttttttgccaaggccagtgttgctgcctaaaaaaaaaaaaaaaaaaaaaaaaaaaaatgctttaaaatggtgaaagcttccttctaaactgccccaagtgttgaagtcttcactttattttgttctgttttgttttgtttttctgttttgtttgcaaaatggtaagggggtgtcgggggggatggggtgtattttgttgcaagtttgtgaggggaaaatgttttggtttgtttctactgacctgaatgtgttggatctacacgtgttgttttgtttttgctttattgatgcacggatgcttttgaacagtagagcgaaatgctagacatggagaatctgctctgtttgtcctttatacatttctgtagttaacagaacactgtaatgtgccttggagcttagtaacttgtaataaattcaattgatattaactgcgctgagtcagcaattttgtctttctagggctaaggccatgcaactccgacgtaggcgacaccctccctacctccagtatagaacgaaaatcctagtgcttttgaaagccctgggagctggcctgtgggaaaggccctgtgctgccttgctgcccctccccctcggtaccaggctatttaaattcacctcttggggaggcgacagttgctgactaagcgatttcggtttactcttcagcatctctattttcccccggatgcgggcccagctgcaaatggcattgtcaagaatgctttctggtgcctcgccctgtggcggtgaacataggctgacacccagtgcagctggtgacttgacaagtgggcgaaaaagtctaggagaaaagctaggatgctttgcttcttagatatgacagacatcagtctgcatatttaaaacaaaactgccacagagctgggagcaaatgcatacactcagccttggagagtccgcagtagcttcaggctggttccttggaaaaccagttttcacctcattcattacaagttttctttcttgtattttaaataattatttttaaaggcagaaataattctaaagacttagttgattagagagggtttctgaggatgaggaagaggggggaaaaccccaaacttagttcctgaagcaaaggtttacttccaacatcaaataaaaatccattcctgctggtgaagcaatgcaattattcatctaatcagcttttggcggcgtttgtgaggtgcagagaggcggggaagcggagagaagactactgccctttagagcagagcccctgctcgtgggctgagagcagcctggagtcctcccagtggtaggggaaggcaaacaaacctgatctgaaccttgtactctcctgggaggcaaatagaagagcagaaaacaggagggaggaagcaaaacaaaacccggcaatccagtcaaattgattcctggccacatctcattcctgggcggggcgagctgggccctgttggtcccctccaaggctgaaggactattaagaaacttggatcccccactccactcccatcaaaggagtgggaagactgggaggtggggatgggtacaggcacgtttggggagaaacaaatcactggttcgcccagaactctggtgtggaggccgggctggtgtcggaacttgttaataacacccttttagtttcttttcctgctttgccactgccatcactgaagtggtggaaaccaggactctgtgtgcacgcgcactcgcgtgtgtgtgtgtgggtgtggataagtggcaatattgatggatctgctgcagcctcttaatcctggtacatgggaggtgcctgcctcacctctaagaatctccccacatataaatagatattcatgtcagcttcctgcaaatgtgtccttgcattttcatctgctgccaagtgttgtattggtgcttatgagtcatgaaacctattttcatccgcaggggtaattaacttgggggtgataatgcatagcagactgtaggaagagttaattccaaaacccatcctcgcctggctaccaatcacacattgcacttaaaggtctgggttggctttttgtgtaagttcattaataaaaaccaagcatgttttgcctggaagatcctctaagatgctcccaactcccgctcccaaggcacatactcttaaaattggtaaagctcaacagcctgagaatacagtgtcacgggtataatttaactatcattgaaggaaggagcggtgggtgcagccacccctcctccggcattgcacagtgcatgtgaatttagacatgtggatcacctgtctgggcgtggaccttatgagttgtgtctggtggctccagctgggagttgtccctgttaccggtttctgtgcacagctgctcctgccggcctgcaactgtctcttcatcactatggtattaagctcaggaacttttaggattgtaagacccttgattactagtgcacataggtaggaaaggagggcctgtctttaagcactgagaacagcatcgtttctttccttcttgttgctgggtgctattatgaacagtagaagcagcagctgtaataatgaggcatccagccatggaggccagtttggtttcactaaggaaacctgactagagacgttggggagaggagggagggagtgggagggagagagcaggttggggtggaacccaggctagaagtgaattatgatagtgcagttaattaaagtttatcatagccggggaccacttgttaaatggaggcttttttttttttttaaaccatgtgaacttttcctttgctgggacccattcagctgctagtttggttgccttaaccagcctttctctgatccctcagctggattctcctttccctgaagctttccacattggacgcctaggaagcacttttcctctctggcgtgtaaggattcttgtgggtttctgagattcagcccaggcctctggatgagccgaggctccattcatctccattttacctccatttcttctgaccctcgtttcctatccttctcactccctttcccctcagagccaaagtggccaacatttaaaaattcatatttatctttgtgcatcatttgtgcagcaaatccaaacgacatgtttaagtgggcagagtggtggggcaatgaggactcaattcaacagctttgagagaataggccaatgggagtaatttcttgaccttgatctctgaaggcagcaccatagtccaccatcgaaggcggctcaccgtatcaagtcctcaatgtaagattcaaggtgcgttttcacttgcatccagcccagactggctgatgtaataaatactgaaactcacttttgttttctgtaatacttcatcaagtcaggaagttggaattggggctgggcgctttgggaggctgaggcaggcgggtcacctgaggtcaagagttcgagactagcctggccaatatggtgaaaccccgtctctactaaaaatacaaaatacaaaaattagctgggcgtggtgacgtgtgcctgcagtcccagctactcgggaggctgaggcatgagaattgcttgaacctgggagacagaggttgcaatgagccaagacagcaccactgcactgggaatgactcttaaggtcatctagtgaaatgttctctaaacctttctggggtcagagacaccttggaaaaatctagcaaaaattatggctcctccccaagatataccagtgcccacatacacaaggatttgcatacatttttttcttttttaatatacattttatatatttgtttttgagaaggtaatacattcctttggttcaaaactcaaagaatgaggcctggagtggtggcttatgcctttaatctcagcactttgggaggctgaggcaggaggattgctttaggccaggagttcgagactggtctgggcaacatagtgagacccttcctctacaaaaaaaattttaagattagccgggcaggctgggcgtggtggcccacacctataatcccagcactttgggaggcccaggcaggcagatcatttgaggtcaggagttcaagaccagtctggccaacaaggtgaaacttgtctctactaaaaatagaaaaaaatcagccaggtgtggtggcacacgtctgtaatcccagctattcaggaggttgaggagggagaatcgcttgaacctgggaggtggaggttgcagtgagccgagatcacaccattgcactccagcctgggtgacagagctagactccttctcaaaacaaacaaacaacaaccaaaaattagctgggcaaggtggtgcatgcctctggtcccagatacttgagaggctgaggcgggaggatcacttgagtctgggaggtcgaggttgcagtgagcaatgattgtgccattgccctccagcttaggcaacagagcaagaccctgcgtcaaacaaacaaaaaaacaaaggatgcaaaggggaatatagtacaatggcccctctgctactcagttcccttctgggatgcaaccaatactactcaatttctcaaggcatttatgcacatctaaagcccattcatgaattgaggttagaacttacgtctggtctggccgggcgccgtggctcacgcctgtaatcccagcactatgggaaactcaggtgggcggatcacctgaggttgggagttcgagaccagcctgaccaacatggagaaaccccgtctctactaaaaatacaaaattagccaggcatggtggcgcgtccctgtaatcccagctactgaggaggctaaggcaggagaattgcttgaacctgggaggcagaggttgcagtgagctgagatcgcaccattgcactccagcctgggcaacaagagcaaaactctgtctcaaaaaaaaaaaaaaaaaaaaaaaaaagaacttatgtttggtccatccactctgtaatgatgaagaccccaagccacagagaggtgaaataacttgcctatggtcatacagtggcagagtctgggctagattcttattagggaacagctataatagccttttttttttttgagacggagtctcactctgtcgcccaggctgaagtgcagtggtgcaatctcggctcactgcaacctccgcctcccgtgttgaagcaattctcctgcctcagcctcccgagtagctgggactacaggcacgtgccaccacacctgtctaattttttgtatttttagtaaagatgggtttcaccttgttggccaggatggtctcgatctcctgaccttgtgatctacctgcctcagcctcccaaagtgctgggattacaggtgtgagccaccatggctggcgacttcttttttttttttttttttttttgagacggagtcttgctccgttgcccaggctgaagtgcagtggcaccatctcggcccactgcaagctccgcctcccgggttcacgccattctcctgcctcaacctcccgagtagctgggactacaggtgtgcgccaccaagcctggctaattttttgtatttttagtagagacggggtttcactgtgttagctaggatggtctcgatctcctgacctcgtgatccgcctgcctcggcctcccaaagtgctgggattacaggcatgagccaccgcgcctggcttttttttttttttttttttttttttaagtatacttgaggccgggcgcagtggctcacgcctgtaatcccagcactttgggaggccaaggtgggcggatcactcaaggtcaggagttcgagaccagcctggccaacatgctgaaaccccatctctactaaaaatacaaaattaggagtggtggtgcacacctgtaatcccagctactcgggaggtgaggcaggagaatctcttgaaaccaggaggtggaggttgcagtgagttgagattgcaccactgcactccagcctgggcaagagtaaaactctatctcaaaaaaaaaaaaagaatacttgagagctgggcatgatggtgtaatcccagctacttaggagacatgagcattgcttaagcccaggagattgagactagcctgggcagtcttggggaaaaaaaaagatgaaagaaaaatttaaggacagtttctatgaggagtgatgataaggggggcaaaaggatagcgatacctggtccagtggggttcaccgtttttactaattcttggaggactagcaaaaaacatttatcccttgtagcctttgggggaagggaatgttcagagatatttctaggtttctgactgtaaatgtcaggtgggcctgaactggtagagtcttttttttttttttttttttgagacagagtctcactctgtcgcccaggctggagtgcagtggtgcgatctcagcccactgcaacctctgcctcctgggttcaagcgattctcctgcctcagcctcctgagtagctgggactacaggcgcccatcaccacacctggctaatttttgtctttttagtagagacggggtttcaccatattggccaggctggccttgaactcctaaccttgtgatctgcccacctctgcctcccaaagtgctgggattacaggcgtaagccactgtgcctggctggtagagtctttttttaacctttgatctgtggcccttcacaccacctcccctctttgctgatgggaaacttttgaaggttttttgtttttttgtttgtttgttctttgttttttggaacagggtcctgctctcttccccaggctggagtgcagtggcatgtccacggctcactgcagcctccacctcctgggctcaagccatcctcccgtctcagccccctgagtagctgggactacaggtgcatgtcaccaccatgcctggctaaacattttttttaaagagatggggtcttggtacattacccaggcttttgaaggtttagagtcagataagcaactgactccaaaccaacagggagcaactatcttggcatggaaggagggggtaagggagggacaccaaggactcccccgttttcccttcagcttggggcttctcagttctctccctgccacccacctctgcctggccatctctcctccacagctaaagggggaactgaaggagtctagggacaggccagatgctgtgcaatgttcctggcagctgcacattgtaccattccagctttaggcctgtctaggaggaaggcgtgatgagccccactttatagatgtgccaactgagctcagagaggttaagtagccaaggccctttagacccagtgcaatccaagccccaggcagcctagagcctgggtctgcccagactccagtgttcctttgtgcagagggccacaaacttctgacctgcagagcccaggaaaccaagactcacagcaccagccccatcccttggccctttccacatctccttgagtctgagtgtgagcctcaccgacaccagtgagcaaggctatctacaggcagggctgtcaggaagccccttggggagaacactttctaggttctatgttcatctttaattatttttattttattattattattatatatatatttttagagatagagtctctgttgcccaggctggagtgcagtggcgtgatctcagctcactgcaacctctgcctccaggattcaagcgactctcctgcctcagcctcccgagtagctgggattacagacgcctgcaaccacgcccagctaatttttgtacttttagtagagatgggatttctccatgttggccaggctggtctctaactcctgacctcaagtgatctgcccacctcagcctcccaaagtgctgggatcacaggcgtgagctaccgcacccgtcctaggttctatgttctgagggaacacagtggagctgtccaagcagtatttccaatcagggattctggagcagggctgttcttctgaagtcgtcctcagttgcctcctaccctcaaacttaatttaaaaatgagcttacctctgtctcatttttgatggaacagagagatgacaggaaacaggcagtggccctgatttgtaaggtatattgcttctgtggggagtatctaccccactagctggtgtcttccctcccagtcttgcttttttttgagacagagtttcactcttgttgcccaggctggagtgcaatggtgcaatctcggctcactgcaacctccgcctgctgggttcaagcaagtctcctgcctcagccttccaactagctgggattacaggcacacaccatcatgcctggctaatttttgtatttttagtagagacggggtttctccgtgttggtcaggctggtcttgaactcctgacctcaggtgatacgcctgcctcggcctcccaaagtgctgggattacaggcgtgagccaccgtgcctggcctcagttttgttttcttcaggctgaaatgctggtcagttacctcttgggcgtagcttgattgtcctgcctctttgggggtcacaggtgtgcatccaccaggtctggggtgctggatccaggaaagcttacctctctacatgggaactataattgtggctcccaggtttaggttagactcgagagaagtgtcccaactcctgactggtctcccgtaagctctggtgtctgcccacttcaggccatggctttgtagcagaatccattttttttctacatctgagcaagtcacacccttgcttagaaacctcccttggctccctgttgcctacagggtaagtccaaatttcttagaacaacaatcaaagccatcatccaccatttcgccatcccaggagtttgtttatttatgtatttatttcaaaacagagtcttgttctgttgcccaggctgggcagtggcacaatcctggctcactgcaacctccgcctcccaggttcaagtgattctcctgcctcagcctcccgattagctgggactacaggtgtgcaccaccacgcccggctaattttttgtatttttagtagagacagggtttcactatgttggctaggctggtctcggactcttgacctcaagtgatctgccagtctcagcctcccaaagtgctgggattatataggcgcaagctatcgtgcctggccccaggagtattttaattttaaaaaaggtattagatacacatggtaaaagaaaaaaaaatcaaagagcctgagaagatactcagagaaaagtaagtcggtctccttctcattccaaatctccagttcccctgcactgtgggcagttatttcgtgtacatgttcagcagtattaaaagcacagagaagcttagatctataatatatgtctcctgagggcagatcttaggacaagccaggacaagcggaaaggtccaggacaaggaactgggcttgggtcagacagagccccaatctgggtctgggggctgatggaaagtcagcaagatgccccctgcccccacagccaaggattggttctggtgcatcctaggcttctgggcaaggagtgtgagtgagtgagtgtgtgtgtgtgtgtgtttgtgtgtatctttggcccacaggcccacatccagggcattcacatccctgtgtttagctgggtgccctgagcagcccctggatgactggacattctctggaaggacttgggggaagaagtggggcagtgactatggaggccagctatcccaacagcgtccagagccttccttaccaatagcctcattcccctccctctcccaccagccacagcagctcgtggaggctgtcagaattgtactcctaggtcacagacagggatgctgtggttgaaagaaaagactgaaggagagacattattattattattatttgaggcagagtctcactctattacctagcccggagtgcagtcacgcactcttggctcactgcagcctccatctcctgggttcaagtgattctcctgcctcagcctcctgagtagctgggattacaggcaagtgccacgatgcctggctaatttttgtattttcggtagagacagggtttcaacatgttggccaagctggtctctcactcctggcctcacgtaatcagccggtctcggcctcccaatatgctgggattacaggcgtgagccaccatgctccatgggagagaaattattgactgtagactttggaactgacagtgggccaggcactgtcatatatgacttctccttcattatggtaaatctttgaggctggtcgtggccatgattctcctttgaaaggaaaatccccacagtaggtcctattattggtcccatttcatagacaggcaatcgagacaggggtaaataactcacccctgcctggcttcactcctctttgtcacctgaaggacagttcacaccctcccctcactctgcccccacacctcgcttttcaccagcacagaccctgccagctgggggtggtgtttttgaggggaggagtgagcacttggaaccccagagctgcagt

SEQ ID NO: 357 - DNA, 3473 bp, Homo sapiens
gcgaagagagggctgaacccgtccgctgcccgggcggtggagcccccacggcgaggcgctgcgccggcggtggagactcgcgttccctccagcccctggggcagaactttctcgccccccctcctccctcccccgcagtcggactccctccccagccggccagtcctcccggaggagaaggcgccgcggagacagcccgggcgggggcctaccttccccagggcaggcatcatgtcggcggcgcaggtgtcctcgtcccggagacaatcttgctacctgtgcgacctgccccgcatgccctgggccatgatctgggacttctcggaacccgtatgccgcggttgcgtcaactacgagggcgctgatcgcatcgaattcgtgatcgagacagcgcgccagctgaagcgggcgcacggctgcttccaggacggccgctcccccgggccgccgccgcccgtcggggtcaagacagtggccctgtcggctaaggaagcggcggcggcggcggcagcagcggcggccgccgccgccgccgcgcaacagcaacagcaacagcagcagcagcagcagcaacagcagcagcagcagcagcagcagcagcagcaacaacagctcaaccacgttgatggttccagcaagcctgcggtgctggcggccccgtctggcctggagcgctacggcctaagcgctgccgccgccgccgccgccgccgccgccgctgcggtggaacagcgcagccgcttcgagtacccgccaccgccggtgagcctgggaagcagcagccacaccgcgcgactgcccaacggcctggggggcccaaacggcttccccaaaccaacaccagaggagggacccccagagctgaaccgtcagagccccaattcttcttcagcggcggcgtcggtggcgtctcggcgtggaacgcacggtgggctggttacggggctgcccaacccggggggtggcggaggcccccagctcaccgtgccccccaacctgctaccgcagacgctgcttaacggcccggccagcgctgcggtactccccccaccccctccccacgccctgggcagccgtgggcccccgacgcctgctcccccaggggctcctgggggccccgcttgtctcgggggtaccccgggtgtatcggccacgtcgtcctccgcgtcgtcttcgacctcttcgtcggtggcagaggtgggcgtgggtgctggtggtaagaggcccggctcggtgtcgagcacagaccaggagcgcgagttgaaggagaagcagcgcaacgccgaggccctggccgagctgagcgagagcctgcgcaaccgcgccgaggagtgggccagcaagcccaagatggtccgcgacacgctgctcacgctggcaggctgcacgccctacgaggttcgcttcaagaaggaccactcgctgctgggccgcgttttcgccttcgacgccgtctccaagcccggcatggactatgaattgaagctgttcattgagtaccccacgggctcgggcaacgtgtactccagtgcatctggtgtggccaagcagatgtatcaggactgcatgaaggacttcggccggggcctatcctcgggtttcaagtacctggagtacgaaaagaagcacggctccggggactggcgcctgcttggagacctgctccccgaagccgtgcgcttcttcaaggagggcgtgcccggcgccgacatgctgccccagccctacctggacgccagctgtcccatgctgcccactgctctggtgagtctgagccgcgcccccagcgcacccccggggaccggggccttgccgcccgccgcgccgtcgggccggggcgcagccgccagcctgcgcaagagaaaggcctctccggagcccccggactcagccgagggcgcgctgaagctgggcgaggaacagcagaggcagcagtggatggcgaaccagagcgaggcgctgaagctcaccatgtccgccgggggcttcgcggcgccggggcacgcggcggggggtccgcctccgccgcccccacctctgggaccccattccaaccggaccaccccacctgagtcagccccccagaacggtccgtcccctatggccgctctcatgtcggtggcagatactctgggcacagcgcactcgcccaaggatggcagttccgtgcactctaccactgcgtcggcgcggcgaaacagcagcagcccagtctcgccggcctccgtgccggggcagcgccgcttggcatcacgtaacggggacctgaatttacaggtggcgcccccgccgcctagcgcccacccgggcatggaccaagtgcacccccaaaacattccggattcccccatggccaacagcggacccctctgctgcaccatttgccacgaacgtttggaggatacgcatttcgttcagtgcccttccgtccccagccacaaattttgcttcccttgctctagagagagtatcaaggcccagggggccaccggcgaggtgtattgccccagcggagagaaatgccccctagtcgggtcgaatgtaccttgggccttcatgcagggcgaaatcgcgactatcttagctggggatgttaaagtgaaaaaggagagagacccttgaaccactgggcagccacctcctttgccctagaccagctcctctccaatcctgagggcccctcccccaacccaactcgaccctccctcccctcacccccaaggtgtagaattgtgaatataacgaaactgcaaaaagttagtcttatgtatagacattattttcgtcgtatgtttctatattttgaaacaaaggtatgtaacttcttcatttgaaggataagctggtttgtgttaagcagtatagtattggttgggtcatttgcatcatatcgttagcatttatttggtggcagaatgtttgcctaggtacagaattaatagcccttagcaacgactgctgctggtgtgtatttttgtaaatgttatgcactctctgaaaggaaaaacacacacaaaagaaaaagactttttttttttttttttttttgccaaggccagtgttgctgcctaaaaaaaaaaaaaaaaaaaaaaaaaaaaatgctttaaaatggtgaaagcttccttctaaactgccccaagtgttgaagtcttcactttattttgttctgttttgttttgtttttctgttttgtttgcaaaatggtaagggggtgtcgggggggatggggtgtattttgttgcaagtttgtgaggggaaaatgttttggtttgtttctactgacctgaatgtgttggatctacacgtgttgttttgtttttgctttattgatgcacggatgcttttgaacagtagagcgaaatgctagacatggagaatctgctctgtttgtcctttatacatttctgtagttaacagaacactgtaatgtgccttggagcttagtaacttgtaataaattcaattgatattaa

SEQ ID NO: 358 - protein, 790 aa, Homo sapiens
MSAAQVSSSRRQSCYLCDLPRMPWAMIWDFSEPVCRGCVNYEGADRIEFVIETARQLKRAHGCFQDGRSPGPPPPVGVKTVSAKEAAAAAAAAAAAAAAAQQQQQQQQQQQQQQQQQQQQQQQQQLNHVDGSSKPAVLAAPSGLERYGLSAAAAAAAAAAAAVEQRSRFEYPPPPVSLGSSSHTARLPNGLGGPNGFPKPTPEEGPPELNRQSPNSSSAAASVASRRGTHGGLVTGLPNPGGGGGPQLTVPPNLLPQTLLNGPASAAVLPPPPPHALGSRGPPTPAPPGAPGGPACLGGTPGVSATSSSASSSTSSSVAEVGVGAGGKRPGSVSSTDQERELKEKQRNAEAELSESLRNRAEEWASKPKMVRDTLLTLAGCTPYEVRFKKDHSLLGRVFAFDAVSKPGMDYELKLFIEYPTGSGNVYSSASGVAKQMYQDCMKDFGRGLSSGFKYLEYEKKHGSGDWRLLGDLLPEAVRFFKEGVPGADMLPQPYLDASCPMLPTALVSLSRAPSAPPGTGALPPAAPSGRGAAASLRKRKDEPPDSAEGALKLGEEQQRQQWMANQSEALKLTMSAGGFAAPGHAAGGPPPPPPPLGPHSNRTTPPESAPQNGPSPMAALMSVADTLGTAHSPKDGSSVHSTTASARRNSSSPVSPASVPGQRRLASRNGDLNLQVAPPPPSAHPGMDQVHPQNIPDSPMANSGPLCCTICHERLEDTHFVQCPSVPSHKFCFPCSRESIKAQGATGEVYCPSGEKCPLVGSNVPWAFMQGEIATILAGDVKVKKERDP

SEQ ID NO: 359 - DNA, 41202 bp, Mus musculus
  misc_feature (1)...(41202): n = A,T,C or G
tcacttgatggtgactgagatttatgtccccaggccagcattgaggcctctcaggagctggacaaggtattcgacgccattgagcaaaagaaactggagctggctgactacctgtgcgaagacccccagcagctgtccctagaggacacgttcagcaccatgaagaccttccgagacctcttcacccgtgccctgaaggtgtgtggtgggcccaggaggagttaggtgatgcctgagaccggagtggggtttccagccaagccaggcagaatttgcccgtttgttccaagctgtggctaggtatgcgccatgtgtccttggtatacccactgagggtcactgggttgggtgacgaggctcccgtctgtctgagcaggagaacaaggaccggaaggaacagatggcaaaagcggaaaggaggaaacagcagctggcggaggaggaggcccggaggccgagggacgaggatgggaagcctagtaggtctcagggacaggtgggacccaggtggggctgctggccttcctcgcccaagcctagcagggcttgtcctggggtggcctccggatctctgagctgctctctaaggtctgtggctctgctctgcagtcaggaaggggcctgggaagcaagaagaggtgtgcgtcatcgatgccctgctggccgacatcaggaagggcttccagctacggaagacagcccggggccggggagacactgaagcaagtggcagagtggcccccgcagatcctccaaaggccacagagcctggtgagatctgagcctgtgtccttctccccactccctcctaccacttctaccctgcctccgagaagctctctgggtcctggaccttcagggcccctacacacactgttctggagacgtttgggggcctagggggtgggatagtaaagacccaattggcacaactctgaaattggcctatgagaggactgtgcctctcttaaacattgtcatctttgggtggccaggggatgtgaggttgggggtccactgctggacacccccttgattcagggcactggagatattcagacaggcaaaccttaggaagggtttcactactgggactttagaaatggatgttttttgtggccctttggatgtcctcctgtcctccatgtgtggccagactgaagatactgccttcccttggtccataagaaaccatgttggggggctcctgagaatgaagtttacagtagtttaggaaggttcagggtcaggaacacttcctgggtgagaccagaatgcctaaaatcctggcccttgcccttacggacacatccctcaatccacagcaactgccagcaatcctacccagggcacaaaccaccctgcttcagagcccttggataccacagcagctgacgagccgcagggctgggaccttgtggatgctgtaacccccagcccccagccctccaaggaggaagatggtcctccagccctggagaggcgctcctcctggtatgtggatgccattgacttcctggaccctgaagataccccggatgcccagccctctgagggggtctggccagtgactctgggagatggtcaagctctgaatcccctcgagttctctagcaataagcctcctggagtcaagagctcgcaccaggacgctacggatcctgaagccttgtggggcgtccaccaaaccgaggcagacagcaccagtgagggaccagaggatgaagctcagcgaggacagagcacccacctaccccgcacaggccccggagaggatgaggatggagaggacacagccccagaatctgcacttgacacgtccctggacaggtccttctctgaggacgcagtgacagattcctcagggtctggcaccctccccagggtccaaggccgggtctcaaaggggacgagcaagcggaggaagaaacgtccctcaaggaaccaagaaggtaactgggaggcgggcgttggtgagcaaggctgggggacagctgggtctgaccgtgtggttaaagccgattgtcccacaacagggcctgggacctctccctgctgtcctgctggtccctctcttacccctgcgggtcctacaggctcaaccagcatccaggagagagggtgattcagtggggcacagcacttcacacaagagggcagcttggggggccactgcctgcatcactcacctgctgcacattcctgcctccacaccccttctgaggggagtggagcagggtagccctgggctcttgctgctgcagggtggtctgacattaagttcctaattgcagcttcttttgtcaccatgaccaaagaatcaactttggtccagtggttagtttctgaccctgtccaagagtgttggcacagctagcctggcccccacagatcccaccaccctaagttcagggctgtctcgtgtgctaagctgatgagtgtatttcctttatttgaaagcagagtttgtccctgattctgatgatattaaggcaaaaaggctgtgtgtgatccagtgaggtatgtatgcagcctggcttgtgttgactaatgatgacagcgggttccggggcctcagcctgctgcctggccctcctgagcactaacctagcttgtctccagccctctcgggataccagtaaacccctcccttggctcatggtggtggtgcctctgctgtgctgccttgttagagaaggcctggctgccgagccttgcctgcccagggtcttctcactcccagctggacacaacctcagaactggactccagatgggcctccaaggcatggtagagagagccaagctgcgctccctgtagggagtgggactccaggcctttgtgggcacagtgtgggctctttggggatggctgtttcttagtcctgcaggacagactgaggttgtccctattcgtgtctcggccctacatggtcaaggtaatggccgctttactaatcccagcttcccaagtaggcaccttccctccgcacggggccagtcttcccaacgctactctcgctcgcctatggtctgggttatggtcaaacatatgcctgaaaagactgtagaaatgggtgtgtcaagtgcagatgctgccaaaggcaaaggggcaggggcctcccctccttgtagccaggagcagagctggatccatgtagacgccaggttgtctttcttagtgtttacttccacgaacagagaccatgaccaagtcttataaaaacatttaattggggctggctgacaagttcagagattcagaatcatcgaggcaggagcatggcggcatccaggcaggcatgggtcagggggagctgagagttctacatcttcatttgaaggctgctatttgtggaatactgacttccaggcagctaggatgaggttctgaaggccacgcccacagtgacacacctatttcagcaaagccacacctcctaatagtgccactccctgagccaagcgtgtctgaaccatcacacaggtcttcctcatatggaccatggtgggtcttctgggctccactcgtggcaggacagccagagccaacatgtggcccaagacgttaaagatgcatttagaccagcttggggccctgtcccgtggccaggaaccatggatggaggaaggcccggataggacaaaaaagtctggccccatcatgaactgtgggagcctgaacaaaccccaaacatctctggcccggcacagggaccctgggtctgcctgcctggcactctgaactgctggccactgggctgaagtctcaggatcgaggtacaaggatgaggtctgttggtgccttgtaggcaggagccacagggagctcagagcatgagtttaccgttactcttggcccagcctgtgcagtggtcattcctcattttttcagtactgttgaccctgaagtctggtctgccccattggttagtgcattttgatgaaaaccagctcatgtgtctctggataggcagcctctccatgccgagcacccctgttctagctaacccagatgtgctccactcctgcgttggttggttcatttccccgctccctgcagtgtcctaataatgctctgggcgaagctttgacagcctctgctctgccccttttcccttcccttctgggcagattctcaagctcaaggctccaagggggaacctggagccccactcaccgctggtggaaaagcggggtttttaggcaactcggagagtattgggagcagggttcctacaggctcaggttggtggcagtttcagtgtgtggctgccagcccagggccctccctgggcagcacccagtcagataggaagcaggaaggaccaagtccggttcaaaggacccagtgaggctggttgagagcagacagtgggtatgggtctgtgaaaagtaggccatttcagcctggcgtggtggtgcacgcctttaatcccagcacttgggaggcagaggcaagaggatttctgagttcaaggccagcctggtctacagagtgagttccaggacagccagggctatacagagaaaccctgtctcgaaaaacaaacaagtaggccatttggagcccactgaagacagtccagctcaagaaatcacacctggttgtgacagcctctgagacagcagcctgcgggaatcaacttagctccatccactcggatgaattctgcagcccagagaagaatctggcaccagagtggacccggatacacttcagggtctggggatggcagtgagaccctttattgggcatctagagcttcctgacaaaggctgctgtaacattctcatttccttccccacaggcctcaggtccaggcccaaagccaagtgagtgctctcgtcggctcagcacatcggctggatgtgttgcctggagaggctcttcggggccaggctgggactgggcccccgagaaacccaaactccgtgccttacccagccaggatccttgggagccttgggcattgatgctgggacctggcctggcaccctgggccacctgcacgctcttagcccctgcttttgcaaaccactcccaccccctatcgcatgcaccacaggggtggacgggagcctcctgcctggctctagggagatggatcacagacacctgcactggggctgaaacatcccctctcccccaacccccatggctcagttgatttttagctgagtgctgttttctgcatctttattctgctatggctgagttgaggttagtgagggactgagggaatgctcgttggaagtgctgtgggtaggacctggcaggtaggctctagggaacaaataaacaaaaagttcatgtgcacaatgagtggtgaccagaccactgcagctgtcatctcccttggtgtgtgcccagtggggaacaagctgcccctgctcagcccctctcatgtgtgcactgttgagtctgcaggccagcagggattttaaccaataaagagcaaccttgtctgtcatgagtgtggtatttagaccattagaataggaagtaacactgggagggcgatctgagtcctcttctcttcccctgtggcactggggtgatgggacttagtggagccaagtgagtggggaaaaggctaggtgggagtgcgtggtgggaagattgatgggtgaaccaggggaggggtggcaaaggagcaggagaggaagcccaaagggcgggacctggacccatgcatgctactgcccagcctgagtggtctcttgggtctgcagatgcattctcccctgctcacaccaccagcagataggatgaggccatgtcctgatggtcgtcttcagcagactgtcgcctgccaccagaagagggtaaagtgggtggtaagctagatggggtgcagcagtatcacacgggagctttcaaatacctgagtggatgtacaggctgcgtgggggtgaggcctgaagccaggtaattcctcgggcgacagtggatttgcaggccgggttcctcagaggcagttggtaaaggcaggagagtcttatacaccaggctcttgcaagtggggatcccagctcaagagagaagtaggggcctagggcagggaggcaatgttggggctcatgttgccacccgtgctcaggcgcctcctgtcctgccccagaaccctgaaaactgctgtctgtctgcccttcagcctttagccagggtagtatccctaaatactatccagggaccctgtccccagactcccaggaagtccagtgtcttagggtttttattcctgcacaaataccgtgaccaaggagcaagttggggaggaaagggtttattcagcttacacttccacgttgctgttcatcaccaaaggaagtcaggactggaacacaagcaggtcagggagcaggagctgatgcagaggccatggagggatgttacttactggcttgcttcccctggcttgctcagcctgctctcttatagaacctaggactgccagcccagggatggcaccacccacaatgggccctcctcctcttgatcactaattgagaaaacgccttacagttggatctcacagaggcatttcctcaagggaggctcctttctctgtgataactccagcttgtgtcaagttgacacacaaaaccagccagtacatgcagtcactcctgggcctgggatcagtgctggcctcggcttacttctcagtcagtcagccgcagcctcctttctctgtgtaaacagagactcagccactccccaagcatctgccgacgacggttctcaagccctggggaggtggtggtgggaaggagatgggaactaagaccagacaggggcaagtggcagatggctccacactgtcatggtgtgatggctaatttgcattgtgggaacctcaccccgcactctgcaaacctcttctgccagtcaaatggccgtgtgatggccagcaactatgatcaaaaaggctaaagagatggctcagcggttcagcacaccggttgctcttgcagaggacccaggttgtattcccagcacccacatggcagatggcagccatgcataactccagtcctaaggagcctgatgtcttcttctggcttctgtgagcaacaagaatgcatgcagtcaaaacacgcatacacacacaaaaaaatttcaaattcatgatccaggttttccactaccgaagaatcccctcgtactcacaagcatctactgttctggccctagccccaccatctggctttctctgggtttgcccgttccaagcatgccatataaatagaggtattgaaactgtggctggctgcttccggttgttcttgagagccgtggggcagcacttcgcagctcacggctgagtcacagtgtgtcaccggctggagtgagttcctttttcccattcaacagcttctgtgtgggggactccatctgagggtgtgtgaatggtgctaagggcgggataggcctggtgtgaaccatttatatctctgccgtacacacctaacctgggctgcaggctgggagtaactataactttttaaaagactttcccaaagctgctaccttattcccaccagggatacttttaattttttttaactactggtgcgggagtgtgtttgccaccgcattcatgtggggatcagaggacaacttctgagaattgtcctctccttctgtgtggacccagtggaagggtggcaagtgccttttactataaacagtcttgctggttccttgggcgattgcttctgcagcctagctctgtcagctccatcttcacactctggagttcccaggtattgagttgtgaacggtctgcacctggggtggaatgcctacctatctcatcaggcaaacctgcaaggtcagcacttcacctgcctggggaggacggagagcactgcctccccagccttcctccccattgctttctggaagtcggcctcgtggctaacagacctgggaaaacccagcccagtggcagctatgaagcccctggaacctccttgcaaaggctcatgggtgccagatcatgtgcattgtctgtgtggcggtgtctcttgataacccagagggaaccataggtggcgctgtgcctgcgtgccctccctctaagcctatgcaaagcttagcagaagtcacttgtctgaggtcacacagctgcaaagccagactccccccaaacttagcagctgctacactgcccaccatcccgggctgggctcactgagggggtgggggtgctaattccggctgagccttgtgactggcagggtcccagctgttgagcctgagtgaagctgtttttagaaaagccctccccgttctatgtgggcccttggctatttatagtctcaggcttagaagcctcagtgcccaggacccgtctaagcccccatagtaggtccctctgaaccctaaatgcctctcacccagaaccccaggttccccccaggaaagggagccaggattcctttcaggcttgcagcaacacctcccaaggggacgagggcaagcattaaagtgaccgaagtgacattcaacactggcattcttaaagcgtaatctttctcacctggagaaaaagttcattgacctgtgtaacattctgccagcctctctcctccctcagtcctcagaagctgctgtgccccctacccttcctcctgtgacaacccccccccatattctcctgtttaccccttgtctccgttcctgcatcagccttctctgcctgctttgccttctgagcacaccttcctgaaagaccttatcagggatttctgcctgtcccagccactgctcaggagatcttggcctgaaccactaactctagatgccacgtctactcgcttgccccctccccactgtggcactgagtgaggtagagaaggatattgtaatctgcacacaaagactgtaaggctcttctaagaagtagtgtccagatccgaggccctgactgcttcagccatagcaactgaagagagtgtctatgtccctatgtgaaacagaagacacagaccaccatgacctgcacagccagggagggtagcagcagtgtggctgaggctgactgggaatagcctctcttccccaagctgggggagggggggtgtcagtcccccagagggtgtgtctagtctcactggtcttgtgacagtcctgcgaactgcccccaggacaactaggagcctgactgctctgtgaacctgtcccaggggtcagttagcacaccctggaaggacacgcaccagtggggggctggggggagcatgccacacaggcctcccagcctcaggactttcccttgtccctgtttccagtctggactgagtggcagaaaccatcgaccccgaggtctcttggaaagttgaatcctcctctgctcctgtgtccctcaagttgctctgaccccgagcggatgtgggtacttcatcttacacttggcgctgggctagtagctagctacagccacccaagagctgcatatcctgggccagcaggggtgactatgtggcctggtggagagagatcgtcttagttaaggtgactttctgggcggctctcaggagaaccgttcctggtcctggactcgaggttcaagacgggaaaacaggtgatcccgcaggcagatcctccagattaacggcaaagaaacatctgtggttctgcttttgttaaccgctctcttgccccggaaaaagcagcctcctccgctgtttgtgcaaccccaaaccctagtcctagcaggccagtgggcaggggtagagtccgggtcgtgcagcactggcacctctcacgtcctagggtgttctgagtcatctgcttgcccaagtcgtgtcggggcgtctagcaccctaagtgcgcgccatctgcagcgacagcggcagggacagggagctgtggccgcaggtcaccgaggtgcgtcaccgcgtgcgcaggacccgcccccggcccgcccccctctctaggcgtccgcatttaatggagcgagagctctggcggcggcgggctctcgcttggcccagagcagcagaggagctaagccagcatgtccgggacccgagcctccaacgaccggccccccggcacaggcggagtcaagagggggcggctgcagcaggaggcggcggcgacaggctcccgcgtgaccgtggtgctgggcgcgcagtggggggacgagggcaaaggcaaggtggtggacctgctggccacggacgccgacatcgtcagtcgctgccaggtgcgggccaggcgccgagtccctccctaacctgcccagcgagcctctccccttccccgggatccggacgaaccccttcctcctgtgccctgagtgggtcacagccttttggattcctccctcccaggagtaccttccccactgcctaagtcctccttcccacacacaccctctcacacaaagctcttggcctcccaccacccacccacctcctccccagggcaatggcaggagcccgagctaaaaatataagtcgctgagttgaggacatgggatcctcaggggtagggcgttccagggcggtgatggtgggccctccagtggggaaagccccaacggggtgggtcgaggtaccctaagatgcagcaaagggtgagagctgctttctgagaaggggggtgtcctcggcgagtcagccaggcagagacaggatgaagataggtttctaacctagaggaacgcagggtcaggagcctaaagcagagttcaaaggggtctggctgacatggagaaaggaggagtcacagatttcccgggcagggtgtgacccggtggctggtagtgctcagagaaggccagagacagtctttgtgcccttggccagctgcaaagtgctctgagcacccacatttgttctgactgactctggacagcgggtgggtactctcctagggctagctgcctgctctccttaagtctctgtggtgttgagctgcagctaacagccacactgcctctgcggtgccatcctcagcacagagggctcggtttgagggaagatactctgtgatactgggtttggagccacacttatggctgctgacccaaatgaaggtgggaacacctgctggagttctgtctccctggttctgtggctttcttgctgagttcccgaggactcctaggaggcctccggaggcatagcttggttccctgggccacatttgcccagctggggatgaggatttctggaaactctcttaagaatgaggagctaccctgctctctcaccctgttcacccctctcccttgaagtctctaggtcctaaggacagaccttgggcctcctaagccctacaccttgcatgcattgtccagctatgtgtatgtaactgggatttactcccagcggtctggagtcctgctctccagcgacccagcaccaaagcccccacccttcctcagagccgtttgctcctgtggcgcctacagtctttccacacaacttgctgggtttggtcagcactgtcaggggtgagcctcgatggtcccaggctccgtctccttctgcggacacagttctgggtgaagatgagctatccctgctctatgcccaagtcaccatgacagatccagatccccatttcttgacaggacattcaaggatcagcacagggtcacagtcacccactcagaggggctatctctcccaccacctgacctccccagcagacccaaacaggtgttcccctgaggaatatgagaatagagacatgtttctcttccagtctctcgtgaactagcaagtcaggagcctcccacagagctcctctacaggttgggaaactgaggctcagaaaagttgaagaaccaaactaactgttcctttgagtcccttgaagcctttatcataagccaagagacctgtcctctttccccccacttcatggacaaggcagaagagtcagccttccatcaagccctctggaaatcaactccagtcctttccctgagtgcccagcccctgagtcattgcaagcacttggtgactactctggtttcctgcacttgtccttccccttggcggggacctctttgcttgcctgtggcctcccatatcttccctgatcttatgtgcctatggccagccctgtgtgatcagaggctggcagggtggggggctaggtaagttgcctctggctttgaatgggtgcacgaaccaaatgaaggctccagaggccaagcccaaagccgtgccaaagggctggcaaacacaagaatgcaaatcaagtgtcccccctctcccccagtaagttcgctacctaaaaatgctgtatagccagctaggctacccgttccttgggcttctggagggtgagctgtcctaccacctaaccctttgagccaatggagccatcctccagatctggcttccacacttttccatgtccacagacacttgttgctggtctccactaccctgggctctgactctgcccagccctgccaggtaccctcatttcttgctttgctaccttgattaatagagggtgtatgggtcagaatgtaatgctgagtccctaggagcacccccagccagcatctctggcctggagtccagcctgcattcttctttctcccggtgtccctgctctgattcggtccatgccccacccctcctgacacacagtcagtcttcctctaccctgcatctctgaggctgctgggggctgcattgtcttcctctctggttcctctactaaatccactcctcactcacctccaggcaagtcttcctgacctcctgctcagggtctctcttcctctcccttggagccccaggcacctctgccgaggcttccactttctgagtcctccatgtttcctcctcggccgcctgactgtccagctgtgtccagatgttccttcagatgggtctgacgtacctgttacctgaagggcatgctggccactatcttctcatgcattccattgctactctaggctctcccttctatgcccacagtaatctttctctggggctgctgtcgagctgagccttgtggaagagctggcccccaggcagtagtaaatagccagggctgtgaccacaaggcttctctagtagagtggcaagtggcacacttagagctgaggttccatgctgggaccctccatgcagtctgcaggccctctggcactttcctcaagggatcataatgggaaacacgtgaccttggaccccaggctgctcaggcagcctctggcgggtgagaggagccacagccttgtgctgggaatgtctggagctgattctaaaaccaggtcttcctgttcctgcccttgttgatggctttgatggccaagcagtgtctccgggacaggactccaagggtcacatagccacacatcaccttgggaaggatctttatattcctgcccagacctgtttctccctataaggaaagaagcaagtgagttgtatgtctgtgagcatggacaggagcgggacagtgactagacggtggagcttgggacatgttagtaactaggctcagtcctgcaagcacacaggacattccacccaaggcctgagggacagccagcgcgtacagaggagagatatcgctgtggtgagcagaaacccctgcagatgctgaaggagcagatgctgaggtgaagcagagcagaggtgcaggagccctgggagctaaatgcctattcctcagcttgccccttgtgtgcacagcacatcgacacacatgtcacttacacagagtccttccctgctgtctgtgaagaggcagaggtcttaattacccaggggcctcctggctatctcagtcacctctctgtaccctaccaggaacctacagataatcaggccagaataggaaggcgatagactggaaagcaggggcccagagcaccccctggtggaaggcaaatgccacagcaccctgtccagggacctggaggacaaagatagggagagaattaggaaagccccagacatgtgctgtgggtaccctgcatccacacacaggcttcctggatggaggagcctaagtaggcagggtgggggtatctattccaggtctctgtccagcagggccctgggactgtcctgaaaggagataccgggacactagttggttacatccagtcctgaggtcctctgcgttgcttagggtctttgcactgacagggccctgggtagtccaaaggagctgtgtccagatggccacaagatggggtgactgtaggaaaatcattggagcttgtgggtgggatctcagggctgtgggggcaggtgggctctgcagctgtgtgttaggcatggataggcagaggaaaggagtcttggtttctgccgtgcatgtccacaaccattgcatatgcagcccagccagaggatgtccctacagggcctgcacccagaacccttccctgcctcacacggaagctatgggtcataattgcagggcaaagcagaggttgggaccaagttgatctgaaacaggatctcatttgctttcggcccctctttgttttccaaagacaaaagtctcttgtcttaaacttctggacaccagggcctgagggctctgggtgaccagccaagctattgaagagtgctagggggactttgatgcacacaaagtcctcagaattgtgctgtggtgagaaccctgagaggagcctgaatgtaccaagtggcgctgccgtgcccagcaggctcctggatgcccctgaccctgggctctggtgtgaacctctgtggtacagatatcttgaggtatgtgctttgagctgtccatgtagccgttccctttacctggtcttggtgtgccttggggtgaccataccaagggtactactccacgccattcacactgtaagtagagaggagctacccttgttgatgggccccaaaggctgtgcccaggtgcctggtgtctatctgcaaacataggcagctggtcatcttccggtggagccccaggaaggggagcctgagcaagtacttagctatgacatcacaggtcctccttagtgttcagcaacctatggtcatgctgacagaaggcccctacaatagggcagggtcaccgcaggcctttgggctatctctgacacactggccagtgctgcgtgggcactgctaaactcatcctggtactgaggggtcagtgagatcctgaattctacgatgccctagagcagcccgaggctggcacacatcttcatcctctagagctggagtggcgtagggagtgtttccccacctgtgtagagctccgtagggccctcaggagcctacccactcaaggggttaatgagcctccgaaacagagctgacctctgcctctcctcacccaacctcttgcatgggagccatgtctaatcagctgtactgggcaggtctaaatgtcccacaatcctttacagaggttggcgactctcatcgtgcccagatccgattgaatgtctggtctgggttagtaaagtcaaagaaatgtgcgcatgcacatgcgcgcgtgcgtgtgtgtgtgtgtgtgtgtgtgtgtgtgtgtgtgtgtgtcggcgtggggtagaggggctcctgcttccatctctaccaactgtccctgtgcttctggtcagtctaagatctcaatgagaagagggagactgtgaccctgaggccccacagggttgctggaagcccagtgtcctggaatgacgtatgccttagcaatggcctgtgccggatgcctgggcattgcagtgggctctggccctgaggtcatctgatatctattggcccatggtactcaagcttgttcctaggcacctgtgtttaccctcaacacagacaggcgggtgcttgctgtctgtgtccccaagccagctgacgtggccctgggcactcaaagagaaggtgggaaagagtacccctcctggggtgtctgggttccatggacctagccacacagtggaaggcaggttggcaccttgctgtccctggaggcctgccagcccaagcagagctcagccatctactctctgctataagcccgtcttctcttgggacctcagtttccatatctgttcttggagaccatcttgactgcctcaggcaggaaacatgactgtgagtgttcacatatttggggaattgaaaggcggcggcaattctgcacctgctgtggccaagccaagcatggatacagtcttggaacccaagtcttgccacggtccctcatgggacatgggcttgtcccatgctgatggtgtgactttacaagcctaggggcaggacacaggcatctgttgtgcctaactgatggcaagttcaaagccagagctgcaggaggctccctcagttcccacttccttcatgtccccgcccacaaatactctctccttcccactagtccctctgggcctcttcttaggcagtttcccttccagcacaacacctgtcctgctctgtgtcatttctcctgctccatgggcagcccagggtcacagaggttgtaaggacagactgcctgctacctccaggtttcccaaggaggtaacctcctgtgcctggagccaccccaagaatcaagagctccctgcaagtcttgttaagccggggagcctcccggacagtccccgccctttacacagcaaaaggctccagcagaattgtttcagaggcttcgggacagactgcatagcatgccttctctaatagttggttgtctggggtccacgccatgaagttggcctctagctgacccatctctgtcaactacatgataataagccccacagagggcaggcaaggaacaggaaacttaggcatacaggtctggggccttctcttaaaactcttggaaagtgaagtccttggagggagagccccttacccaggctctcagcatcagtatcatctgccgcctacctcagcaggagctgggagatgtgatccttcatatccccgtgcttaggggtgtcatgaaaggaggtgaaccttcactgagggtcctactttagtaggcaagggaaagatgtgtggagctgaggtgtctcagctccatcagcaaggtaaacaaaagtgtcgtgtgcctggcctgtctgtcttctggggcagggaggggaactggagctgagggtccctaaactacagtgagcacagctgctctccattgtagttaggggcaccacagcgctgtctgcaggtgggatttggtactacaggccgtaactctcaacgtgtgggttgatccctttggggggtcacatatcagatgcctggcctatcagacatttacattatgattcataacagtaaaaaaatatacttatgaagtaacaacaaaataattttatggttgggggtcactacaacataaggaactgtattaaagggccacagctttaggaaggttgaaaaccattgttctagaaggcccttgtgccttgttccccaacacacacacacacacacacacacacacacacacacacaccagcacacccagactacaagtttctgctggacagagatctgctaaggaggctcccctacctcctgtgggtgacaggattccacagtcaaaggcaagagagttttagtgactcaccaccatgaggctctggagctgtgtacttgtggtcaggtgactggctaatggcggaaagatgctggagcctgaagcctgtccttggcgtggaccctctccccaccctgaaaaccctatcccagctggactgtccacagtcagcctgaattcccaaaagaaacagcctctctagaacaggctgacccaggagtcgcctggtcctttcatttttacccagggtggggcctggtgaggagtgtgtgtgtgtgtgtgtgtgtgtgtgtgtgtgcaatctgggctgtggggtctgcgcttaccacctcattcctccctggtagagaggggaactcagcaaggtccacctgccagggctgcagtaaagccctgggaccaggctgggcctgagcacctccatctggccatcccagcatcagatactactaactcagcccaaggtcctgaccatgatttagactccccaagccctaacactggacaatacttcttatgcaccatgtcgggagagagctggctttagagtgaggctagagtcctaggcaggcccctgtgagatagtcttcaaccctcgggtaccaatggctcattccggtctctgtttctaggggggcaacaatgcggggcacacagtagtggtggacggcaaggagtatgactttcacctgctccccagcggcatcatcaacaccaaggccgtgtcattcattggtgagtgcccctgcagccccagcctgacttcctgaaccaggatgccagtgtgtgtggagagggtggggagtctcactgtacaaaccccaaggctgggcctgccttgtgtgctcccctggagcccccagccagaaagtgtcctctgagcctggtctcagcaggagtcagagggtagaggaagctttgtggcgcacacagagctctctctgtctctctgtctcagtgtgtgtgtgtgtgtgtgtgtgtgtgtgtgtgtgtgtgtgtgcgctcaagttcatgtgtatggatatgtttgtatgtgtggagatgagtgtggaacagtgtgccgtcagagcacatgggtctgggaacagcctgcgcacatttatagctgttctttcctgatgctgcctgggctgttatagccatctacccctcggacagctgttccagatgtctgacgaggcttccctaccctggtctctctgnnnnnnnnnnnnnnnnnnnnnnnnnnnnnnnnnnnnnnnnnnnnnnnnnnnnnnnnnnnnnnnnnnnnnnnnnnnnnnnnnnnnnnnnnnnnnnnnnnnnnnnnnnnnnnnnnnnnnnnnnnnnnnnnnnnnnnnnnnnnnnnnnnnnnnnnnnnnnnnnnnnnnnnnnnnnnnnnnntctacaaggggctggggtgggcggagtcagggctcaggctggagtgggcgtggttggggctcagactccacagagcccctcctctcaagtacacgctgtctctagccctccgggtccagagccaggatggtggtgacagtcaccttccacaatgaggagccccagctaccgaggtggcctgcccccgtgtgtgctcagcagagcggcagaacggggtgctgcccatcctttggggagccttcaggaaacaaactgcttctacccatccagaaccttccctggtggaacgtcacagtgacaatgcacgtgacccagatcatgtgctgctcagccctggggatggcttggagctgacaacaggagagtgactggcaactggaagcttgctcaagaacagaggagccgtgctcatccaaagggtgtctgctcgctcagagcagccactctgcaggagcaccagcctgtgcttgcgacactcctcgcctctctgctgcggggttatttcaagatgttgtggcatttgagtgaccttttatgttcagggtggcttgtgtaatctctgagtcactccgatctggactggtgttccacctccctctgccaaacctatgccatggccaaccccacgaggctagcgtagggttcctcctgagagcaacggtgatctctgcttacttggatctcctcagtccagaccctacactggcgagctgtgtggcttcagcaggccctcctcacccctctcggcctgtgtataggcatcgagctgtgtgggcttactctgaggatcctgtatttggttttccatgataaactatagcctccaggatccttgtagggttctggaaacctttccacatttctctgtgcttccgattctttttttttttttttttttttaagtaagtacactgtagctgtcttcagacactccagaagagggagtcagatctcattacggatggttgtgagccaccatgtggttgctgggatttgaacttcggaccttcggaaaagcagtcgggtgctcttacccactgagccatcggaagcaccagcccgtgcttccgattcttatggaactgcttcattgaaccatcatttacacattacgtcaggggtggagaaggagctcagtggttaaggacaccagctgcgtttccaatttccggcacacacgtggtagctcacgagtcggtaactgaagttccaggttatctgacaccctcttctggcctccatgggcaccagacatgctcagtcatatgcaagcataacacccacacacatcaaatgcaataaaataaaatattttaaattacccactgtaaaggtgaggcagcacagttgattctagaatgttctgaggcagtagtttatatttgtgttgttttgctttgctttgcttttaaggaggggtctcatgtagcccaggccagactggaacctgttccaaagccaagtctaaccttggcttgtcctcaccctgagaagtgggttgatttgaaaatttgagaacccagactggctccaaactcatgatcctcttgcctcagcctcccaagtgctgagagtctgggcctgcacatcatgtttgctgtgggcttaaagctgctgttctgagtccagagtcatagccacttagaccaggatgcagtctggtgtgctgggtagagaaggctagccctggaggtatgcaggggtgggggctgcaggaacagggcactggggaatctgggttctgtatatgttggatagaaagagggcttcctgctaggccaacctggagcaggcagcttgcgggcttgggaccctggctgtgttaaagctcagtccctcctctctggactacggtggttaccacatggaagacagcctccgttcctatttgctttctgttgctgaagcactccgactaaaagcaacttggggaggagagagtttatttggcttacattcccaggtcacagttcattgttgagggaagccaaggcaggaacttaaataggatctgaaacgaaaaccaaagaggaattctgcttactggctctcactctctggatcattcatgcccagctctatctgttagtttatctgtctgtctgtctgtctgtctgtctgtctgtctatctatctatctatctatctatctacctacctacctacctacctacctacctatctatctatctatctatctatctatctatctatctatctatctatctatctatctattttctcctcctcattctttgtttgggtcttgctatgtagaccaggctagccttgagtcatagagatctactgtgcttcttcctctagactgctgtgattgaaggcatgctccaccatgcccagcctcggctaactttcctttacagcccaggcccccgcctacgaatggcatcacccacagtgagctagggcctctcacatcaattagcaatcaggacatgctcacaggccatctgatcaagggagttcttcagctgaggtttctgctttctgggtgacttaggctgtgtcaagataaaaactaaacaggatgcctccataactgcccttgcctcacaccagctggggctgagtgtgcagcttccccagacactccatctgcctgcgttttagggtcctccagtcctcctgacagctcacttcctgaggcactaagaaatatcccagcatgtgacattcacagctatttatcccctaaccttccagaggcctcactaccctctaagatgtgtcagttataaaaagttgctatcgccatcttgggcaggctcagtgctcagcccctttgggtgaacacccaggattgagactcatggggcaccacaccactgtctgcagaactttccattccacatactaacactatggagccctaaattccagcccacctgcccatcctccgcttcccccagggtccagagactgatcgaagctctctgtctagctgataggtccagaagctctctgtcttcctgagtgtggcagcttgagacctcaccttagtgggctgtagggggtcatatcttccatgtctgagcccagtgtccccaagtgtcaccatgctgctgcatgcgatcgagtgaccacatccatccccatggtctgggtccttgagttgtttgcccttgctgttgacccataccatttgaaatgtaaatagtcatgagtctgtgccctgtgttgcaggcaatggcgtggtcatccacttgccgggcttgtttgaagaggcagagaagaacgagaagaaaggtaggtcatctgtgaccttgccccctcccccacaggcccactcactgtgcgctagctctgcagagcagacagcagagccctcactaagcagcagaagctgggcagctcagaatttctaagctctgcctacagcatcacaggcccctaaattgtcaaagtgcaggacacggaggaagaggctgaagcgaaaggagctctagcatgggtgtggtgtctcttgggttgcagtccggggagctcagcaggcagtgccagggcagggctgtggctgctgtgcactgtgtgtgctccttcagaacacttaagccaacagtactgagggggagggtcacccaagagtgcccacagtgtgctgtcttctctgccacatccctgcagggctgaaggactgggagaagcgtctcatcatctctgaccgggctcaccttggtaagcttcccatggggccctggggttggccccttcttgccctttccatagtacagagctcaggagaccctggagcgcctacctggcaccataggctgctgagccttactctttttaatgagcctcagggtagcagctaggtcaaagctggggtcatacttggttacccctttgtggagcctgggactctgggaccccggttctgctcccagccaggcacccttccgctgacccattctcctgacacaattcagaaaatgaagtccctcacaaacctctgccctctgcttctctcctgcccatgtgctggctgctggcaccagtgttcgacttccaccaggcagtggacgggctgcaggaagtacaacgtcaagcacaagaggggaagaagtgagttcctcttgccactgttgttcttcctcttcctggggacttccagtctgcctgagcaggagagggggccttgtcatccaccaacttaggggtcctgtgagaataaaacctgcaagaacaacagggtagcccagccttgggggtcacaccctgactctgttggctgccactgctgtctcctgacacagctgcaccatcctgagcacgggcacatcccataggggagcaagacgtctgaagaggcctggctgcccctgcttgaccaacagccacggcagcctgcagcaccctattcctgctcctgcccaagtgatgcttggtcttctgtccactcaggaatgttagttagaattccagatgtgccagggatgaaggtgggaagctgtcagggggcacacacacactgcctgtgcacaggtgcacagtgctcacatacatgtcaaggcacattgcttacacaactctgcatatgagcaagagtgtgtgtttgcatgtgtacatggcacacggggcacacaggtgcctgcacacatgcatgtacccaaaggttcacattcatgagcactcgtgtgtgcttgcacttgtacgggtacatgagtcacatggtgcacatgcattcatatatatgtactagcacaagcacactctcgaatgatcacacacacaagacacaggtggcgacagagagcacttgattgacttggggtcactggggcagacctgaggtaagtagaatcaacactgccacagtgttcttgctaccaaggcactaatgtcaacatttagaagcagacaggggaagccctgatgcggaaaccgaggactctcttccccacccacctggcatcctgctgctatgtgcttgagctgtccacatgtccccgctgctgctgttggtgaccttctcaccttctggccttgattcctggactagaccgcgggtctgccagaagctggggtgggatcagccgacctcctcagcagcgcccactttgcatctttcagtatcggcaccaccaagaagggaatcggaccaacttactcctccaaagctgcccggacaggcctccgcatctgtgaccttctctcggattttgacgagttttctgccaggtaggtctgcccaccctcccacagcccaggggtaagccatggaaaggtcggggaagacaggctgggaaatggagcagtcgaggccagtgtgggtcctcagagggtcacagtgagggttgcctgcacagattcaagaacctggcccaccagcaccagtccatgttccccaccctggaaatagatgtggaaggtcaactcaaaaggctcaaggtaaactgggcggggctctggggaagcacatgggggtggggcagacctgggcggagcccagaagtcccaagcaggtactactgccagctctcagctcctgtgggctctgcagcctcacgtggttgcacggtcctctcagggctttgctgagcgcatcagacccatggttcgagatggtgtctacttcatgtatgaagccctgcatggtccccccaaaaaggtcctggtggaaggtgccaacgcggccctgctcgacatcgatttcggtgagtgctccaccgagcagttccatcctgaggggctctaacccggtctttcctgtctgctggggacgataagaacataagaacgcatgaagcgcactcaccacaaggatcccgttgtcctgtttgcctaagtttagctatatcagggagcttccaaaaggctgaactaagatgagggaattgggaccgagatgccagaggggggtcaagagagccttgcaaggacaggtacttcatatcgctagccctcggcatgccagtctactgccctgattgttggggaagccaggccacctcagtacaggctcctatgtgatttgcagagcaccccatttaggccactgccccaggacaggcccccagactggtggccggggtgatccccatagagcagtggttctcaaccttcctactgctgtgaccctttaatacagttcctcatgctgtgccaactccaaccaaaaaaattatttgatacttcataattttgctactgttatcaatcgaaatgtaaatgtgtgttttccaatagtcttaggcgacccccatgagaaagggtcatttgatccccaaaaggggtcacaaccaagaggttgagaaccaccactacagagggattccaactgcccttttctgaaaaggcctcttgggccctgggatctgcacagggtaatgagtgtccactggttgttctgtcctgcagggacctacccctttgtgacttcttccaactgcactgtgggtggtgtgtgcaccggcctgggcatcccgccccagaacataggcgatgtgtatggtgtggtaaaggcctacaccacccgtgtgggcattggggccttccccacggagcagatcaatgtgagttccagcactggggtgaggtgggatatttggggtggtgtcaggtggagctgtaggtatgggaaggggaccctactgggcaattctccatgtcctagtggggtctttttacagcacaagctcagaggtgagatgttagaggctttgaaggccagtctgttccaacaccatcagcaacacacttcacaaaaggggtgtgtgtgtgtgtgtgtgtgtgtgtgtgtgtgtgtgtgtatgtgtgtgtgttcacaactccattttcctgtcacgcacatgaggcccacagatgagtgggaaatcttcagtacttagaggttgaaagcaaggcccctgttcccatctttctagccttgggagcatttcttgaaactactgaggcctcagaaccttcttcctgggcttccttacctggccttaccctgacacctgattcggatgagtcgtggctcttgtcccaggaaagggaagtgtctgagagagcctggggtgggctgtgtttagggtgggagataaaccctgcccctgcaccccaagttgcaggacaagcccccacccctacttgcccacacttaaacaggataggggaggtgggttgcctgcgcctccacacacaggctgggcctcggggacaagtcctgcctcctcagaaccatactggggagcaaagtcctgtgtgagacctcagctggaggaggatggagaggagaggaagccatgagcacaggagacaagcaggcacacgccatacctgtcctggccaagtgcccaacatggcgggcacagacggtcctttattctcacataggaaattggagatctgctgcagaaccgtggccatgagtggggggtgaccacaggcaggaagaggcgctgcggctggctggacctgatgatcctccgatacgctcacatggtcaatggcttcactgcgtaagcagcccttctgaatactcagggttagggttagggtcagggctaggcaccatcaaagcgacaccacacgggaatcttctcccatcccaaaggccacagtgcaagtagaactcctctcaggggctgggccccaacatctgtgtggagtctttttatgcaaccaagtgccctccccaaagtgcggccaatgctagggagtgacacggaagctataggtgtggagcaaacccagaacagggtcactcttccatcctgaccaatccaaaaacactgtgatggtcacgtgagagttggtgtgaggctgcccgggtgtgggaccgagtgcaaggtgaggctgatccagagctgaagtaccagagccaggacagagcatcctcgaggacaggcatctttgggagtcattcactcccttaccatgcacatgcaaatgtggccactggttttgtctgcagggcttggggacattctacaaagtacagtggtagtttctaagccagaaggacctggcatttctagaaccctcgtcccataggaggaactctgagagggggttgggaaagcagacaggcaggcagggctccaggtgccttcctaaaggtatggggtcaagccagcctcacagctcccatggaccactggaaaccgacttatctctcctgaggatacagaaccccagtgagaaaggctcccacggtcaggagacaaaggtggaaggggtcaaggttgggtaagggcctaaagcaaggcatccctccatccacaacaggggccttcccaggtcctccacccctgtaggcctgcgaggatgctctcagttgggatactagaacaatttccttcaggagtatcagggaacacagggtagacctcagagtctttgcaaaggtctgattgcttaggacagaatgagacttcataggacgctggcttccctgtctcctctccatcttggtaagaggggcagggctaccccaccagcattggaaagtctctggtagctttaagacaaccagaacctccctaggtgggaaaagagctgctaggtagctattagtatgagactggtgaagaagtagctgagaccttgtgacgtagatgtaggatagcacgtgtctgcaccccacattcagcctgagaaggcacagccagataagatctacccatgaagtctgtatggaaagaagggagcaaaaaaaaaaaaaaaaaaaaaaaaaaagaaagaaagaaagaaagaaaagggggggggaggaaagaaactttggtacaaggcagttttgaagaaagccaagaaaggccactgccaggttgctctggggtggtgcttaagcagatgcatcctgggaaagtggaagaaaaagtggatactgtgctctagcagtgggccccaaaagccccatgctacagggcaaacatggcaagagcattgggcagaggaggcacccgctggcaagagagaaagtcaagatttcagcaatgcagatgcaggactcaggcccagaggcaggcagtcctctagcctgttcagcagttgcattggaggaatcccctaatctttgccatgtttcgtgcaaacaacaggagaaaggggagggtgaaaaccagacataagcaatgacagggtacatttctccattttgtctctgtttcttgtttgggggacaggctggcattgaccaagctggacatactggatgtcctgagcgagattaaagttggcatctcctacaagctcaacggaaagaggattccctacttccctggtatgtgaggcgaagcaaacctgagttctcttcgctgtcgggatacatcttgagcatcagaatagatatccactagtttctaggtgactaggagaggcattcctgcctccagcaggcaaaggggaggggttgagactctgagggccactgcttgtctcctaagacctgcaggcagctgcgtctctcagtttcttggggaggcctggcccatctctgggaagccttgggccttctagtggcttggaaatgtgttgagatagggctgaaaggtaggctgggagtccaccctgccaccctcactagcctcagaaaggcctgtctccaggaagatggatagcctggagactcaggagacatgagctgccctgaaaaccatggatctctagggaaatgcatttcagatgagaaaacctgccctgtggatagattcctttttattttctggtgctggggataaaactcagggccttgcctttgctaacaggtgcttagtcccaaagctgcttcctcatccctgagtgacacataagggtctggcctggctcctgtgcctatgggccctgtcttttcttaaacacagggctgtttttctggcgtttgggttcttgtgtctggaatatgcctgtcagcctcaggtcagaggcagatcttatcaacagagactccctttcctacagcacactataggcaaactgcctcttgcttaccacttccaaggaaacccagacagattcagtcctgtcccttggcttgtggggccatgtgtatccttgaggcctgggtttttgaccctattgacccctgacctttgaaaggatgatccttcaaggtcatagagtcttgccggtggctctgggctctgtggtaatgtggagtacccaggaaagacactgcctggatctgaggatcctataaaggctgcctattccagcatcttccattagcaagggatgatgcaccaactactagtcatggggtcccagcacaaagttgggtgtcccaagcaggaagagccatgtacctttaaggatgtcttggctttgggattctagaatcctttataatgtccagttgtacctcagagtttccctattgacaaatctgtcagctactcagcagatgccagtgtctcacaactggccatgcttcccggctggaaggggcacagccaatgtttgagccccacggcatcccctgatcactgcccaatgctgaaaagccatcagggccacaggtcctcagcagccaagtcaccaggtgagaagacgaccgtctccacaagtgggatagtctacggacccggctgagcccaccctctcccatccacagctaaccaggagatcctgcagaaggtggaggtcgagtatgaaacactgcctggatggaaagcagacaccacaggcgccaggaagtgggaggacctgcctccgcaggcccaaagctacgtgcgcttcgtggagaatcacatgggtgttgcaggtgggttcttcttacccccacaccctcagccctggataccccaaagggcctgtacctcaacacaaggcctagtgagaaataagaacccctgagcagtaaccacatgaatgggacagacaagaagaggtagatctagaacaggtgccatcaggggcaggtcatttcctcagctccagccaggctggggtccactgactcaaactagggtgtagcctagggtggaaaaaacaggcagtgtgtatgtgccctgtcgtctagagaaggtccagggtgtgtccctatggctcaggcaaggagaagcacagggcaggagctgctttctgctgcccaaggatgagtgacccattatggggcccacagcacagttttaaatgctccctttctggggcaggggaggtggctcagtagtgtagagccgtgttgctcttgcatggaccaggatttgtttggctttcagtacccacgtgtcagctcacagctgtctgtagctccagttccaggtgatcctatgacctcttctgacctctgtgggcaccaggcatgtatgtggtacacatacatgcatgcaggcaaaacacttatatatataaaataaaattctaaaaatctaaaaatggctatttaataaaaacccaccctacttggcgaacaatcagaccctttgccagaggaatggaaagcacacactacaacgttgttttttgtttgttttaaagatttatttatttattttatatatattagtacaattatagctgtcttcagacacaccagaagagggcgtcagaacccattacagatggttgtgagccaccatgtggttgctgggaattgaactcaggacctcaggaagagcagtcagtgctcttaaccgctgagccatctctccggcccccaacatgctgcacagttaagggacattttttaaagtgtgtgtacatgtatacagaggcagagggcagcctcaggcacaccctcaggaacactggctacctctttttaagataggctttgtcattggcctagagctcacccagtgggttgtacttgctgtcagtgagccccagggccctacccccctagtcctgggatgaccagaactccaccagactagcattagtgttcatggcctctcttctgcactcacggcctctcttctgcgctcacggcctctcttctgtgctgttgcctttcagtcaaatgggtcggcgttgggaagtccagagagtccatgatccagcttttttagatgccaagtggaagccggcaggccacaccacagtgtgccaccgtgagtgacagccgcagccgagaccctcggcagtgccaccaacaccttcaacgaaacagtctgaagctattttccatacttttatttttctatgtatgttttcagcttgaaattgttgagccctacaacaattttacatgtgtgaaatcaacactgtgtacatttaaaaaaaaatctgcttttaaaatgagcctaagtgctcataacagaggccttcactgactgattgtcacatggtatgtgttcagttggagccatgtcataataaacatagccaggggtcactgagccaccgagaggtcattacacctgtcttgacttcgtccttgttacttttaaccacgaatgacagcctttcccaatgaccatggcctacctgatgccctcccagaaaacaaaaccccagcagccgtctgaggagtgttgcccccagcccaggacccatgagaggaaaatcagaagcagacagaaccagactgcacaaagtgcagcttcctcggggcttatagacagcgaagcaggaacccatttcccagggtgagagaaaaaggctcacacaaagtcagacaaaagtggctccaggtcatctgaaaggtgcctgccttcaaaacaaaacacaacgattgtccaatcaagcagtggtgtgtgtgtcttcacaatggggtggctgagggacactttcctccagagcctgagagagtaccagcattccctggtgggcaatgtgcatgtttgtttgtttgtttgtttgattgtttgttttgagacagggtttctctgtgtagccctggctgtcctaaaactcactctgtagaccaggctggcctcaaactcaagaaatctgcctgcctctgcctcccaagtgctgggattaaaggtgtgtgccaccacgcccagctgctcagccggactcttacatttttggtgtcagggagctacagtgttatgcttgctcagaaaacaatatccagggctggtgagatggctcagcaggtaagagcacccgactgctcttctgaaggtccggagttcaaatcccagcaaccacatggtggctcacaaccatccgtaatgagatctgactccctcttctggagtgtctgaagacagctacagtgtacttacatataataaataataaataaatctttaaaaaaaaaagaaaaagaaaacaatatccagcaagcgtatgcaagacagatttgtatattacagggttcccagaagtgagcatctgagcacacacatttctagagctgccagggtatccttcctgcctccagggacagagcagcccagacagcccctcatcatcctagccagacacttggtcactgtccccaggagcttctccagactgaacgagacatgtcttactagtactgcctctgctccatgctcactgcgacatcaagaggcctcgaatgacgtgccagcatttggggtccattaggccatccccactctggagacatattgtgttttcacttccatgacaaaacatctaaagaaaaaaaaaatggagaggatttattttggatcactgtttcacagattttagtccatggccaggctggctccgttattcggggtctgtggtgaggcagaagcatcgtggtgggaggcatgccatcacgaaggaaggagtgagacaggacagagatgtggtaagggatactgtcagacacactctcagtgcgagtgcggcgtttcctccaaccaggtctcacgtagaagctgattacccagaaactcactgctgtgaacaggcaccatgaccaaagcaactttttttttttctttttcacatcttttctttttttcttttttggttgttttcaagacagggtttccctgtgtagccctgggtgtcctgtagaccaggctgacctcgaactcagaaatccacctgcctctgcctcccaaaggctgggattaaaggggtgtgccaccaccgcccagtcaaccaccaaggcaactcttataaggataacatttaattggggctggcttctaggttcagaggttcagtccattatcatcaaggcaggaacatggcagcgtccaggcaggcatggtgcaggcagagctgagagttctacatcttcattcaaaggcagagaggagaagattggcttctagacagttaggactagggtaataaagcccacacccacagtgacacacttactcagacaaggccacacctcctaatagtgccaacccctgggcccagcatatacaaaccacagccatcctgaccttattacccttcaatcatgacgtcatctgaggacggagccttcaacacttcatattcatactagaacgggagtcaggcccagtggaaccccatggcgcttgtacagactgcactaggaagtgcggattctgggaggaaaaagtccattatcttaacatgaacaacagccttcttagtggtggttcctgggacaggtcgctggatttaagccatgcagtaggggacaaacgcatgactccacacagaggtatcatccattctgcacagttctacaaccggggaaaccaccatttgggggtgggggtgggggtggggaagcacagcagtcagtagtcactggaccctattgtcctatttagaattgtgctccttctttatgtcgaaggcctaactcccaagagtcagagtgtgattgtatctggatacagttttttgttcggtattttgagactgggtctctctacctagcccaggctggcctccaactcacagagatcagcctgcctctgctttctgagagctgggattaaaggtgtgagccaacacacagggctggtggatatagtcttaaagagttaaaacagggtccttagggcagaacttaattcaaagtactgggtgttattatgagatgaggacacacacacacatccagtaaggacacaaaagtttttatttgtagattctggaagacagaagcctgcagagaacctgacactttgatcagagacttccattctacaaagtctggagaattaacgggtgctgtgtgtacactccgggtctcctgtactccaagatgagcacaaaacttaatgcacccgaataactgacgttccgattgtgtagaaatagaaggactgagaaacccctcagcatcactgttttgcctgttcaacatgttagaagacaccacaatatttttaaatcctgaccagcggacccgcaggtgacgccataaaccctcaggctccctgcccaagatcagacctaagggaacacaagaggaactcgtaggggaagatgggtgcccgtatccactaagatcaggagctgggacaaaacccgccaccctactgtttgatactgatatctcacctatcacctatcaccgttgcttagcgacaacagagccttctggcttttcgcgcgctgagccccgccctcgatctcgtgctggtttatgcagagccccttagcacacgagtcccgcccccaacgtagcatcccgctaatcccgcgccccaccccagagccccgcctcttagttcccggcctatcctgagctgtgacataaactagccccgccccaacacaacccccccccccctcggcctatcccgtgccacgccttgcgcagacctcacctcgccgcgccagcgcccttggccttttcccgcgccctgcattccagccactgcctccctcagcctatccctcgccgttaactgcgtaagtcccgcccccgacgtcactccggcctatcccgcgcagcggggcccgtttgaggcgagcccccagcctttctccggcctattgggcgccgcgccctcgtcggctcgggcctccgccgcggtccgagggcgccgtgacgtgtgctcggcgcgcggcgcgctgcgcgctgctgaaggctgtgtctggtacccgctaccatgcccaagcggagctgcccgttcgcagacgcagccccgctccaactcaaagtccacgtgggcctgaaagagctgagccacggtgtgttcgccgagcgctactcacgcgaggtcttcggtgagtgtggacttccgtgggtagagcgcgctacgccgcgcagggcagcgggagaccgcgggagcgtcccgagcgctcacggtggatgctgcttcaggcggctcccggagaaatccgagtcggacccgagtgctgccgagcggactagcctagcgcgggaccgacgcggggactgggttcgagtgggcgtgatggcgtagactgccctgagccctcgcaagtggcctttgtagcggatggatgttgctgagcattgccttgcagtgatggctttctggggcaggtgtaacgcagtgtaccgtagcttggcgcagtttgcggccgtataactttgagcggtgccgctgcgcctttggaatgtgcgggaaaacaaactccctacgcagccccagtatttgtcctttccctctctgtactctgggaatgcaaactcaagtgctgagacgcaggggcgatgcgtgaagggacaggactgagctgcaaagagtgtgcctccccccacgccccccagtctagacatggcctggcgtcgtggcttgttttttgacgccagcactcagaagggaaaggcatgggctttatggtgagatgtcttaaaacagcaataacaatgcaaacacggcccagaaaatgcctcagctggttaaagtgcagtctatgcaagcctggacatgagtcaggtcccaagaacatacagtaggagagaattcctgaaagttgtcttccgaccacactcatagtaactaaatagccaagtaaattaattttttttaaatgtaagcatgcagttgaaaagaaggcctaagtgttaattggaacctaacagcctggctctacccttctgaggacttgtgtgttggagcatttgccaggccactcagagccagccagtcaggaaggggtgcagggctctagcgagttttatagtacacacagtttaccaaaaccccagcccacactctggactctgctggaccaggaggccttaaggagaaaattgctctcataatggaatgtgggtttgagccccacctgtgttaagagtacccctccaggaactcttcccatttcttgtttttcagacaggctttcaccgtgtatcttagcctggccttgaacttaagtaattctgtcttaaagtaggaggcaactgagctgggaatagccactctctttgagtttttgtttgcttccagtgtcacagagaggtccctgggtcgtgggagtgagtatttctagaactcgcaacagtgtttccctttagggctccctgggcctgaagcccgaaaggaagcaatccactgttataggtgtgagcagccagttacccggggttggtgggtggcagggctggaacatctgggaggtctttgtcagggggttgttgtcattgtccctttagtaaagttgttcactggcctggcaatggttgtaggtgctgttctaaactcgtgtctgttttctgcctccttgggacacttgcttttgggaatgaatggttctgagccagagctttctctggcactgagacaagcttacaggaggaggactgggagtgcaaagagggcaccaaccaggtgaagtgaatagctgtggctgctgacaatagaataatgggaggagcaccggagtggagcacagcctggtggctgggaacaggcaaagggggctccgagccttgtgggtcataggatatctgtgcaaccgctttgcggtttggagagttatcttaaggaaggctcttcctccccagaaagaaccaagcagctccttttccaaggggctcgggcctatagagatcacatatcgagcgaagattgttccgtgaaccacctgcaggagtcactgaagtctggtgtggtaggagcccctcaacctgcgaggggacagatgttgattggacctgatggccgactgacacggtgccaagctcaggcctcagaaggtggtgagtggccgccagtggggctgacctgctgttacacctagggaagatggtggcagtgttctgttcaagagccttgactacctgggcaaacaggatctacttagagcagtggttctcagcctgtgggtcacaactcttcgacaaatctctgtctttaaatatatttatgttgcgagactcatgacagtagcaaaattagttatgaagtagcaatgaaaatgcttacatggtttggggtcaccacaacatgaggaactgtatatattaaggggtcacagccttaggaaggtggagaaccactgccttagagcctggtaagtggagcaaatgttgctgggcagtctgaccctcacaggcatccagagtggacgtcaacaggttccaactggcatctcaagctctcctggtgccccacctgcagtaagaagatgccagtccgttccctgttgaggggtggttctcgtgtgactcgtgaaaaacaggactctgcttcagcccagaagcctctgggctgaccagtgaaacagtaaaccccatcttgagacccagacagatagagagttctgatagagtactccggccatcctagcaacaggcaggtgatctgtcctggagtcctgtgaccagtcctgggaatgaatgcctcatcgtgagcctttagtctagtgctccaggtggctgatagataggttgccaaaaggactcggttgcaggggaagaagggtgcctgtcaccctcgtgttcttccagtgtccttccaatgctgacagcctcggtgttttctcctcacaggccttcccaggacagcgcccatcgcttgttcatcgtgcatgagatctgtggatgggaaggcggtctgcagccagtgcgagcgggccctgtgtgggcagtgtgtatacacctgctggggctgcggtgctttggcctgtgtgctgtgtggccttgcagagtgagtgctttgacctgatcacggtccctctccgtcagggcacaggtgctgggtgggtgactcggatccttttggaagaagtccgtgcttcccagtagtctgcggcctacttaaagcagctccctggcttgcacagccttgtggtctggacttctgagtccttattagggctccaacagtccacactgttgtctagtttcagtttctgtccagcgtgcgtatcatttgaggattgcctcacacacgtcactgggtgtatgtacattcaggtcatgcctacccctgtgtgttaactgtgtattagcagaatggaatggatgctgcttacccattggctgcagccagatgagtcagctccttagaagtgctcagtgagtgggtggacagtgtagagccctgtccctttgttccacactgtagggacttgttccaccaaatgagtatgggatcagtacagtggatccggataagctcagccccaacattctctaaagctaatgcgtcagatggaaaaccacacttcatatggcaaatcctcgccaacagagtactcttcagtggtttggagagatcaggagtgcttgcaggggtactctggggagaagtctcaggaaccttagggctgattcatgctaaggtgggagggagagtttcccaggctgcctccaggcttgtggtgactgctataggtcctcaggtttgtgtcagtggccctcttgttgctatgtcttcatgtcactcctgtgtgtctcttatgacatctcacccgtctggtaaaccacaaaggcctggaaccaagatgcaagacccacaggatgtttgcatgctaggcctccttccagagacagtggtgtccccaaactgtccctgaaatgcctatcacctgagtctgtcttcagacaagttcccattctgatgtgtgatgcgattagggcctcagtgagaggggatgcattcagctacttaggtatcttctctctctcccaccaactgtgcagctatgccgacgatggtgagaagacactgtgcaccagctgtgctatgtttgaagcctgaggtggccacagacagcacaagatgttcacactaaagagagagaaggtggctttttatatgttatgttttatacccagtaacaagtgaataaacctctttatatttgcacaaggactccctcccttccatctgttaaccgttcttagggtggcagtgacggctgcaggggcaagccctcgcagcagcgtgcagctcagctgtcttggcattgagacccctgcttattacccacatctaacaggcaagccagacccagcaagttccttcctgtcctccctcagctgtaagaggaagcagctggactccaggagtcagactgcagaatggtcacctgcgtgctagacaacctcaggcactgaattgccactgtcagtcacataggcagccatcaatacctacactgctgggttccaggtgatttaatgagcccttgtcctccaggggtttggccctgtggaatgtccctgtgtggttgtgacagtcctcaccatatcttcagaggtagtttatgcagggctctaaggagttcacaggaggtaacatggcctggaagataatggtgggccagtcactgcagccacctgggtctcctacttacaagtggttggctgggtagatagggcagaggtctccttgtcctgatctctaagaacaactatggttagttcccatacatatcgaggaggtgctgtcctagatggggttggttcaagtttccctatactactgaaaagttggcccagaggccctacgtgagcaggaggctagagagggctgaggtggggaaaggccttacgcacctgggaagttcccttattgctgtggataatgggactctggctggttttaagtgtggaagctggtggtctgtaggtagtgaccaggagctgggcccattagggcccaaggtagcagttagctgctgtagccttgctgggggtggggcggggcagggcacccagataggccagcgactgcggctctgaaaatggaatctggggatcctaactggagtctgtctatttgtctgtctatttaattttctttgtggcaagggctcactgtgtagccctggctgtccttgaactcagagatccacctgcctctgcctcctgagttttggaactaaaggcgtgcgccaccacacctgactcgattagctggcttgaagccactaagccacttgagctggctgttggtggccaaagcaaaccctgaccgtaccccacacccatcccatggcttctggtgctgttttatcctggcctagagtctttgtactatgagcttctgctgtagctagcccatctctgtcaccagtgggaatcattgcccagtccccaacaccttcaggctgccctctctcataaacaccagactttacctctcctgcttcctgccccgctgggggttcagtctacctcccagcatgctcaacatgctttctttcaccttagaccttcttggctcccttcttggctggaggcccttcctctgggtgtttgtatgttcgtttatgtctctctgggttgggctcagaagcatcctagtccttactgcacagccctgtaggcttttctgatccaccatagagaatacagatggatgcttgttattccttccagctgccatgcagattcctgagagctgtgacgtagcttcaaatgacatcttacatgtcacagacttgtagtaatctgcccagcatccagccatgaggtagcggggagtgtatttgagtgtgcatgtcagtgtggggtgcatgcctgagtttgcatgtgtggagccagcaatctacttggtgttgtttgggttttatttggtttgtgggtggtttggcttttgaggctaggccccatttggcctggagctcacggattaagttaaactgtggacagcaagcctcaggccccccgccccgcgtcggcctccctagcattaggagtgtaaaccaatgccaccgctgtgctttgtaaatacaattgtgggggccaaacttggggcatgcttacatggcaagcattttgccaacagatgccccggtccctagccaactttaaaaaaagaacaaagtacttagatattggacagcacccagcgtcagatgataaccccagagggggtgagatgaacccaggttctgctgagaaccctgcctgctgagcatccacctgtggtgtgggaggagattgagagagcttgtgaaaaggatcgagaagactgggggatgagagctaggatagccaaagtttgcacagcagattgccagtggatcaaagcatccttgatggtgttaattaat

SEQ ID NO: 360 - DNA, 1734 bp, Mus musculus
ggcccagagcagcagaggagctaagccagcatgtccgggacccgagcctccaacgaccggccccccggcacaggcggagtcaagagggggcggctgcagcaggaggcggcggcgacaggctcccgcgtgaccgtggtgctgggcgcgcagtggggggacgagggcaaaggcaaggtggtggacctgctggccacggacgccgacatcgtcagtcgctgccaggggggcaacaatgcggggcacacagtagtggtggacggcaaggagtatgactttcacctgctccccagcggcatcatcaacaccaaggccgtgtcattcattggcaatggcgtggtcatccacttgccgggcttgtttgaagaggcagagaagaacgagaagaaagggctgaaggactgggagaagcgtctcatcatctctgaccgggctcaccttgtgttcgacttccaccaggcagtggacgggctgcaggaagtacaacgtcaagcacaagaggggaagaatatcggcaccaccaagaagggaatcggaccaacttactcctccaaagctgcccggacaggcctccgcatctgtgaccttctctcggattttgacgagttttctgccagattcaagaacctggcccaccagcaccagtccatgttccccaccctggaaatagatgtggaaggtcaactcaaaaggctcaagggctttgctgagcgcatcagacccatggttcgagatggtgtctacttcatgtatgaagccctgcatggtccccccaaaaaggtcctggtggaaggtgccaacgcggccctgctcgacatcgatttcgggacctacccctttgtgacttcttccaactgcactgtgggtggtgtgtgcaccggcctgggcatcccgccccagaacataggcgatgtgtatggtgtggtaaaggcctacaccacccgtgtgggcattggggccttccccacggagcagatcaatgaaattggagatctgctgcagaaccgtggccatgagtggggggtgaccacaggcaggaagaggcgctgcggctggctggacctgatgatcctccgatacgctcacatggtcaatggcttcactgcgctggcattgaccaagctggacatactggatgtcctgagcgagattaaagttggcatctcctacaagctcaacggaaagaggattccctacttccctgctaaccaggagatcctgcagaaggtggaggtcgagtatgaaacactgcctggatggaaagcagacaccacaggcgccaggaagtgggaggacctgcctccgcaggcccaaagctacgtgcgcttcgtggagaatcacatgggtgttgcagtcaaatgggtcggcgttgggaagtccagagagtccatgatccagcttttttagatgccaagtggaagccggcaggccacaccacagtgtgccaccgtgagtgacagccgcagccgagaccctcggcagtgccaccaacaccttcaacgaaacagtctgaagctattttccatacttttatttttctatgtatgttttcagcttgaaattgttgagccctacaacaattttacatgtgtgaaatcaacactgtgtacatttaaaaaaaaatctgcttttaaaatgagcctaagtgctcataacagaggccttcactgactgattgtcacatggtatgtgttcagttggagccatgtcataataaacatagccaggggtcactga

SEQ ID NO: 361 - protein, 455 aa, Mus musculus
ASMSGTRNDRPPGTGGVKRGRLQQEAAATGSRVTVVLGAQWGDEGKGKVVDLLATDADIVSRCQGGNNAGHTVVVDGKEYDFHLLPSGIINTKAVSFIGNGVVIHLPGLFEEAEKNEKKGLKDWEKRLIISDRAHLVFDFHQAVDGLQEVQRQAQEGKNIGTTKKGIGPTYSSKAARTGLRICDLLSDFDEFSARFKNLAHQHQSMFPTLEIDVEGQLKRLKGFAERIRPMVRDGVYFMYEALHGPPKKVLVEGANAALLDIDFGTYPFVTSSNCTVGGVCTGLGIPPQNIGDVYGVVKAYTTRVGIGAFPTEQINEIGDLLQNRGHEWGVTTGRKRRCGWLDLMILRYAHMVNGFTALTKLDILDVLSEIKVGISYKLNGKRIPYFPANQEILQKVEVEYETLPGWKADTTGARKWEDLPPQAQSYVRFVENHMGVAVKWVGVGKSRESMIQLF

SEQ ID NO: 362 - DNA, 21728 bp, Homo sapiens
  misc_feature (1)...(21728): n = A,T,C or G
cccacacccgcatgcgcccggtgcagcctgccaagggccagtcggggggtgctgcgtcctgccagtgtccaccacagctctgcctgcccttcagcccagcaaggtttaatcaaaatgcaatgctttgcaagtctttactgcttggaggtggctgagttgggggccctgggcaggggtaagctggcaggcagtgccatggcaggccagggtcccctcccatggggtctggcccccgttccagcatgtccagcccctgaagttggagttgggggcggtctgcctttgctgccactgccaggcctctgccctgcagctgaaacttggccatcacatcaacagaaaacccctcccagtgccagctgcccagcgtgggcaggccctggggacaatacaggtccacctgaggggctgcagggtgacacccagcagccgctgccccctcactgcccacccagcgagggcagcctacccgagcctgccccctgccaggtgtgtgccctgaggctggcggctggatgcgtggccaataaaaagcagacctagcccggtgtgcgactgtcgtgttcagaggctgcgggagtgggcggtggacgtgggctcccacaaacatggtgagcgctggacaggccccgtgtgaacactcactgttgaggggcccccaggccccgtgtgaacactcactgttgaggggtccctgggcccccaggcaccgtgtgagcattcactgttgagggtcccccagtcccccaggccaggggctgtccctggagccctcaggaggcagtaagaaacatctagaagagggcagacccagtggtgaaccgcatccaacagtggtgagatgggtgcagctctacaggggcgtaatttacaaaccaccagactccctggttatgtgtgtgctgcggtggtgtttgctctccagcagatcaaatttgtgcaatgatccattttgagaatctctccgtcaccccaagaagtcctctcgcacccatcagtccgaccccttccccgtgctcctccccagccctggcagccactcacctgcactccagacgctccagatgtcatgcatgtctcctggcttccttcggctgttttcacgcgccatcctcacggcaggctgtatcaggacttcattccatttcatggctgaagcacattccattgcatgcagggaccacattttgtttgtctgctcttctgtccatggacatctgggttgcttccagtttggggcttctgtgaatcctgctgctgtggacatttgcgtagtcctcgtgtggatgctgctgtggacgtctgcgtcgtcctcgtgtggatgctgctgtggacgtctgcgtcgtcctcgtgtggatgctgctgtggacgtctgcgtagtctcgtgtggatgctgctgtggacgtctgcgtcgtcctcgtgtggatgctgctgtggacgtctgcgtcgtcctcgtgtggatgctgctgtggacgtctgcgtcgtcctcgtgtggatgctgctgtggacgtctgcgtcgtcctcgtgtggatgctgctgtggacgtctgcgtcgtcctcgtgtggatgctgctgtggacgtctgcgtagtctcgtgtggatgctgctgtggacgtctgcgtcgtcctcgtgtggatgctgctgtggacgtctgtgtagtctcatgtggatgctgcgagttttcgttgctctggggtagattcgtagcggaggaacaactgggcgacacgctaagtttatgtttaactttttaagtaactgcctaactgttttccaaagcagctgcaccatttttcattcccatccatgctattgtttttcagttaaatagctccactcctccccctccccaccctccacagaactgccagtaaaactggactatggagtattgggtggggtcacctacaaggtcatctgcagcaagtgagatcatcgcccctcctgcctggagaggtgggactggggaccctgtgacaggaggagctgcccttcctggagcctggtttttctttttcctctgtgctccatgagaagtcagtttagtgggctacagccagcaaaggaaccaaaaccaacaggagctctgggggtgccttgcatggcgaggctccgtggctgcacgcgtgtatgcaggtggctgtgggtgtctgtgtgtcctgggccactgtgtgcgatggtcccactgggaggtgtggcccccaaagagtggaacccacaggtggacacacccatgcaccctcgttcttgcccaaggtcacacatcgagacagcagggcccagatggatggccccaagctcggtggctcccgtgctgcccacacctggggacaggcccactgtggggggtaaggggtggaggtgttctaattcgggctgagccgtgtgactggcaggggccccagctgttgggcctgggcaggactgtttttagaaaagccccaactccctgcccctacccgggcccgtggctatttatagtccgggcctggagaagtcagtgagtcactagcgttcgcctctgcagggtcagtccaagcccccttagtgaggtggtctagcatgtcccccagtcccccaagcctctatctgacatctgctagcccagagccccaggggtccccaggaagggctcagagctggtggccccccccaggccttggcagcacctccttgtctgatgggactttgtggttcctggtggacatttaacattgtcggtttctctcatctggaaacaaacctccatgacgctcttggtttctcctgttgcagtctgcctcttccctacctgcacagctctctgctgtgccccaaattccctccttgacacccccagacccactgccccaccctcaggtgcagccccttctcagcaggctccaggttctgccaaatctcagagccctccaaccctgctccagccccttcccaagctgaggccggtggtctgttcacccccgaccagctgtcacccccaaggtggcactaggaagttcatgcatgaagactgcttttccactgaggccccactgactgcttggaacccatacaacggcattttccccgcaaggatgctgagggagaggaagtgtcgatgtgcccggtggaagaagaggggactggggacatgggtgcagggggcaggaggccaggcttcaaacagcccctctcccccaggctggggcacggtcaggtgccaagagaggaggggtggggaggctgcaggcaggggtgggcagtggtgtccttggctgcacctgaatcactaactcagtgtgagcgacctttgctgtgacaggcccaagctccactccttcctcacagggagtgtcccgtctccatggactccctgtcactagccttggagttgccctgagcccaaggagcctcgtggctccaggctctttggcaactgagagccgtcagggagggaacaaaggaccccgcctccctgctctgaagcaagaacctgattctcttttccgcccttggggccccaggacccttctcttggccaccagggctggcttcctccaagcctcatctacttgggaggggtggggcgggatgggtgagacaggacaaccagccgggaacacgggagcctcgcagaccatcgcctccctctggggcctagtccctccacaggctgggccgggaaggtctggtgtgggacctcttgggaacctgggccccacggtggcgtgcatccctgggggttgctcccatgccagccaggtgacgctgacaggatgggtccctttaccccagacttgggtgctgagggccggagctccatgctggagcccgcctgctcgctacagccaggcccgagccacagcgcgcccgggcgggacgcggggcccctgccgtggggcagaagtgcgggcagttgcggggacacaaagtcctcggagaggacgcgctgcgcggctcttcgcggccgccagggggcgcgcccgcgcccagggcactcggggttccacggggggcaggtgcgctcctcgagagtgcggaccctctaggtggggtgcaggacgcagctccccttttgcaaaccgcactccttccctggagggaacgaccacccctgcagttgctggaaccccgaagtcctgggcccggcaagggcttggtggggggtgaggtcgcggtgcacaagccctggtccccgacgggctagcgagaaactgcctccgttggcaaattcgtgggggcggctccccaggccatctgcctgcctggccgttggtccgtcggcccnnnnnnnnnnnnnnnnnnnnnnnnnnnnnnnnnnnnnnnnnnnnnnnnnnnnnnnnnnnnnnnnnnnnnnnnnnnnnnnnnnnnnnnnnnnnnnnnnnnnnnnnnnnnnnnnnnnnnnnnnnnnnnnnnnnnnnnnnnnnnnnnnnnnnnnnnnnnnnnnnnnnnnnnnnnnnnnnnnnnnnnnnnnnnnnnnnnnnnnnnnnnnnnnnnnnnnnnnnnnnnnnnnnnnnnnnnnnnnnnnnnnnnnnnnnnnnnnnnnnnnnnnnnnnnnnnnnnnnnnnnnnnnnnnnnnnnnnnnnnnnnnnnnnnnnnnnnnnnnnnnnnnnnnnnnnnnnnnnnnnnnnnnnnnnnnnnnnnnnnnnnnnnnnnnnnnnnnnnnnnnnnnnnnnnnnnnnnnnnnnnnnnnncccctgtcctccctgccctggccggtcactcacccgcttgggatgccttccttccggggagcacctttcccagggccaccccacccacgcacgcacacgcaccactcacacaacccccgacccacacacaccgccctccttccacccacccctactccaccaccccggcagcgggccagggcacagctataaatacaagtcgctgagttggggacacccgatccttagggggtggcgcatgccatgggtgtgacgctggaccctccatgggggaaccagaggacccagccccaggatggtttgaggacccccaagacaccccccttcctcatttacagtgatcacctggggcctgtctgggtctgggatagggcttacctggctccccgcaaggtctgcaggtggtggagggggtaaaagctgcctgctgggtgggggtgaccccggtgagtcagccaaggagaggcagaggtggaagggggccaggccgtcctggggggcaattggggccgcgcctgagggagggtgcttgggatgatcctagccagacatgggagagggagggccacagacttctggccagggtgaccccgtggctggcagtgccaccgaggaggccagacctgctttgtcccccagggcccagggctgggcctctgccagccggcagctgctctcagcgcccccatctgttctgactgagctgcacactgggcactctctcgggccgccaccctggggctacatgccccatgccagggcagccaagtctgctgcccatgggctgacttacagctccaggcacaaaggggtcaactttgggatgcacgcgtctggggtttggagcctgcctggggctgctgccaataatggaacaagggcccccgcaccgtcccttctccgggttctgtggcctccttcctgagctccagagaggagggctggggcccaagacgaagggagtcagcccagcaccctgtgtggctcagggctgtccgagcccctcctgccggaagggactgtggcttcctagaaagttcttcctggaacggtgggggacctccccccttgctctccgtcctaagcagcaggcaagcgcatccctcgctccagagatcccccaggtcctagaggtggtcctcagcccatgctccctccacagtgcctctgccccgccaccttgtcctgggccgccagggggcatgtccagcgctctactgctcttcaccctccagggcgccctcagcgtggggcagccccggcccctgaccctccttagacctctctgctcccgtgaggcccaggcccctccctatgagctgccagctctggtgggcgccatgcacttctgcagggcgggctggggcccccacaggtgctgtacacagcattcacctggctccgcgctcccagctgtggagatggttctggatctgggcactccctgctgtgccccccacccagtccccccacagccccgctcactcgcagctgcacacgggagcacggaggatgcagcaggctggagcccatcccgcactccggccaccaggctgcccccgccaggccacccccaccaggccaccctatagcctgagggagcccctggctctccaagtgagtgggaataaaagaggtttgtccctggagcccacacctgtccccctgcagcctcctcacgagccagtgaggcaggatcatcctgaagagctccttcacaggggaacagaggctcaggcgtggaggaatgagtcactgccacatttggagccctcactggtgccacgtgcccaccatgatagcccagggcctggccctttgtccccacctgcgagtgcggggaccgagctggatctcagcggggcgccgctctgcaagggaaggtcagggactggtcttctttggggccccagccccaggctctctgcaagtgctcagtgacccctacctcacagtgcccatctctcctcctagcggtgggggttctcccctaccaccgggctcccagcacctcccctgttcttgtgcacaccatgtctgaccaccccatgtcgtcagaggctggcagagggtctggctggatctccccagggaagactgcgtctttcttacttggagtgtggatgcctgaagccagatgaaggtacccgacatgggggtctccaggcgcacagaggccaaacctcaccctctcactcaaggggctgagcagaggacagagcgagggccgagtggtccaggtggtcaaagtgcacgccgtgggcagagcgggctgggccgcatctgggaggcaggctggctgccaggagggctgaagctgccagccctggcaacaagcctgttctgctccccagtccccaaagggtcacctgggcctggggccaccctgggttttggctatgctccttccctggctgcccaagcctctggacacccaggctctggctctgcctgctgctgacgcctgcaccagcagagccatcacttcgagcccagctctcaagccccctggtggcccctggcacttggcaagagttgctgctttgctcaccctggacatggactttccactctgcccagaggtgatctggggctgcccaaagccccgcacggctcgcctcattcttttcccatcccggtggtttggggcctgtggtcagagtgcatctgggggcccctgagagtgtcgtcacctcccacagcctcccgccttgggtccacctttaggacctgtttcctgggcggcctcccttctccaggctgagcctacattttgcatcccccaccttctgaccacacccccacctcacacctcggctgtctttcctccattccagggcggctctgggtctgttcggctgcactatgccccctggccccactatgccatcttcctccttgcctgctcccctggctgcttccaagcctctctcccctccaggctgagtctcctctgagccaggtctgccctccctgctctgcggccacatcacatcgtctgcctgtctgtgctggggtcctgtgttccctctcttctctctgggcacggacaccccatcctacttctgagggggtccccaggtacctccgcctgtgcttcctcccttgcgtccatggcgtttccttcccctgcgtgctgtccagctcctacccctcaaatgggcagctgaaggcaggtgcacctgggtctcccctgccccctgttcccaggctggcagtgcccggccttcaccccctagttcctccttccatctccaagatacttcctctggataactgggctccctgccgaggaccacagggctccagcgcgccctggtcagggtttagaatccccgtccttctgctgcagtgctgacctcagggcactgggctgtttatgtctggccatgcccagtacacgggctgaaggggcctgccctgggtctccatagcgcactcccagcctcccgtgccctccaggtctagctagagccagtgtccagccagcagacgggtggaaagctatggccatgtatgcaggggtgtgagatcacagggtgtttctctgtggtgtggcagcgccaggtgggagctggcatcctgtgcattgagggcccctgtgctgtggctgttggggctctgggcaccctttccaaggggccatcaggtaacgctttgccttaggctccagggtgcaccagagaccttctgggagtcagaggggcagctgccttggccagggaatgcctggggttgcttccagaaagaggtcttccccctaccccacctctgcactgttgatggtgctggttactgggccgtggctccaggacagagggtccctgcagttacacacagccctgcctcattgcaggaacaccagtcccgggcagctgagacctgcacacctgtagcagtgacctcggttctgtcccagacctcaccccactaccaaaaggggcagagaacaattcctttgggttgaaggaatgaatgaatggtgggagcctgcaagcagagcccagaagggagtgaagcagtgtaagtgggtgaacccactgcaccacactggtagtcacaggtgtgtgcacactgggcgccagggccccttgctctgtgccgggcacagtcgtcgtacaaactgccattgagtgccagtgccaagaggttgggcccaggagcctcacggcctctgaaaagcaccgccggcctccccctgcgcttgccactctgctgccttcactgcctggcgtgagctcgctgacagccaggccctgggccagggctggggatggacacagaggcaggagagctggtcgctcccattccagggggagaggtgcaaacagccactccactgtcccctcctccccaagcctgcatgagagctgaaccaggaggtggtatagcatgggcctggcacagctagggccgagggggaagcgggcagagtgcagtggcgttgaggcacggcgccgtcagacatgcagtccgctaacgctgtggggaggagaaggctctggagcatgggaggtagcgagcctcgtccaggtgttgctgcaggtagggctgacgatgggggctgcattgcaggggagaaaggggcctccttgggaaccctgggccaagaagacgctgtggccagaggagtcatccatggcagtaaagggcctatggattgcagggcagagaagggcagtggcaagtgggccgggagtggagggggccctggcaggtcaaaggaggtcaatggacagcccccaagccaggcagatggcaggtggcatcccaaggatttagggacggggtggacaggagcaggacgatggctgcagggcaaggctgggacccgcacgggtgacaagctcagtgcaggggcagggcatgcgccatctgggcagtgtggaggtgaggagcaaggacaaagcctgtgtgtggagacgccttgcacgtgtcagcagcatggcgtcggcgtgggagggaggaggtagcgtcggcgtgggggaggagcgtggcgtcggcgtcgtggggaggagcgtggcgtcggcgtggtggggaggagcgtggcgtcggcgtcgtggggaggagcgtggcgtcggcgtcgtggggaggagcgtggcgtcggcgtcgtggggaggagcgtggcgtcggcgtcgtggggaggagcgtggcgtcggcgtcgtggggaggagcgtggcgtcggcgtcgtggggaggagcgtggcgtcggcgtcgtggggaggagcgtggcgtcggcgtcgtggggaggagcgtggcgtcggcgtcgtggggaggagcgtggcgtcggcgtcgtggggaggagcgtggcgtcggcgtcgtggggaggagcgtggcgtcggcatggtagggaggagctgtggggtggcaacccagaggcaaggaggtgggcagaggcccacgaacctggccctgaccctcagctcgtccccagctcacagcacagccctcccctggctgcctccaaggagtctccagttactgagtggccactccgtgccagctcagcccacccctcaccttcccagtgcctgtggaggcccaactagggtgacgctgggagaggagagggcttggaggagccacgggtcaaatgcaggaggccacacctgcctgcccaggaggactgcaggagccggatccttaacacctggaggggagcgggtgggtgcggtggcgtacatctgtaactccagcactttgggaggccgaggcgagcggatcacttagggtcaggagttcaagaccagcctggccaagtgaaacccggtttctactaaaaatacaaaaattatctgggcatgctggtgggcgcctgtagtcccagctactggggagggtgaggtggtagaatagcttgaactcaggaggcagaggttgcagtgagccaggatcacaccattgcactccaacctgggcgacagagtgagaccctgtctcaaaaaaaaattccattgtttaaagctgtccaggctgtgtattttgttttggcagccctggagactatagatagatagatgatatggagagaggtgtagagagatatttacttataaatatatgtacatatataaaatgcctggagggaccagcaatggtgggaggactggggagtggccccgagaggtgctgcgggtgtgagggtgcgcacagcctcctggaggggaggggcctgagtggggcagtggagatagggctggccacagggccgtgccttccctggcccccagaggggtgagttgggtggacccgcagggacaaagcaggggtcagagctgtgtttggttcctgagtgggccttgtccaggatggagagagcctcttttcctaaactccctgccaccagggaggcagctggcacggatgtcccctagggactgtgagtgacaagccagactagccagagagtgggggggggggtggggctcagtgtccgtgggggctcagaagctgtgtcctgacccaagcctgcaccacagaggggaagaccccaagagaaacctggaggcaggtagcgccagggggccaccaggctcccttggtgcccctaactctgggcccccagcctggtctgagcctttgggtacaggtcactcaaggcaggtgttctgcaccatccatcttcatatcgtctctctcactcgcacccttgcatcactgtgcttctgagagttgggggcttaccttaatctactgtccctgacctggcaaacagtgcaaaggtggcatgatgtggccctgcagctgctacacctctaggcgccatcattcatgccatggctctgtgacagcaccccctagagttgtgcagtgtgcaacatgggtgactgtccatggcagctcacagcatgtggctcagcccattggccatgcagggggctcctttcctaggagcagcagggctgggcttcctctccacctgtaggggcagcagtgggcatcttaggtaaatgcaggactctgcagcccctagaggaccctgagtggtggctgaaggatggatgtgcccatggccttcccagagctcaggtgcctcagctctgctttcagaggagcagggcagccgaggggtgcctggcagagaggcctgccggctggacgtggggaccctggagcttggcctgaggggctgtggtgggagccgtgcctgagcagggctgtcccgtggcacacactcgccctggctcttctgcccatcacttatccccatgaggcaggaaagacagagtgagtgcggctgccctgggggctcggcactggggggatggtgacaggactcggggctcagggccgggctgcctggaacaagcagaccctgaggggccccctgcagcaggatccatggacccatctactgggccagcaggggccaggaaaggagaagagggagaccggtggggctggaggcaccagtgcgtctgtgcaagaggaggaagccctgtgagagggcagcagcctccggactgccctgcacaccgtgctgagaggcctggcgtccacctgcagcccaaggcagctccaaaagaaggtcctggtgcttctccaggaggcgaggctggccctgatgtttggtccctcctcatcggccagcctcatggtcagccttggctggtggctcccatggcaaggcagaccctggcctggacctgaaggctctgcctttgtgcagagccccagcctgacggtaccagttttcctttgttcccctttgtccagccctccttggatgcctttgctgtgggaatcccaggctgaagctggaggaaaggcaggaggacttcttgtccccagcctctcaccacgtgcctgtgcagcctgacgtcctgagacctcaactggtgatggggaggacagactggtgtctctctggggccatcgtcctgggctccccagaactgggagcccctgcggatcagcaggccccaggctcagcgtcctgagctggctcctgctcccaggggtggcctggcactggccctgcggtcattggacacccactggcctacgacaagccgcgcctgttcctaggagcctgtgtttgcccccaacagagccagggtgtgcctagcagggcgttcctgggcctgttgacgtgggcactgggcactctgccatggtaggcagcacttggcctgactgccaggtcatccctcgacgcctgcccccccgcccaggcggggctgtgtacaagggataggcttcccttctctcagtttccctacctgtcctcagagacctcacccctgactgcccccaaaaggcagcagatgcagtcgtgggcatgaaggtactccatgaccccagcggagaggaattaccacatatgtgccgaggcaaggacagagtaagagtgggggtctccaggagggtgctgtgacccccaaacccagaatctgttcgagtcacgccagggcctgccccgtcccgatggactgaacctgtgcgcccagggctgactcagcgtctgctgagcagcacaggctgagagccctgcccatccgcccaggctgcagaagtaccctgaccctccacccccaccctgccttggcgcctggcagcattagctcccacaaggcctccaggtgccctcagaccaccctccctcctgccaccaggcttcctgcatctctccacctcccaggatccccacccagttcacccagcaccgccccgcccagagccactgtcctgaactggtttcctataaggactgggcccagccaggcagggccaggcagaagtcagggcgtggaggtggggactcctgccctgcgaaggggcttcagggctctgagtgctgcctaatctgccagtgtgtgaagttacgtcccaggagggtgagccccctgcctggcatctctggatctgccccccctctgtccccagggttgccctgccacgaggcgccggggctgtttccgtgtaactcttgtccagatgcatcgtgaggagctagtgcagagggagggggccgccatcacggagggtcctgcttgggcaggcggggaaaggctatgtgagacaccccactgccaggcttgtgagggtgggaggggagctgagacccctctgccgggcagagagcagtggggtgtggctgggagaatcccccatgcatagacaagttgagggcttttctgccgggaggtgaggcaggaaggtggggctggatctgggctctggggtcctggggacagagtgggccccaaaagggaagtagtgaaggagagaccagaccagtctgtggggcagggtatccgtgtgtggccccccgcaaccccaccgggaccctgcttaccctccaggtggagctcaaggagagagggcaacaggaagggtcccccatgccatccagtggctggccagaagtggggctggagacctggccttctctcctggggcagagaccttctggggctccctccaggctctgtcacactgggcctacaggggtctcttatggtggcataaagaccaaaaggtgctgtagggatatcccttgccgttggtgggggcctggcttcaggggcaatgagccatcatgggccatcagagatgctgcctcttcctcagctgtgaagcggggcctcctgcctgcacgtaggggagccctatcagccgtgccttgggactggagtgtccctgtatccatcatgccaccagcccacctgccctgcaggagcagagggtgggggcagcaggggacacccactggacctgtgccctgctgagcagagccaagcaaaaggcaggagggctttggttcttgccccacctggagagggtccctagcttatcctctagcttccactggcacaagaggcccttggggaagcgaaggcagtggcatccagggcgtggcacagtttgcttgtatcatgtggctgtctcatggcaggagggggattggagcctgcacatgctagtcccaggccctctccccaccatcagcaggaatccccccagagaggggagcctgtggctgggtgtttcccagaacagggctggctcagaatggctttttctttttcattcttagacgggaggtgcctgcccaaagggaagggtttctgctaaagtgggtgagggcaggtttggccgtgggggtgctgaattcatgttctgtgggagggttaggcctcctcattcctgcatgagaggagcgagctccagagcggggcccgcagctgcagagacctgcaccaagccacctggaggtgttggcaccagcctgggccagaccctccccgacccaggcccctgaccaaactgctgccctccttccaaggtgcaggatgcccacatcccagtcccgcacagacgcatcagagctggccaccaaaccagacaccccaaaatccaacagcagtgccctgcagggacagacgaagccccatgtgggtcagtccatgtccggggggtcctcagtacccaagtgccttcagctcagccgggtttctgttccaggggggcaacaacgccggccacacggtggtggtggatgggaaagagtacgacttccacctgctgcccagcggcatcatcaacaccaaggccgtgtccttcattggtgagtgccctgccccgacctgtgtgtgagcaggaaagggggtgtcagccagcccaggagccccacgcatgggggcacggggcaccagagcctggtgatgactgctctagcagtaggctggaccccagcctccacccgccccaccaggcactgttgcacagaaacctgcatagccggggcctgggctgggaacgcagctgagaggacacagggctgatgggaggaggggcagagtcacatccaccgcgcaggagcgggagtgcctgatccctgatccctgatccctcacatgcacatacttcctgtgtgggcatggagaccacacgcccatgtgcccgtgactccatgtgcatacctgtgagtgagtatgtgcttgcgacaggcctggcttctcgctgcgtggcgaccaggctgtgtggacaaggccgtgccctccccggccctgccgagccatgtggccgtcctcttgcctgggctgctgtggccacgtggcaggcctggttccagccccttcccagtccgtgctgcagagggacctccttccacatcgcctgccccctcctgggtccggacacagctcctcccctgcagccacctgtgaccactcagtgctccaagaggcgagccacctctgtccccagggttccgtggctctttccctccttctctcggtcagaagcctgctctgtgcaccctggcctcagctcttagcccaaaacccccttgctcagagaagcttttcctgatcccagtggccaagccagccaggccccttcttgtactttcccttccagctgtttccagacttcagcaaggccatccttgtgatgtatctgaccccttcccagcccgtcaggaagtgggggtcaggcgcctcaggtgtgtgcccagcagatgcatgggcctggacccattcaatgtgagcagagggaggaagatagcgcggaggtggctgccgcaggggccatgtgtggtcaggggctgagctggagtgactcacccaagaccatcccctggggtgcagacccagtccctggccctcccagcagtggggccaggacagtgtgggggcggtccctagttcacagcagggaggccctaagcagtgaggtggcctgcccgccatgtcgcaggagcccctagccctggcagactgggcagtagcgctggctggccactccgggttgtgctgcaggaagcccttctccagccgccagcctcgtcctgcccagccctgggccccacatggcaggaaacaaggccaaagaggcaccgcttagcaagcggcaggacgtgccagggctcacacagacaccctgagcttgcaacactccgggcctctgccgcgtgtttatttcaggatgccgtggcatttgggtgaccttttgtgctcaccatggcttgcgtcgtctccgggtcactctcgtctggactgaagtcccgtctccctcagctgagcctgtgccatggccagcctcagcgggaactggcaaagggaaaggggttccttggggaggcagcaggggtttctgaaggcttcatcttcaagcaaggggtttagagctcaggagtgtatttgtgtttttttgttttttgtttattttgagacagggtctggctgtgtcactcaggctggaatgcaatggcacagtgcctggctcactgcagcctcaacctactgggcccaggnnnnnnnnnnnnnnnnnnnnnnnnnnnnnnnnnnnnnnnnnnnnnnnnnnnnnnnnnnnnnnnnnnnnnnnnnnnnnnnnnnnnnnnnnnnnnnnnnnnnnnnnnnnnnnnnnnnnnnnnnnnnnnnnnnnnnnnnnnnnnnnnnnnnnnnnnnnnnnnnnnnnnnnnnnnnnnnnnnnnnnnnnnnnnnnnnnnnnnnnnnnnnnnnnnnnnnnnnnnnnnnnnnnnnnnnnnnnnnnnnnnnnnnnnnnnnnnnnnnnnnnnnnnnnnnnnnnnnnnnnnnnnnnnnnnnnnnnnnnnnnnnnnnnnnnnnnnnnnnnnnnnnnnnnnnnnnnnnnnnnnnnnnnnnnnnnnnnnnnnnnnngtgcatttgtgacaatcgatgaacctacactgacaggtcatgatcacccagagtacatagtcacctctgggttcacacttggtgctgtacattctaccagtctggacaaacgtatgctgtgtatctgccactatagtatcgtacagaattttttactgtcctaaaacccccgagctccacccatttcattcatctctcccccctcaaccctcggcagccactcaccttatgctgtctcctcagttttgccttttccagaatctcagagttggaattgtacagtatgtcgccttttcggattggcttctttcactcagtaacatgcatttaactttcctctatgtcttttcatggcttgaaagctcatttcttttcagtgttgaataatactccactgtctggatggaccacagttgatttctccttttgtttactgatgggcctcttgactgctgccgagtttcggcgattatgaatagagctgcacatctacgcgcaggtttctgcagggacatcaatttccagctccttaaataccgaggaatgtgttttgcatccatcaccaccatccacctccagaactttcttatcttcacacactgaaatgctgaaatatcaaataactccccagtctccctctcccagcccctggcgcctcccattctactttctatctctatgaatttcacttttccagggacttcatataagcggaatcatcctgtttgtgtccgtttgtaactgccttatttcactcagcataatgtcttcgaggcctgtgtcagaatttccttccttttttaaggctgaatactcttccatcgtatgggtagaccgtgttctgcttacccattcatctgtcaatggacagctcttggctactctgaataatgctgctatgaacataggtgtgcccatttcatgctgggttgttttttgttgttgtttgtttgcttgtttgttttttgagacggagtctcgctctgtcacccagagtgcagtggcaggatctcagctcactgcaacctccgcctcccaggttcaagcgattctcctgcctcagcctcccgagtagctgagattacaggcatgcgccaccatgccaagataattttttgtatttttactagagatggggtttcaccatgtgggccaggctggtttcgaactcctgacctcaagtgatcctcctgcctcagcctcccaaagtgctaggattacaggcatgagccaccgcacccacccatttcatgctgttcttaatgtatgttttccagtgtctgggacacaactctgtctctcatgcctctgtctctcatgcaggcaacggggtggtcatccacttgccaggcttgtttgaggaagcagagaagaatgaaaagaaaggtaggtccaagctcctgcagacttgccctgtcccagacgcggtgccctgagcggttgttggctggagccttcctgagggtttctcccacggaggggactggcaggggtgggttcccaacatagctggcccagctcatcacccgccggctctacccgcgcagaaagcgagtgagctgggcaacccagaggcctcagatgctggtggcctcagcatcacggggccaggtagcacctgggaagtccaggaaggagccagggacctggaccagacacccagtgggaagtggggactgctggcctaactatgcctgcagggaaggatgtggctcctgggggctctgcggagcatctggccaggcacgcagaggccagacccaccagctgggggtgtgggcaagtcagacctagtgtgggcagggacggacggcagcctgagtgggtctgggaggacgctgagctgcagcctcaggctcaagggcgggacgggtgtgaaaagagcaagaatgtgattctggggacatgggcaccagggggtacccagactgaggccctgagggggcaggtcaccttcagagtggcagcagctagggaggaaagccgggcactcacaccagctctggcttcccagcctggagtgggcgaagcctgcaggcacgagagtgggcatcctggcggcggggtggagtgagggtccgggagtctcagctggggaggagacaacgaggggcgggtctgccgcttgctgcgcaacagaggtggccctgtcagcctcctccctgcatgccttacctggatgggagccgggcgagctagcccagctctggcccctcacgtgtgagctgcagcgcacctgtgaacactgacccacctgtgtgccgtgtccccgcaggcctgaaggactgggagaagaggctcatcatctctgacagagcccaccttggtacgtttcccactggagtacagggaacagcccctcctgcccccaccattgccagccggccctgctcctacatggccaccgagatcagggaagtccccaaggccttcttgctccacatggctccattagcttgtacattacccttttcaaagagcttcaagttgggagctgggtcaggggtcactagcccatttgcaggtggggagactgagccccagacactcatggtcacaccccagtttgtcctctttgaaatctcaaccacccccttcccaggagactcaggccagcaggaggtgaggtccatgtatacacatctgtcctctgcttctctcctgtctcctgctgccctcacctggcccgcccgacagtgtttgattttcaccaggctgtcgacggacttcaggaagtgcagcgccaggcacaagaggggaagaagtaagtctgccgggacactctcaccctcggggagtcttctgggcccgtaagccggtagactgtggggcgtgtctggtcctgggcacaacgaggagggtacctcaacccactcaaagcccctggagaatggcaccgtcaaaattccacagcgcatcacccaacccccggacgagccagcccgtctctctctggggttgcacactgtccttgccggctgccactgccacgcggctccccccaggagtgcataagccctaccgtcacctgtcacacccaccacctttcctgactccacacggccccagggaagacacgaggaacactaaagcagtttagtagaacctcagatgtgccaaggacacaggagtgaagcagatgagtgtcctgcctcagagaggtgatggtcacacacttacccactcacactctcacacaggcacacactcatgctcttacatacacaccacacgcccacgcatgctcgcacagttatgcacatgtgcacacgccacacaagcccacacacccacgcaaatgcacaaaagtacacacagccacacatgcacacactccacatgcacacatccacccacaggcacacaccataccagtacatccatgctagtgcgtacacccacacacgcacacactcacagctcagccagacacaggcagcaatggtgggcactggagtcatgagccggcgggggtcatggcctcagtgggatgcctgagctcctcagggctcctgggttctcatgggtacccactccccatctttcagtataggcaccaccaagaagggaatcggaccaacctactcttccaaagctgcccggacaggcctccgcatctgcgacctcctgtcagattttgatgagttttcttccaggtacctgagccgtctgcagtccccggggaggatggggagaagttgccggaagggactgtggctagtggggagggccctgaggaccagcgtggaccatgacagggggtgatgatgactgtcccttgtgcagattcaagaacctggcccaccagcaccagtcgatgttccccaccctggaaatagacattgaaggccaactcaaaaggctcaaggtgaagtcggggccgcagtgtgggggctgcggaagtgctcctccagggaggctggatgtcctacctggtgctcgttgaacacccttggggcacacctgatactaggcattgttatgggctggccaaccttcttgggacgcaggcctcccctgccccaggccacaggctcactctgctgcttggcccttccttgcagggctttgctgagcggatcagacccatggtccgagatggtgtttactttatgtatgaggcactccacggcccccccaagaagatcctggtggagggtgccaacgccgccctcctcgacattgacttcggtatgtccgggagggtgtgcgtgccaacgacctttcgtgcctgccagggaagacccagctgcggagagccgtgggaaccgatgggggagggaggggcagacccgctttccaaggccacagtgccatccatgcccgcggaaatgatcctcgtgtccttagtgttcctattgtcagcaagggaggggagaggagaaagggctgggctagagatgaaagaacagggtgacaaggtcaggggtgggg

SEQ ID NO: 363 - DNA, 945 bp, Homo sapiens
agcgtggcgtcggcatggtagggaggagctgtggggtggcaacccagaggcaaggaggtgggcagaggcccacgaacctggccctgaccctcagctcgtccccagctcacagcacagccctcccctggctgcctccaaggagtctccagttactgagtggccactccgtgccagctcagcccacccctcaccttcccagtgcctgtggaggcccaactagggtgacgctgggagaggagagggcttggaggagccacgggtcaaatgcaggaggccacacctgcctgcccaggaggactgcaggagccggatccttaacacctggaggggagcgggggggcaacaacgccggccacacggtggtggtggatgggaaagagtacgacttccacctgctgcccagcggcatcatcaacaccaaggccgtgtccttcattggcaacggggtggtcatccacttgccaggcttgtttgaggaagcagagaagaatgaaaagaaaggcctgaaggactgggagaagaggctcatcatctctgacagagcccaccttgtgtttgattttcaccaggctgtcgacggacttcaggaagtgcagcgccaggcacaagaggggaagaatataggcaccaccaagaagggaatcggaccaacctactcttccaaagctgcccggacaggcctccgcatctgcgacctcctgtcagattttgatgagttttcttccagattcaagaacctggcccaccagcaccagtcgatgttccccaccctggaaatagacattgaaggccaactcaaaaggctcaagggctttgctgagcggatcagacccatggtccgagatggtgtttactttatgtatgaggcactccacggcccccccaagaagatcctggtggagggtgccaacgccgccctcctcgacattgacttcggtatgtccg

SEQ ID NO: 364 - protein, 311 aa, Homo sapiens
  VARIANT (1)...(311): Xaa = Any Amino Acid
MVGRSCGVATQRQGGGQRPTNLALTLSSSPAHSTALPWLPPRSLQLLSGHSVPAQPTPHLPSACGGPTRVTLGEERAWRSHGSNAGGHTCLPRRTAGAGSLTPGGERGGNNAGHTVVVDGKEYDFHLLPSGIINTKAVSFIGNGVVIHLPGLFEEAEKNEKKGLKDWEKRLIISDRAHLVFDFHQAVDGLQEVQRQAQEGKNIGTTKKGIGPTYSSKAARTGLRICDLLSDFDEFSSRFKNLAHQHQSMFPTLEIDIEGQLKRLKGFAERIRPMVRDGVYFMYEALHGPPKKILVEGANAALLDIDFGMSX

SEQ ID NO: 365 - DNA, 137454 bp, Mus musculus
caccttgtgatggtgttgttagagttttgatttttgcagtcttggtttctacggccttctgccctctcccactttacaacgcagtagcgtttccttcttgttttttgttttaaaatccctcctgcctcagcgcccccggctgttctcaggtttacacccttgtttatgaacctgggttcagtgcgctcagctgtttgtggcctcctggaggatgggtggtactcctcagtctacacacggtgcgcgcttctcggaaacggaggtttgtttcgcagagctgaaaccacctttgttgtgttgattcctgtcagctgtcagaaatcagagaccacccctggaaggagcctggggcggggccagggcggcagccacgcggcaaaggcttcggcagaataaagtttttccatagcaacctgagctcatatttaaaaggagaattgtcttctaaatggtagaagtgaaaatagactccctcctgcgcctaacctgaggacagggagagcaagggaggaagcaaccaggcctggcagggatctaaccagctggcactgtgtccacactccccctccccttccctctccatcccttctcccacccctccccttcctccctcccttcccccttttcctctccctcctctctccccctcccttccctctcccttctctctcccccttcctctgttggtttgttcgttcgttcttttgttagttttcattcgaagcagcttctttctttgctaaagttgctggctggcacaggtagagtgggagaacagagcaactgtccaccccaccagcctggtggattggcgctgactctgttttctgagaggagaccggcttttgtgctctgcttcttagaagctgcaaacttgctgcctacctaaggcaaggcaggggatattaagaggtcagagtcaggggtcaccgggcctctttcctcagggcaaggcctccataatgctgggacacagtctctttagtttgatgtttagcctttaattgctgctttctttttattttgttctgttttttcaaaccagtctcatgtatcccaggttgacctagaacactgttgtgtagttgagctaacctgatacttttgagtgctgggatgacaggggtgcagctaccccaaggcgcctggcttctgtgtgctggggattgtccagggcttctccagctgagccacatctgaagccttcaccactgtccccttcagcctgacaatgcacaaggtcagggagaatgggggtttctcggtctgcaatgctccattttctccaaagcaacccagccttctcagctgtctgcacggtgctggatgtagcaggtttagggctcatccaataagcagggagcccaagagtgacagcttgagtgtggcaagaggggtgggccttgtctacagcatcctcctctgtccacagcaatgacaggcgtggagaactggggattctgaagtggtggctctttcaaataaaggagtgtttcgagacctcctccaacagaatctttgaaataaccagatgcaataagtgttcccctttcaaaagaggaatattattttcttccatggaatctgggtgtggggtgtgggtgttgttatgctattacttttattttttattcgtgtatgcatatgtgtgtgtgtgtgtgtgagagagagagagagagagagagagagagagtgctataggtgagcagtgctttgggaagccaagacagagtgttggatctcctggagctggaactacaaggtgaaccactcagtgtgggtgctggggaccaaacctgggtcctcccgcgtgttcgagcaggatgaccttaactgccgcaccacctttcaaggcccttctttggaatctttgaaaaaaagtttccttcaagttattgttctgtcctcagcatgtcacttagtgactgagaggtcagtaagatgcaaatattgaagaaaggccacacaagtcacacaaggaagatgtttccttgcgctggtgaagtggcttaagagataacagtgcttgctgcctacagtgagggcctgggcatcatccccaggccccacgtggtggaaggagagaaccaactctgacagttgccctttgaccttcatgcaaacactgtgatcccctcccaccacccataccttacctgcccctgcacaagcaaatacatacatggaaacaaaaattagagttttcaaagtattattatgttcaagtccttaattctgaattcttgtgtctttgcttctcagtggaggaagtttggggtttggggagatttcagatctgtgatttttcaattatggatgttcaatctgtgggcagaaatgaagttactaagcccaaatctgcagaccctcatgtcttcagggctcctgatgttgctttctggcctgcagagcgcactgggcatcttcctgcccagtgtaagggctgcagtaatatctgtaactgtcttgtttttgttattattgttgttggtttgtttggttttgttgttgttgttgtgtttgtttgttttttggtttggtttggttttggtttttcgagacagggtttctctgtagtcctggctgtcctggagctcactctgtagaccaggctggcacggggaaacaatgtatcaaaacaaaataaaacaacttcccctgcacccccccccccaaaaaacccacaaacaaaaagtcgctaaccactcactccaagcaatcaaaccctgagcccacagctctgaggtcacagaccatacccaatgtcagtctttcctgaggggctttatgggttgttctcctttctagggaacaaatagatttgttcaatgagcaatcgccttgtaatcttactgaagaaaatccattgttgaccaaaaaagaaaaaggaaggaagaaagtatattcaggagaaaatatgggtgatcatggcctggcaacagagacttgggttcccccaaactgcatatacaatgtgaaagcaatatcatgaagtttttatagtagcagaataaaggatatacatcaagatgctttgaagtctttggtgggatcaatcgtcatggagacaggttgacaaccaagtggagaagcctcagccccagcctcacatactatgtgatgactcagcttttggactgggagaagccaaagatctgctcagttaatactttcctaaggaaaacaagtgcttcgtataccttccaatgattctcctagtgctcacaaagtctctaggtcaggaagagagacgggcaacaaatggctattaagaggactgaagatggcccaagataatttgactctggacctgctacattccaaactcttcacaattattgatgctctaatctgctgaaagtccagataccctgaagttggaacaatatgcaagaagcctgaaaggcctggagagggctgttatcatctctttgaatcactgggacagccgtactgttggtggccatgatcttgtggtcacagcactttgcaattagacacatcttatgtgtatttttgctggcaaagtcgcccaacgaaaaggttatttctagctttgcaatcttttcagtattcccccgtgattccagctactccacagtttcagttcctctctcctaccttgttcttctttctacttcttttacatctatttagttcatcttctctcccctgttcttaagttggtaaatctgaaaaaaaaaattgttgaaaaaattgctgaagagatggctcagcagttaagagcactggctgctcttgtagaggacctgggtttgactccctgcagccacatggaaatttacaaccatccttaagtccagttccagggaatctgatgccctcttctgatctccataggtaccaggcatgcaaatggtatttatacataatgcaggcaaaacacatgtacacacatatacacacacatgcacaaaatatacacaaattacagactgagattattgcaacctaattcttcataccaaaagataataaccttttgttaatattccttgtcatgcatagatacactaagcacaaatacttttacctcagagcttcccactgcacctaagctctggtagatagatcattattatttttcaaatgaatgaatgaatgaatgagtgaatgaatgaatgaatgaatgagtgaatgcaagaaggaagcagtttctcagggcaagaagcaggccttgcacaattgccatcagacttacataacaggaagaatatagagtacccaaatgttgcccatccctgagcttatgtgaaggtctacagtgagacttagcccacgtgtgaccaatcagcctttggtccaagtgactgaggtgcatcctcacattgattggaagcaaattatgttattctcctcttaaactgcttttactgctgtctgcctcactgagaaacttgggcttcactttccctttcagatgtaccccttccttcttagtcacagctccctctgcacaaagaagtgacgaatgtctgagacgataaagggcaattacttcaatctgatcactgcacgttggatacatgtatttaaatgtcactgtgcactccataaaatacataattgcaatatgtcaagtatgataaaaagtgtattgcaaaataagagtgattagcactgtgggttggggatatggttctgagcagctaaaatgcttaccacgcaagcatgggggccagcgtacagctccctaaaccctcgcaactgggtttccgacctgaaaaggcaaacacgtgggatccccagggaaaggtggctagagagactaaccatgtaactgagagatgctagcttacaagaaaaagtggaagatttctaacatcaaatttaggtttccaaacatgtacacacacactcaccacaggaaaaaaatgaaaaacataaaataaataaataatgtcagtttgggtcctcaacctgtcacagtctagaatcacctgggaagagagccccaatgcagcgctgtctagatcgggttggcccatggtcatgcctgtgacgtttcttcctgattgtgttaagttaggtgggaaggcccaccgctataggaggagctgttcctttggtttgagtcttggactgtgtacaggtggagaggaagaagcctgaacaaaagcaagcatacatgccctcattctctctttgctcttcgcagtggctgtgaagtccagccttgacttcctggagatgatggcctgcatgcataatgatccttcctcccttagggctacttttgtcgagtgttcaacagaaacaagcacactcctgaatctctctccttcccctctccctgtcccttcctctctgcttcctgggccactgagatgtgaacaagcagctgcctcatactcatgctgccttgcagccagtgatccccataccctccctgttgtgatgaactatagctcacaaaccatgaaccatgcctcccctctctgactttgccttttatctggtatttggtcacagcaatgaaaaaaaatgtaactaattcgggggttcatgaaagagatagctcttgaactaagctccgaagataagtagacattttccaagttgggagaccagataggaggggccttctgggtaaggaagccatgtaagcaaagacttgcaatggggagctgaaaacaaagcccattacccttattccttacagatattctggtcagcatggtgtagtattgaaggatgtggactctgaggcctgggtcaaatgtcagcctctctgccacttaccagactcaagatttgggcaagccactttactctttgaaccttaaattgcagatactaattatacctgtgtataggcttggtgtaaaaattcagtaagccaataagtttagagctatatgcagcattgtatatatgttagcttttacttacacatgttctttttccattctgcccacttggggatttttatataaattcaatcatactatttgtgttgtataagatttcttagtttgtgtaatattcaggaaattcttacatataaatgcattatctaattccattaacttttctcctcacctaaccatcaaacatgcacagcttctttctcaggtgattgtaaaatctggagacaaaggctgtgttttctgtatctctgcgttcaagagagtcttcgcagcttctgccctgattttgttagttatttttaagacatctcaattggagcgaaggagactagaggagagatgatttggatataaaatatctcccatgggctcatgtgtttgagtagttggtctccatctggtaacaccatttggggggattgtgagacctttaggaagtgtgtcttcagaggaagacgtggatcagtgagtccggttatgagatatacaccagctgttccctctgcttcctcacagctgatactattactctctcactgctgatacatcattctcagctgccacaaatataagccattcccaaccacagcttccgtcctcctctgggatgaactgtatcctcttgaactgtgagagccaaaaatggaaatttcctccttcaccgtgtttctgtccttgtctctgtctgatatcacattctattatggcagcaaaaaaagtaactgatccgagtactgagggttactgagactttatatagggcatgtgtcttagtcactgttctactgctgtgaagagacaccatgcccacggcaactcttataaaagaaagcatttcctcgaggctggcttacagtttcagagatttactccattattatcatggcaggaagcatgggggctggagaggtagctgagagttctgtatcaagatctacaagcagcaggaagagagagacactgggcctggcctaggcttttgaaacttcaaagcctgctctctaatcctttcaaataatgctgtgccctgagcattcaaatagatgagcttatgggagccttcttaccaaaaccatcacagcgtagggaaggtgcattctccatccccatagggactttgaaatgtgctctaagatgccccatggggcttttagatgggatgattagaacagaaacttactgtgcactgttgtcttcgagttttatttctgtgaagagacaccatgatcacagcaacacttctaaaagaaaacttaactggggctggcttacagttcagaaattcctcagcccattatcctcatggcgtaaagcatggtggcatacaggcagatgtggagctgtgtagttaagagttctacatctggattggtaggcagtaggaagagacagacacactaggcctgccttggacctttgagacctaaaaacccaccccagtgacacacttcatcccacaaattcatacctactccatcaaggccacacttcccgtgggactattggggtcatttgtattcaaactactacaacttgtgtggtcctgatttaaattattctatttaatcctcaaaactagccaaacccgtgagcacagttgtttgctgggcctgtcatgacagtataccatgaactaggtggttttcaacagtgatactcactgctgcatagttctagagcctggaaaccagaggtcaagtgtcgttagagatgattccttctaagggatgagagagaaagcccactcatgtctcttctcgtgctttattggccgtctatggtattgttcatagatctctgcctttgtcctcaagtggtgcactcttcttcccatgtctctctttaaatgtcctcattttataagagacctgttcatattggattaaggatccctgttccattatgataatgagctcaggatccccctactgcattgtgatgatgtgtgctcatgttcaccacttatagtcatcacaagccctattcccaaataaggtcacatgacgactccagcgcctggttctgcagggacacagtttcacttattcagaggtagggaaacagacctgaaaaggttacattgacacagatggttgtgaccgaacacctggcaaaaagcaattgaaggaaggaaggaaggacggaaggttggctatttggctaaagggttttagggtctagtccaccgtggctgggaagcacagcaatggaaacgcgaggcagctggtcacattgtgtctgtagtcaggaagctgggagatgaatgctggtgtgcactctctctctccttttcattcagcccactggatggtggtcggtgggacacacttgacgaggctacgaacacagggcgatggctgagaacgactcggctcccatcctctcttttgtctcaactgcgcaagataaaactctataccacagccaggttctgacatctggacctaattcactcagcttatgctattaattcaccagaaatagcattttcataggaactggggtaaggaggtgggtggccagaagcaacggagatctagggcaagctgtctgcctcttgctatttttcgagtgaacactactggcttttgggacaagacagttcctcctaccctaatgggcagttcctgtccatttgcaggaagcgtcctgccctaaggggcaagacccatgtaccataaatgatccccagccattgctcaatcccagcacacagcatttctaggctttccctgaagggcagtctctgccctggttgagatggccggtgatcccagcaggactcagcatgtccctacttttgggggaacctccccataggaactggttcatagatagaccctcgatagtgctgctggtccatcctcaacgactcttgacccctgggttaactgcttgacttgcttagccctaccatcaagattccccttgggaaacaattggcataattccaaggcagttacagaaggaaggaacgggctctcagcgcaaaggtaacactgggagtcttcaaaaacacacagtaaacaagactaaaaataaacacttggggtgaaccacagctcctcaactgacaccttccttcatttgcatcttctgcctctagaaaagccccagatggggttgtagtatctatctgtcacacactggtggaatctgttgggtagttctgggtggtggtgcaaaccactggtggtcacgtgaaagctgggctttaactcctcccttttggagggactgctgctgggttgggttgttttttgtttgtttgtttgttttttaagctacattttctttgttctccttcttcttcttcttcttcttcttcttcttcttcttcttcttcttcttcttcttcttcttcttcttcttcttcttctccttcttcttcttcttcttcttcttcttcttcttcttcctcctctttactgatgaaagtcctaagtatcagaatgagtaaatgttatgcaatggacattgtcagacacagacctattatctgctcactgatgtgggttggttagaactaggaaaagcccgggtgaatgctacagttgctttaagtgttactctaaagttgccctcaaatgaaagaggtttacaaaggaggaaaacgcaactgttgctaagggaaacaaacaaaaaaaaaaaaaaaaaagctcatgtcttccaaatgcaggctttggtgtagcacaaggcttgctttactttcaaataaactgtcattgaagcaaaagcaagatatgagaaatgtgagcctttctctttcaacactacccattgtgttgagattcataagcaggaaagctaagagcccaccgtcctctcaaagaaatatgaaagttggtgctttgaaatagaacttatcaaactctgcctgagtgatatctatgctggaatccgactggatctgcatccccttccgaaacaagtctttcttctcagtggtgagaattacctcacctggagttcacactgcaaaaagtttcagaaggcttttcatatgaatgaagctgctttcttcagggcagatgcggaagctgccctccccagggcttgggcaatccgctgtggggaaggaaatcgcctcccaggcagtgtggctgctcagagctaaagtggctcccgtgtgtcctaggttgtgagtgccttcagctcctggtcttcccacaatgcaattccttgaccctgaggatcttctggatgaagaggatgacatttttggcgaaggtaaacccatctctctggcaggagccaggctgcgctgctctactgtgggaacctttcaagtgctttgtatgaaggaagatagttgttcggagcaaggcgatcataatggggcacaaggcaaggcaaggacattgcagttgagcgattgttccgaaggttatgtttttaaaggattacagctaagtaaagatctgctttaggccagaaaaatagaacggagattttatactttgtccctcatatgtgtgctctttgatgacatccaaagggaaggctgtcacagtactttgtgtgtgccaggccctggggtaggaactgaatgaatggggccagagggcttctttctcctggtgaccagccagccctcctctcctcccacctcccacccccttctcttcctagatccttctcctccctccatccctccttctacttggctgtccccctccctttgttctgtcacattcatttgttaccaggctcttcatttttcttttccttgtgtgtgtagggggtcggggttgaatcctgggcacacccgacaccctctggcattgcttagctttccatctcgattcacagatcttcagttaatcgtgcagttgggcttagtgttttaaaaaggcaggcagtaacctccagatgtcttattctaatgctgcaaccagatgggtcataggcaaaaacctttctagaatttggaattgcctaaatggatgggaattgggactgggggaacctcagatttttcataaaataccttgtttgggttttttttttttttaagtctgttaagtagtataaaagggatactgggagtgagggggtgtaccctgtctcctaaatcttacaagttcaaccaggtaagaatcaagtgtgtgcactgagaagccctgtgctccaggctattcctgctatctacgcttactttgttttagccatagaaatatttaaaattagagtttatgagtgtggcccggggacacatccttgtaattccagcactggtgtgtggagacaggaggatcggtagtcaagggcatcctcggctacatagtacattgagtccagcctgagctatgagagacattgtgtcaaaagaaaatgtaaatgacatcatacgataataatgcaggccaggcatggtggcacacgcctctaatctcaagacttaggaggcaaaggtgaggagttcaaggccagcttgggctacacagtgtgatcttgttagaaaaaaaataagcaaaaacaaaagtaagataagatcatgattggggtttttatcagtgtctattggtgagagggatccctgttgagctttgctgctggtgactcaggcttccatctgatgctttgcttgactgatgggcactgagaacggcgggtgtcttgaagtcttaggcttgggctctctgttctttgacttcccctcctggagttggtggttacttagaaaccaggttaacaattacaactagaaagattcgcctactttggataatcgcctactttgcagccacttttccctccaggtgtgacactctaaaatgtccagtccacattttcctatccagagggatttttctttgtatctgggtccggtgccgaagagcgccatctacaggtcagagcacaagcctggatcaggcatgggcccatcctgaaaggaaggatcacaaagcagggctccgccaatctgcagacctcctgctgagcacccatagctatcaaggtcattgttttaaattattgttttatatgtacgggttgcttgcctgcatctatgtctatgtgccacatgcctgacatctgtggagaccagaggagagtgtctggtgtcctgggataggcttaacagacagttgtgagatgtcagtcggtgcggggaatcaaacccaggtcctctagaagatcagcccatgctcttaaccacttatccccctcaacgccattattttatcctcagtgaccggtgtcatttcagagcagctttagacttgaattctagttctgtcttgcacaggttttgcaatgtaacttccgtttcctcaatggcaatgtgagattgcagcatccatttggctgtatagcttagctttcatcgaagggtcctaactatttgtcttgctcttccgtggagcatattggttaacttactccttagagaccagagcgaatccttcgagaacaccaatcagtacgctttcattggttttcacagtcatggctcactgctagttcatgtgggacctgggttttaagtagtatctcactttaagaaggaatgtgtaggctctgcctgggttttgcccgttaatctgctttgtgacctcaaacagattgtctaaccccttgtcctccagtttactcacttgagaaatggagcacaaacctcctgggactgtgtgcagattacagcctattccagggaagtacttagactagtactccgtgaacagtaatgtacttactgccgtgcttgcaaacatacactcatgtcatagaatggggattctgttttccctgccatgtagaattgccggaacatgggcaggtcattgatcctctctgagcctcatcctgtattgaaagcacaagacttatccattgtctgaggcctctgttttgttttgtttccattttcctgttaaattatttcagctagcatacaaaatgatgggttttattttcacacacttgggtgtactgtactttgctcatacgaatccctccactcccactcatcccccactttgactctctttgctgagacatcatttctaaaaacctcggctctctgcctgacctcaccatcaggacatttgcacccggagtgcatgaccacccaggtttccctgggctttctgttctctgacctgctggagaaagcagtgcagtccccacacagtgagtctcttcccacacacagaagggaaccactcaggaagcttgttgttagggcaaccctgttactttacagctgacacatattttttttaaaaggaaccatcttccccctctcacaggttttgtacagatgcagaaagagctggaaaggaaaagaaagccagtagtgcttacaaggtgttcgctcaccgcctctctgagatcctgtttgttctctgtggttagagaaaatgttaaggttcacagagctaagaagcatggggtgccactcttgttatttccagagaaagggggagggagagagagagagagagagagagagaggatgtttacttacacataacactctaattcttcttcctccctctcccttcctctcccctccctccctctcttccctccctcttcccctctccaccccccactcacacccacagccttaagcatgctttctagacatccacaacctcactgtgtcattggaaaacagttactatcgagtagccatgaacttttcatagaaaagtgggtgattcgattatcaaggcattgaaaaattgaaaatccaactgctggcactatgcgctgtttctttttgtggtttcacacttatcaaattaaagggaattcatccatgtcattgctaggcaaccttgacagtggtggacacaccactgtatggattgtctttcagagaagagaccaccaatcctgcgggaagactcagttctaaggccgtcagtcagcctgttagcgtggaaattgcaccttagcagcctcctggtttggaagccccagcctggctgcttctgttttgagaactgctcagtggctgcggtccagtgcaatgattgggacagtaaaaccccacgagttcacaatgtgtgtgcaaagtatcgcttggactcttgtgttcccatagctcttaagatctcacttcaagacctcatccaactgcaaacgttttgcccgctctctctgttcccagagctggtaggccacatggtagcagaggcacacacattcatatcctggaggagcttcttcggtctcctcaaagaaggcttctaggtatgccagggtagggtggtacccaaggggtaccttccccttctcaaaggaagaaaggggagagggcctgtgtgaggagggataggggctttgatcagaatgtaaagtgaatacacaaattaaggaggggaatggcttctatatggagaggaactagatgcctctagtgcctaagactgaagagactagcaggtgtttggaacaaattcactcattttttaaaaaataagtatcatctttccccagggcagtcagtcttggcacgtgctgttcttgcagaggacccaggttcaattcccagcacccatatgatggctcacaaccatctgtagctccagtaccgggggttttgacaccctcttctggcaggcacacatgtggtgtgtagacaaaatacccatatcattaaattaaacgttaaaaagaaaaaagaaagaaagttggtctgtgtgctttcctttccaaaggaaactttacctcagagcaaaaggctctcaaaatgtatcaagaaattgttaattaggatgcaagctaagctctgcctctctatgtagactgtttataaaactacatgtttccccacatcaggtaaaggagcctagccctaacactacgtggcactccaagactcagagactggatagcccagagacctaagatagaaccaaagatgcccagaaaaaaaaaaaagttactgaagtgattcctagtgctattctgcaatattcatagattggtgcctaccccattagccatcagagaggcttcatccagcaactgatagaaacagatgcagagacccacagccacatattagacggagctcagagaatcctgcagaagatggagagaaaggattgtaggagctagaagactcatggacactacaagaaaacccacagaatcagccaaccttggctcacaggggctcacagagagtgaatcaccaaccaggaagcttgcataggactgacctaggcccctctgcacataggactgacctaggccctctgcacacatgttacaattgtgtagcttgaccttcttgtgggactcctaacagtgggagaaggggctgtctttgattcctttcttggcttttgggacccttttccctcatgctggatgatcttatccagccttactccaaggggaggtgcctagttttactgctacatgatatgctatgcttggttgcccaagaggggcaggagaaatggaggagtggggagtggtggcaaaggggaggtgggagcagggactgagaggagaggagggagggaaaactgaggttgagatagaaaattaatgatgatgacgatgatgagccaagatggcttgtgaattacatttgccccttgcaaaattaaaacatgacaggagggaggaagagggaaggaaggaaggaaggaaggaaggaaggaaggaaggaaggaaggaagggaaggaaaactaaattaagattatatataaaagcaataaatccaggaagctcagactggttgaaacttcacagaaaaagtaaaggaaacaaaacacaagccttggaagagtgttggggcggggtggggtggggtgctctatgattattctacatttcctttcatataaaagcatacgataattgttacttaactgtatttgatctttctcaaaaatatctggggttctcaagtggacccacacgggattggaaagcaggcaggaagaggctgtcctagtttgacagagtaagaagaattggtaactctctgctttcaccgtttgccaagactgtttggatccgttcgtttccagcctgggttcctggataaacagtttggatggaaatcatttccctgctctctcacagggtccggagcagacacagacctccccacagttattcatgcctgtgtgacctcggccttggatcactgaacattcccttcccatggatgtctaggaagctttctttggctggtgccagcaagatggtgtcacttcagggacacagaccaaaatagcacactgaactaaagctatgcaggccagagcagccaccagtctaccctctgatttatggcctccagtgacctcacagtgacctatttagatctgccgatgctaaaagggggttgatagtacaaaatgggcaggccagatgtttattttaatatttttgaacagtcagaaaagtctgaatatgttaggaagactggaagatatatttgagcatttatttacagaacttgtcttgaaaactaaacttctgtttgtacccactacagacaagagaggacaaaggagtgaggaaggagggagggaaggagggagggaggagggaaaggaaaagagaaagtagtagttattagttaagtagttattatgactaagatgttgaaataaattgagtctaacctttccttcctcttagataaaagctatttactcaagtccatgtatctattgagtggtatgatttctagagctaactatgcctagtttgtttaattataaagcacaaaatgtttctttaaaaaaaaaacactgctgttctgagagtgtgtgacatcatgcgcccttcagcaaatgacttcaagaggaagcacttttgcagacatagtgctgcagaaagtactgtgcacacagagagtctgatgccagggctgttcctagactgtggactttttagcactcagccttaaaactcaggtaaggcagcagtaagctgctccctgtgtgaatgatgacaatactgacgtcagtggtaatgatgatgactttaaggaaggtggtgatggtgacatcatcacttggtgatgatgaggacagcggtgatgacaatggtagtcctggtggggatagtggtactgttggcactgatgatggtaatcatgatggtaatggagtcacgatgttggtgctggtgatagtggtggcaatgatgttagtggggtttatgatgatagtgaaaaggaaggtggtagtggttctagtgatgatggtggtgatgatatttaatggttgtagtcattctggtgatcatggtggtaatggtggtggtggtggtggtggtactgttgataatggtagtcatgataatgaagtgatagactgtatgttggtaataatgattactgtgagggtgatgatggttgttttcataatggtcatgatggtatggtaatgatgatgatcatggtggtggtggtaatgatgatagtggtgatagtcataatgatagtggtagtcaggatgatgacagcggctagccatgattgtagtggtagtgagtggtggtggtggtagtgtggtggtgggtaatggtagtagtaatgattatgggtggtagtattagaaataataatgatagtgatgatggtagtggttacgatgatgtttgtctatcaaaaaattttgtctaggttaaaagaaagaatatgtaggataactcaaatccttaagggcttcctacctagaagttgctcattatctctctgatagtctcagctgttccagcatactaggtctgttcagttcccctcctccactcttggcctttgtcacaaatcactaaggtctggcttagtgagggccatagtctgatgagagcagagccattgagactgctgccctcagaagcttcctgggactacagggttccctcaggctcaaaagctgaagcctggctactatccgggtttcaccatgtggctgaagtagggctcagaataacccagtgctcagcacagaaaaagtttatgattgcttctctatttttctctttcattcattcatctggcctccctttgaaaatgctttccttgtccaaagcaatgtatacagtgttgacagcactgtaaacagattattaatatcctacatattaattaatgttaacaattaatataacagtgattactccttatccagatagttcctcaaatagccacacagaaaacttttaagatttcaaagcttaggccttagctgggtagactctcaactagctaatctaaggtaacccaactacctagctccatccagtcttcgctagctatacattccaggcccataagcacatcatctcttcttatgtctcctctcgaaaggccatcttctttcttcttcccagagttctttctccctcccaggaagtcccaccttccatttcctacccatcagatttttattaaagctaatcagagaataccttaggtatatgaagaaagacagagacacaacttcacacagtgtaccccaacattccactactgtggagaggccctaatttccttcagaaatgccaacagcgaggaatcccatcttcaacagtattcttaacagtgtttggacctatttccttggtaaatatttccttggttgacatcacaatgactgcctttcctgtcaccactcaactaagtgcttttataaaagtaacttgagaaaggctaaactttacatatttattcaaaacacctcttatacaaagctggtgcacatttaaaacgtgtgtgtgtgtgtgtgtgtgtgtgtgtgtgtgtgtgtgtgtatgtgtgtatacatatttttcctctaggtgggaactaaccagcagaggtctacaaagcatcacccaggagtctgaccagaacagcaggctatgagattgatcttcttcgtgtagaaagacagtgtgaattgaactgtatgggacaggaaagggcccatgaggggtggggaagaaggctctagtgctcaccatgcaagcaccacaacctgagttttgatccctagaacacatatacaaagcccaggcacaatgcttcatgcttagaatcccaatagggaggcatagacagaggcatccctagggtttattgcccacccagccttgacaaattggtaatggcaaggttgagtgatagattatctaaaaattaaggtagaggaaaacgttcaatactgacatctgttctctgcacatacacacacatacacatacacacacacacacacacaagtacttgtacgtgcatttatacacgcactcaaaaaaataaaaacaaaaaaacaatgagtcatcagaactactcacagtgattcagtggatttctgcagtgctcttggtctagccaggggttgataagccatagccttcaggccagaggtagcctattgcctgcttctgcttctgtaagatgagaatggctttcacagattaacatctatagctgatgtgatgacaagagtcacccatcttgaactcaaataagcaaaacattatcccaaagaattcttttcttgtcttaggagaacgctattactagaaaatgttactaccatattttcaatttgtcagtaagaactatgtgaactgctgttttctttatcagtgtgtggtttctggatcattttctcatttttaacctctccaacccacaacgcctaaaatatttactaacttcttctgtagagaaaaagcctgctggtctctggtttatgtaggccattaatttcaaagtcattttatacttatcttttatgtatgtgcatttgtctggaagacgatatgtacacagtgcgtgcaggtgccctcggaggtcagggggtgctggatttcctggaactggagttaaaggtggttgtgagcgcccaaaatggatgatgagaactactctggtcttctgcaagagcagcaagtcctctaaacagctgagctgaccccccagccccagccccagcccatttcaagtcattctgcctctctttgggccactgcgtttcttaaggacttttttttttttttcctgtagcactggtattacatctgtgccttctctctaggaggtccccatgtgaggaggatttatccactgggcttaattatattttctcttagagggaacatgtgtcatcatatggtgttgctttttagtaccacttggaaaggcgattttaaaaagttagtacttcgatacagactgttctggataggcgaggaaagagaagtcaatattgtgaaagagaaggaacacaggaggaccagtgctctcttctcccacaacagcgataaagtagctggaaggagatatcacatatgaggggctcggggtttttcctgattgcgccccttagatttctctctccccttgactccggattcatcggtccctgggacctcctcgtggtgaagggctgatgtgcaggaatagctccaagctctcttcctctgtgccttcccacactgagatgccccagcttatcaatgagcagtgtgctggatctcaaacaacatcttccaaagaaataagactgaacccacagtatctttctgttaaaggattacacggaggtggccctgtctttatcatcgccacagagtaccagttctcttccactacccccattctgtgaggcagagccgtgcatgtctgctcacgtgcatgttaatttgagaatgaagaagcctttgcaaaatagacatgacaagagaaagctaacgtaagcacacacacgcatatagagagaattacaggctccctgttgctaagtgctggaagaatcaggaatgtctagttctattaagcatctttgggcagttctcacaggctacaggggaagaaaacgctgctactaaaaagacaggaaactctcttgtgcactgttggtgggaatccaagtgatccaagtggcaccacagctgtgggcaacagagtaacagctcttcaaagcattaggaatggagtgaccatatgatctgggtactccacttctgcgtatacaggaattgaaagtggggtcttgagatgtttgtgcatttgcactcatgaataaccacgttattcacgatgctcaaaggatactaaggagctcaagcacccactgagggaaaatggagatataaggcgtagtgtgcgcagacaatggaatattagctgctcttcaaaaagaatggatgcccagtgtgcataactcttaaggacattatattatggaaagtaaatcaacctcaataaatgtaaatgtcgcatgattccacttatatgatgaatttacagtcatcaagtctattgaaaacaataagtcgatagttcctagggctggaataaaaagtgaattattaaaagatataagatatatattaaaagatgtaaaaagataaaaagtgaataatattgcttaaaaggcttacagttttggttttacaaaagcaaatgagctctggagattggatgcaggacactggaaacaaacatatgcattgaaaattgataattatgtgtgtacatgcctcaagaggctagaagagggtgtcaggtcccctaaagttggagttacaagcagttgtaagctgcctagcatatctactggagccccaactctggtcttctgaaagaccatcaagtgttcttcacttctggactgagatgctaaatgttatgcaagttttaccacaactatttatgtgtacatatatagacatatatgtatatacatatcagtatttgaaaagttagttcaaatttttgtgcagcctttctcttgaaccctatagctctaagagacccaaattctcacaaaagacaaatttgattctagggagttagccctaatcaaggtggactctatccaacacaattttagaacaatatcattcttcctggtgttactggagttttaggatcaaagtgtcttgggtctggcagcctacaccaccaaggtagtcatggctatcaatcctcaatacttacaaagacaagcaagagcaaaaagcagagaaacaatattgattcaatatagtcacattgggagcaggaacaaagaggtccaacggccctcaagtctgtcttcaggggcacagacatggggtttctgattaaacaggagtataagctgttaatcagtcctggtcaatgactgatccagcctatcactgacccatcttgtctctaatgctgtctgttgtgcaaagtagtttagtaaattgtcgaaaccgtgtagaatgtcttcctgggaggcaagtgcatcctgtagctgaggtcaagccttcagcccttcccttccctcagcatgggattcctgagaccaatcttttcaaccacccaatggctgaagggtgggacacaagtgtttctctttagaataactttgctcttgccagaactttggcatgtgcaagctttagagaatgggaattctttctatgaattcctaactaattgggaccaggtctgaggatcactgcataaatgttttgtgattagccctcatggaggctcctgagagaaatgccacccacggcagatgcggtctcccgaagaacttatggactattttccaccaatgaaagactgtcattggaagcctgccacatgctaggctcagttctattctggctcccaggatccagcagtgactacaaagtccctaaagtcccaggtctggtgaagtcacacagcattagagaggggggacacagacaggaaaagatgcagaaatgcccagagttgggggagagatgtgttgttgacaaatgaggtgcaggatgggaaggatcagacatggccgcccaggagggattggctgacaaatgcctgaagcctaaaggaagtcaaagtctggccctgtggatgtctaaagggagagtgttccaggaatagcaaagaggccgctgtgtctgtagcacagcaggaatggcagagagtggtagatgagatccaagaacttggggcgcctcaccacttctaaagtcccatagagtgtgtgcagactcgggttttgactgtgtatgagacagggctcattggtcagtgctccgttgaatgatgctatattacctaccttctagcattctggctgttcccttgacagtaaagtaaagggttcagcatgtacctcagttggtggagtgcctgcttagcatgctggaagccctgagtttggtaaatgtcgcatgataatacatgtctgtaattctagcaatcaggtgatagaaaccagagaatagaagttcaaggtcatccttggctacataatgagttctgggtcagcctgggacctggaacacacagggtctgaccccaaaaaagtagaatacaaaggcaagcaaccaatgggagcaccattagaggaatccagatgacagctggtagaaactcgatgagaccctactgtgcttgagccagggatatgtggcgtgggatgagtaggcaagaatgagaccaagttgggcttgaatatcttgaaaggtatcattgttctttgtttcttgagatgatggtggctgttgagagagctggtgggggctaggggagccagcgtgggctgaggagaccagaatcagatatggacagtcaagcttatagaaattgggatggctttgggaagtcctctatatactcaaaatagtggagactcaagaaatgtctgttgaaatgttgactgtaaagcagcataaatatgcataaagattatccatagatgtagccctagtttgtgggaattcaagctatagaaatctctatagactgttccagaagaccaggagttcagcaatgcaatgttaactgttggaaactctccagggagggtcagggaaagtcgagggagaaagggctagaataccttgtgcaggtataggagttttcacctgcagacgtgagagtgtcgtatcactggaagctgtgtgtcatacccttgctaattatagaagtgtgtatgcaaactgcctctgaccactctcagtctttgatgctctacatacccagttctagtgcttgctcttcggccttttgggtccaaggctgtacctcacaggctctctgctggaggagacctacaggggttattgatttattctacctcaaagaaggaagcaggggtgtctcccagttcttgaactccccacatgctgttttcaatttctctttattgtaatctttctgtaagacggtcctttgcagcagggctttgtattggagcatgttacttcttcagtgctagggctcaaactgaggaccttaaggagaactctaggcaggtactttactgctgagctatagcccccttcctctttgtagcctagaaaaaaaattaaaagaacctattaccataccaggaactctcccaaattctgaaatagacagtccagtatttttccatcaccaagcacttgagttgaataatgtatctactgcgggacaaaaggccagtgcgttctggttctggttccagaagaggcccatatgtctgagaatcagatctgaacgtccaggacaccaggtcttcagctgtgggagttgaattcctctgtaaattcggcctccaaggctgagaggttgactatttagaacctgccaagggctgatccttaattctggtttagcatcatctgtgtgtgcagggagcaaactggagcaggtgttcacatttatctttctcaagtagcctcttgaggctctttggaacagagtctacaaaaggagaggctgaaatggagccttccagccatcccagctttggccctgccaggagacagctgtttctcagcctctccctactgcctaatgaaaatagctgggttcagtaggagatgcttgctacattgctggcagaagccactttctttggagatttgcttaaaccaatgtccttggctttattactgttgctgtgaaattttcagctttaacagctcaagcatgaatgacctattttgaacgtgacaggcattgcacttcagctgtgtgaataatttatgagctgagagcgctgtcatcactctgatagtacagctctctcctttgcctggctaattatggagggcaatgatgttccgtcctgttgtcacagctcctatgcgaagccaccagggacttgtgtgtgagcaacgccgggaagggaagaggggaactgggccagggccttcttgctcccactgctaaacaaagaagtctccaaaggggatagatttccacctgaacctctgcaaagtgaagctgggaggagcccttgggacggatctgatatccagcatcctgattttgcatcatgagtgttagctgggagaggtgtgagctgtgaaagggacttaggaaggaaagagatgctagaccttggagtgagttaggattcctaatggttccaatcctccaggacaagagcagacatctgggttcagaggttcactttcctatgagaatggaggcacagacgagggatgggggacctgaggggagatgggggagcctcagtgggcacctctctatgggtacccctgtgtcttaagccattttgaggtacttctagctctcttgagctgttctggagtagtgacaactcacttaactaccatgcggccaaatggaaatcacacttctaagtaagatccatgaagacaggaagattagccactagaggtaagggactcatcattaggctcctgtccctatcattcctccaaactccacctctggcgttaaagagctcaaattcaggaattagaaaggaccgggcctttggggagacgtctgccaagctggataagggattaaacaagattacaaggaacaacagctctgacttgaagtggaaaagaagaggaacgtccatttatagtgaagggccacctgagtgagaaatagttaaaatatgaaagattagagaagagatcttaaagagttctctttttaaagtaacaagtgtatttttttaaattgatctcagatgcagagactcggagaaggtcactcagcaatcactttggtccctaatctcttggagccagccttcccctggagaggcctgagggacaggattaactggttgttcttccttccagtcaaatcagccacagaatgggggtggggaggggagctttgtatcagctgaaatacatggctgacaggcaaatcccatctcttatcggtccggttttctctttagctcttcttcttatctatgtagatttcacacagtcctccgaaatctctttcagctcataccaggccttgtgctcaacccagctctgagctccatcaacctaagctgttctgtgccagtggctaggggtctctgttacccacactcacctgtctgcaatggccgtggacaaatggtgtctcaccagccactagcataagcttggggttcctcaggctttccaagcactgagtaggctggccccagaataggcctgtctcggcatccacagcagtgggattgcaagtgtgccccaccaccctatgcttcttcatgagggttcctcagatcgagcttcgttccttgtgcttttggaacaagtacgtccagccagcccgggaggtgattcttagtgagtatccaccaggaaagccaacatttgcactaatcagaagtttcatttaataaagacatgaattccagaggtagggagggtacaggtatttaggaaccagcaacagcattatggaggacgtagatagaggccattctccaccggggtgggaggaggttactctttatatagggacacagccagcccaagatgaccttatgaggaagagtctgggattcataccttgaaggaggccattcacgatgagccccagggcagagagaggagcgagaggaaggagactaaacaggaagtggccagactgaaagcctgggactaacagcatccttctaggagcactaaaggcatcaccttggaggggttgatggtttcctttttactgtgcttcctacggctccatataaggaaggggctttttaagaagtaaaagtttatttccaaccttagaaacaaaagtgcctgcctgcctagttcttagcactctgattgcagataccaatagtttccaaccactctacctgcattttgcaatcttttatacccatttgtgtgtgtgtgtgtgtgtcctaacacttttcaattaaaagtatagtcttcactttgtacctcttgggattcagaactgaaaagaactgtcgatttgacatactgccgaaatctttgtcaatctccattgctggttccaaaaatgagatctgacgacccttgaggttgaccaaagctctttcaagttctgcaacttgaaagcctcaatgtgtgtgtgtgtgcgtgctgcgtgcatgtatgtgtgcatgtgtgcatgtgtgcatgcgtgttctctccagaccatgtacatgtgaaggccagaggttaataacaactttctttctctcttcctctccttatttttaagacacaggctctcactgaacctgtagctcagtgcttcagatagactagctggccagtgagtcccctgtctctgcctcctaagcactggggttacaggggtgtgctgccacatctagattttacacgtgctggaatccaaattcactccctcatgtttgcatagcaagcatttactcactgagccacctccatacttactgtctatttgtttatttttgagatatctctggctagctgggaactccagagtgactttaaatttatggaaatccacctgccttgggctcctatgtactgtgtgcacccctcatgcttggcttcagtattatgaaaaagcataaaatggtcgaatgatcttgggaccattatgctgtattttttaaatgttaaagcattctcttagaaagtagaggatagaatattggtcaagattatactatataatacaagacatatatatatttgtatatgtatatatatatatgtgtgtgtgtgtgtgtgtgtgtatcagaaaaagacctcaaggtgttatataataatcatgtataagaaatatgatgtaaagtttctgaagaggacatttttgtacttgaagcacattttctttcccatcagctctgagtatccagctgtttgtgcctctgaagccttctagtcactcagtacagaagctagacctgtagatggggcttaggcttagggtcatttgcctgaactcattggttctgtaccttttctgtacctttgagcaactagtttctgggacatactaaaatgacaacagcgttgaccaaaaatgttcccattgcaaaagcaaatatgtgtgacaatgggaaggaaatgcctgagtgtttgcttctgtgaggatcttaacagaggcaccagatatgcataggaggtctggctccctgcagttccattagtgatgacacttccatgggagctgctccagtgcccggtaaatgctggcttggggggaagggagctcttcaggggaaggtggcagaagccagcagggaagtgcatgttcaccttcctcactgagccaattgactccccttcctctagacacgttaatactaatacagagcttattacactgttcatggcacaaagcatagctcccgacacacagcttattgatagtgagaagtgtgctaaccagctctcccagaaggcagggatgtgcatggatctgtgttcaggggacaaagctcctatttaaaaaaaaaaaaaaaaaaaccagtgtcatgttttcatcatggctggaacagggctttcgaaaccaggggtgattttagagataaacctcaatagtaggaggaagtgtgatagacagagaatcagttaagaatttctaggcaatggattggcctgagcaaaacaacagaaaaaaacaaaacaaaacaaacaaaaaacaaacaaaccaggaagtgtggtgacctggctatccagacccttcatatgacagatgagacacagaggccgagattggccaagttcctcctcagcagcattaagacagaactaaagtctctcaacttcaaatccttctagggactgcccactgcctgtgagggtgatagcaaggtggggacccatctgggaaggtttctgaagccacacccctgatgcctcaggaggttgggtgataaaggagctcaagagtctccaaaccaaagacaggcatggtgtgcacctctaatcccagcactcagaagacagagacaggaggatctctgagttcgaggccagcctaacctataaattgagtgccaggacagtcatggaaaccctgtctcaataaaacaaaccaaaacaaaacagtgtcagacccagagctgggattgtggcttgcctagctagtattcttgcctagcattcacgaagccctgcattcaaaccccactgcataaaatgtgcatgatagcccaggcccgtggctctagcactcaggaagattgaagcaggaggatctgaagttcaaggtcaggtttgggaatattggaaattcaaggccaacttcgactacttgagtgagagcctatctcaactaaagtaaaaatctcaaaaccagcagcatttcaagctaccccatagccaagcactgggatggctgaaagtctctaagggagggtcatgtgattagagacaggtcttcaacatgaggtcctgaactctgctcctctcatggacgtgaggcatcccagttagaaaggaagcccagatctcaggctagatctgatcacctctccaggaactgtcaacgaaggccaggagtagaagccagaagtcaccagtgtcctaggcacaggatacacagaaaaattaaacacagaaggatctgatagatcccagggagaacatcagcttcacttggcaatgccgggcattcctcgggcacatgctgagctctgagttacagagatggagttctaaattgggaaatcaaatcaagctttccttgattcttctgatgaacggtgtatttatcaatctccaccaggctcactgggctgattctgttagccaaacatcggctcaaaaattctccggaaggagaatgacacagccttactgtttcggaaagggaaacttgtcggtactgctgaagttaaaacacagtttcatgctaccaaaaataaagccgttcccatagcacccagagcacttcctctttcctatggcacacctcacttgctcatctccaggaccaccccaccaagcaggtcgggttgctgcagtagccttccctagcccactacctgatactgtcctcacccaatggtccactgatagtagctgccatttttatttgtgagtattcttgatgaggaatgacgtgagggggtgggctgaactatgctctaaggaaccattcttttcttttttaagtcaacaaatttttacttaagggattttgtatgtcgctctctcgctgcctattgaggtcacgtggctccttcaaagcagaattcaacattttaagacagccctgttctaaaagcactgatgctcaatccaggcatgcagtcagcccacatttccctcatttgagcttcttctgtttccacatgagtggagaacatattcatgaatttagagtcctccatctgagatgagagagacacccatgacagtgtgacagtgctaagtggtgacggtattcgtgacaaggctcctactttgaaggtgaagcctggagctgaaggcacgagtcttattataaatggatggagtttgtttggtttgctttgttttaccaacatagcactggcacaacctacatacagacctgtgtgcaatatcataggaatgagtgtggtctagattccttcgtgttaagagaagtggagtctcagaaattgagggggcagatcatgtatcctaaagtggaccataaagcaaattgttccaggaaccattcctttctgccggcatgaggaaatgtaactgtctcctagtgaggaggttcccagagtacccctgcttccatgaacagaacagatctgtgcttcattatttccctgggtaaagtcacaagaatgcccttggcggataggaatgctctgaattctgcttagggagcggtaaatacaccacaagagaaagtagaaataaggagaaatccaccccttcaagaatggggactctggagatctcagcagagacagtaggtggagatgcctgctgtagagctttggactgaggtgcctggcttcttctgtgtactcttaatttggttgccctgacggacaaatcacttaacttctctggcatgtgaaccacagggccctatcaggaacgaattctgtctcgttagacctatgatgctccgtccatccgtaactcatgctcatacctgctgtctgaggaggatttgtgctaggacccatagcggctacagtcatccaggacagatcccagtccaaagaggaaactgacctgggttcaggatctacccttccatcatatacacactgcctggggaaccagctcaaagtggcactttgctcaacccacttcctatttatttgcaatttcagttctgccccaggttgaggagttgagcccaggaaatgtaacactgtttggagcaatcacacttcagtacctgcaatattactcaaggtagaggttctaggcatcttgagatctggctgttaggaagttcagaagtgagaggacaggaaagggacaaggggccggagggaatggagatagctgggggctttttaactgagtgtgaataaatggctgctgctatctggatgtgggcaaaggctctcccgacggagataagccaggctgacaagggaaaggaaatgcttgtagactcaggaactgcttcagaatgcagttatccatcttccatctgataggcctgggacacagtgggtaaggcagaaatggtccctgccccgtgagctcacagattagtgacaggcaaagaatggtcagcattggaagacaagtggggatggaaatgatcactggggacatggatgtactaaagatgccagtggtctgcgatgacccaggaaaaggctgcgaaggtttgaggaaccagagagaggccctggagatagtggagatctataaagggttggctcaccaggatcttgttagcagtggtgctgaggttatgtttcttgttgctatgatcaaatacctggctccattcgagaggatactgaccatcatggccaggaagtgctggtggcaagtaccttctctccttgtattcggaccagagccccagcccaggaatggaaggtgctatccacatctaaggccggcctttccacttcaattaacttatctagggaaccctttacagactggtccaagggtctactgcttaggtgagtttagattcgaccaacctgatgatgaagattaaccatcaccagcagtgtggactttgggttttattctgtattccatatagggaactgaagcaggatttaaagccacagaagagtcacattgtggtttacagggttgttttttttttttttaaggccactgtttctgcaatgtagatagactattgtctatcactgcctaagaaatcaacatacagtcatttaaaagaacacacagcattaactcacaatttccactcgtcaggaatccaagcccggctttgctgtgtcctccaaaggatgggtgtgccatgaagaatgtctccccacaagccatgtctcttttttgcatgagcatctaaagtcgatgaggctgggtcatcttggacaagttaggctaactctctgtaaccttagtttgcctgcctataaagtgggaatcaaaatactgaaaggttacagccaggtgtaaacagtctaatgtcaggggataagaagatcgccataaacttacgtttagttctgtacggattgatgcattagggacttgcttgttgagcagaacacccatgaggaaacacacagagagcttgcttgccctctgtgtgctaagctgtcacatgtgtagtcgtagtcgacgctttcctcctaggaaggaatgtccacatgggaaggtggcttcctgatggggagtgtgttgagttgagagaagggcattggagaatgcagctggcaagggtagcctgtctgagctcctctcaagccatggcctcgtggtccaggtgagaggcctgtacagtgctcctccttgggtgatccctgaagtctggctgtatccttaggtggggtgtgattcagctgcttgcgttttccaggtctaaggatgtccaggtttcctgatgctgccatagactcctctcctagcctttgttggtcaaggtttatacttcttgattctaatgtcctcataaagtgactaggtctcagcttggaatgtgatggatgaatttgtgggacactttgattttacatattgtaaatacacaattgtatgagtaagacagtttccctgaggaggaaactgaggcctggaagactgccaacctaaggatggacgcagagtccactcttgggctccaggtccttagaatacccaacctcatactcttcactcacacacatataatagcctagttaccaatgctgacctgggatttactatatataacccaggctggcatcgaacttacagcagccttcctgccttagcctcttgaatgccaccacactcagcttctaaaggtcctttttctatggaatgtttctgtctgtcagacccacctacattttatagccttatgtataattcaaattcacaccaaaagagaggtttcaaagtcaaacaaaagtcttgcttctccctatcatagtgaaacctctgtcgaaacaagccctgggtacttgtacccagaggccctctccaaccgggcttttcaacataactcctgccttgagccttgaacttcactcttcaccactgcacacaaccctcccccatctcatcatttgcaatgcacggccctttttgagatccccaaaggctggctgcacaggcactcttgtctcagctgagatctcctctaatgctccgtgtccggctggtctcaactcccctgcggcggagtccttctaagctgcgccacaagctagtgtcccagagcctgacgtgcaggcagacgatcagctggaggcaagcacccaagcgcaccctgaaggagtcgggctgaagggaccatcaagcagctgtctccacccgccctcctccctcgccccccccccaccggtgacgcgccagcccccgcgtgcgcgcctccccaccgccctctccgctaccgcgctcgctccgctctctgccacccgcgcgtcctctggccccgcaacttcacccggcgcggcggcagctggtgcgacgcccgagcgctggggccacgactgttaccctcggacctttccctgttggctgggaggaacgagcaccggtgtccgcggagccggaggtgcacggcagcgaggggcggtgcgtgggtgccgaggtggtacatgccacccggtactaagcgtctccgggcactaggagcgttctcggcaggtaggtgcacgcgcctcttaaacacattctctgcggctgattttggtttccaccggcatgaggtgggtgtatggaggagtgtcctgggcttgaatgagcctggcatattaagaagaacccttgggtgtccgggcttcctaggtcctggcgaatccggggagcctgatgtgggctgggacgagaagggaagttattaaggaagaggggccgtgcacttagcgcaggccgacccaaaggatgtcccgcactgtggaaggaccgattgagaaggctagagaagcctgtggcactacctaaggtaggggcttgtcagggacaggggatcccgcgggtgggatcgtggatgaaccctggcttccgaaagacttccgggcacccagcagcgatgggtgatccagctcagagggaggatcgcaatttccaagggcttcatgtgcctccagactgagcaattgagcttggctgggacccagctgttccaaattggccacgtgaaaccggtgagaatggggaagagggcaagccaaaagaaatgtgttgtttttgatgccaacctgtgtttggaaagactggggtacggggtcacacttggggaacactctaaccctagcaggtgtctgtgatattgaacgtgcgcggggggtggggggggggttctgtagttctccctcaggctatttattacctcatagctccctcccacagtttcctggatagggatgcagacccctcgctgtagaagagggcgggcgttggaattcgctaagcagagccattcaggtgcgagaatgacaggactgtggacagtcacagctcctgagtgagaaaacaagacgaaatcctagagaagctagcaatgttttttggggagtgggggtggggcagagtgggatccacagcccataggctctggtctgggggacacctatatgttgcatgagtgactgtgaagaaatgtcaacacttcagctgggggaacaatgtgattgtctttaaagcacacacacacacacacacacacacacaagctgcctttcctctcagctccccttgcaaatatgagcacccgcccattgtttcctgacacagtcatttcttccttcttctgtttcgttgtttttgatgttagttggttggatggttttgttttgttttgggagagttttctgggtcaggtttgcctcgctcctccttcccaccctcacccagtattcctactagcctacttctcttagagcaggctctgagagtcccattcataaggtttagctccactagagccttctatctgctgttacagcaagagaggtcagggcacaactcctgcaaagaaccagcaccctcaatccaatctccagcagttacctgtaaagtaggcaccctcgctttgcggcaataaatcttagggcagggaggggggtgtctactcagtccaacctccaacaacatcagagctcctgctgacgtcccaagagtggagatccagccacaaggtggcctttgccctagaagttaatgcgtttgcctgtctaaaagctgactgcacccaaccatctgaaaaagaacattggagaatatgtttagtcaaaacatagcacatgtgttgcttttccaaaagccccctgatgggtgttgttgctctcttcctctgacactctgatgtgagatgttttcactaggaatattttgtcctcaatataaatatagagactgccaaacccgagagagggaaggctgttagcccggccagaggccttgcccggaagcctgattaccaaaacacaggttctctgactcctttccttttgttgattagcagagaagcagagaagggacttgtctgctttcaggagtgaatgccccaaggaggaggtttttatgcctattgtttggatctggggaactacacctatataagtgtccaggctttggaatggggtcatgataggcgtgctgactaaatcttctgtcactaacaagaaactatccccaccaggatagaccctaggactcagctacattattaaccatgtgcctccttctaaatgaacccaaccacttctgttattctttgtccctccctcccttcctgcccctcctccattctgtgtgaatgtgtgtgtgagtgtgagtgtgtgtgggtgtgtgtgttcaggtgtcttcttctgtcagtcttcaccttattatttaagacagtctcactgaacctgaagctcatcaattcagcaagattaagtggctgagagctctagggacttcccactcgctgctttcttggccctaagattgcaggtatgcactgccatgtccagctttttacgtgggtactgggcatcaaattgaggtccccatgcttgtgtgacaagtactttactaaatgagccatcttcccagtccctcttgttacattttgagctcattttattacaccccacttctgttaagaggacccaaacagagaagggtagctatagagagtagacaatatacccttcagatttcatagttaatgatcagagctttcttacaatggtcctttggggttaaagagtttacaaacaagtgctctattctaacatcagtgcattcaagggctggaaaaaaattaaaatgcagttttatttttattctgaaaagaagcaacaagtctgaaaccagcctcttgctttccttgagaggaagtaggagtggaagtgaaagtcatttaatctgcacaatggatgatccccaggcaatggcagacttggctttccatctgggcttcccttgcctggttctgagcaggggcttcatgcttgcaaacagatcttttaccagggttagtctcatctaccaagaaaagctcctggatggtgaggggtgggggtgtactgcttgtgtttgaggccattcaaccagaaaagaataccaactgaaatcagacaatgggtcaagggagttgggtgggggtgtgggaggagctacagataggcaagtgtttggttccacaaaggcagacctcagtgtggaatggtgtcttccatcagtcctcatgtaaacagcccacaatgggactgttgggaagatgtgttcagaaaggggaagggattatgaaactgcacctctatatcccagcagagccccgctgtgagcttcattcctctaagctgtcatattgtattcagtttctccaggcagcatccttcctgtgaaaacctcaatgtaacaggcataggagccttctcaggcactccacggaacagtccattccatatcttgcatgagctaattcagaaatacccacgttttttggtcctccttgtgcgcctcccctctgaagccacaggcttcctctctgggctaacggtccaggtctttgtttggttgatttggtcaagtaagcttatcccttacttacttagattggaatcatcccctggaaataataggtgtttttctgagtgtggcggctatctagtcaggatttgttagtcatgggtcctcgaggggtttcctccttctaaggaaacccagactgcctcgaagagaggaagctggtccagcttattttattgttctttgtttataagatactgatgggggaggtcactgaatgtttttatgttcattacactaatgaaaaaagaaattggaatttttttcacagtgaaagaaaatgagatgcagtatttttatgttgtcttccgtaagaccaacttgagcttctagccagagcaagaagcaagccttaaacaaagggaatggtttatcacattcttttaaaatggcatacagattttacactattctaaaatacatataaaaaattgattaccaatcacttttaattctgacgtggatttttaatgtccattgataggtaatgtggggtaatactactttttcttttcctcctgcttatgcatgtgttccctgagcaagttcttgggatctttgccagagtgagatttctccttcatagtaaaaacataaaatatgaattctaacttccaggaagttcaatccagaagagaagaaggaagaggcaactggatgactacatagcctggttagtcctgtgtgttagtcagttctttgtcataatagcaaaatacctgatgcagggtgcttaggaagtaaagagacacttatgtatctagctcaccgtttggatggtattatagcggcctggtgagagccacctcttgactgcatcacctcctagcaggtaactattaaatgagcaagtatgaagcaaacaatgacatcttaaaccagggacagggagagactagaatcccacacccccttccatactctctgtatgctcccaattaacctggggatcaattctaccactttccaatacttccattgtacaactcttagaagacatgggagccacactcaaagcacagccctgcatttacacatgccgctgtaagatcattgtcgataccaaacacaccccttcactcagaagcatttggggtttggacagtacgaggatgatcaccccaggcaaagagctaaggtaggtcagagagcgctacaccttttaggagaggtgagtggaagggaaaagagaaactaccagatgaaaagatcagcaggctccctggctccctagggctcagaggggctgtttggcttcttcctggggcccctgtggtttgtgccaagccaagagaagacattgactcctgatcgacaacttgtgaaccagaatttaagagcaggaacctaaaagaagatagtgaagatcagggcatagagaggacaagcctggcccggaaggtcacccgtgaaggtcacctaggaacagtagtgaaataagctgttgctaatgatagtcacgtcagagaaagattggccatggccacactacaaagcaccttacatatacacagtgtctcttaacagtttcttgtgtttgtgcttccttttgggcttaatgttactggctttcccttgaagccctggaagagctctcttccttcacaagctgattgttctgaaaggaacctaagaaacaatgcgtacattctcttcagcttgtctgtgcagtgcttcattcacccttcagggagggcaagggcagaaggagacagcgcaatggggatcgatacacagtccaggacagattcctggatctagaccaactcccaagagattattcctcacatggcatttaatttcgttgctctttgcaacacatcaagttcaagaataaccttgaccttaactgtttcccttccaacactgggggccctgctgacagacaggctcaaggctgatccttgaagggcagaaccgcaccaatactattagttcagaaggtagcattggccatgtggatatgacccatgtccttcactggctgaaatctaacttaaacttgtcttagtgaggcttcattcttgggaacaactggggcttggaaaagaaaaagagaggtggatctcaggtgacagacagcacccagggggtccaggattccccaggcttcagttgtagagtggagaatccggacagcagaaaggacagggagtcaagagggcttgcaaaattatgtgctacactgaagagggctaagcaagcacacacagtgtaaacctcatttgtaactgaactctaaatgtccctactgtctgatttagtatccagaagctgcctgatgatctgagaagctattggcatggccaggaaacaaaacaactaccaggaagctactgcaggaaaaaccagatacttagtatggtggctcgtcctctcaagaagtccatgccaaatctctgagagctaaaattccgattccctttatgacaaaggagactttgcccatttgattatgccaagaatttagcagtatcctagattacccaccacctgggccgagtctagtacatttcatccttagaagcaaaggaaacaaatggctctctgaaaggaccggcagagccaaagaaagttatcacctttgaaactgagggacagagactcaggagaaggactgttggaatctagaagagattaggaaacaggttttcctatataggctccagaaggaaacataggcttgcgtgtttccagatttgtatctagtaagacctatttcagatctcagtctgctagagctataagctcataagtgtatgttggtgtttgataccactagctttatggtcattcattacaacggccatagaaaagcaacactttcaccctcccactcacagctgcctttagagctcaggagagtctgggggaggctcctcctccttgggggtgggacagatctagctgtagagggttctggcaaatggtatttcaatacagggaagcaccctaaaggctgggggcagtagccaatgtgacattgaatgccaagagagcataacccctgcagctgccacaggaagtcgtgaggctttcaaggaccacaggtggatgtgtccaacaccatcacggtccttctgtgaggggtggtagcatttggcagaacagaaatggatgcctgagattttaggtagtttaacaaatgttgctatgtcatgaagctataacagggagaggggaggaaggaggcttcgaatagctgcccactttagcttggtagtagttattgtccagagagtgagcacattgcacaaaaagcatcattgttagagccaagttctgacttactgcagctcgaccctgagccacacagcgaaatgttgccctcagcattatcccctttcccatgtgatcttcctacaagggagactctgatccccctctgatggagagatgaaggtctgtgtctgttccttcaaaattgcaacattcctgatcaatagagaatacctttgggtgtcagttgttgttactgttgttatcatcgtggtcatcatcatcattgttgctgtatgaagcttcactgagcatcccagggtagcctagaacttgttcagggctttgaactcacaattaacctgccacacaccagctggaataacagggatatactgttaggcctagtttaagcatatatcttcaggttggagagatatctcagtggttaggagcactatctgctcttccagaggtcataagttcaattcccagcaaccacatggtggctcacaaagatctgtaattggatctgatgcccttttctggtgtgtcagtggcagaatgctcatataacattaaataaataaataaataaataaataaataaatttatttttaaaaggatatatcttctatgcccagatcacaaaatgcaattttatttgtttgcttcttgacagagtgtcttacttactatataacccaggctggtcttgagcttacaatgtagcctagtggcctaaaatttgtggcagacctcttattccagtctcctgagtgctggcattacaaatggcaccacacttctccctgagaggttatttagctttcactcttgtcggctggagcaaagctcttgaagctgggatccagcattgcaagtgtctcagctgagaccactatgatgtgaggaaacccaagctagctgaccacaaagacagatccgagactttgagaaaagagaatgggtcactgtcagctgttggcaacactggttcctgacatttcatcacctactgccctctgactggtaggagacatggatccaaagctgtctgaagtttgtgactcattgcaggccactgtatgtatggaatgatgaatcacctaacaataagtaacccacttggttctaacaaatgtagaacgaagtcagtgaagagcatagttttgttgttctcaggtgtctttactgaggtagataacaagtcagtggtccattgtagaaaccagcccagatctgactcccatctcttcctccagttaattttggctaagaaactgaaccctaccaccatcaccccattcccccatctctttctcttgggataaaatattactctgaagtccagctggtctcaaatccacatcaatcatcctacccccgcctccaaagttctgagattactggtcggagccaggaggctggacttcagttccatgaaagatggaagaagtgtcaggaactgctcctattcaggctcccatgacgttccaagggaaaaaagaaaaagtttgtcccttgtatcatatcatcttgctccttgccctaaaataggacagcaatgacgcgtggtgttctttcctttgagggtcactttcttttttgggatcttcggtgtgtgtttctccatggtgagatgttttccagatgtttccttttttatttatttattcatttatttatttacttacttacttattttgctttctgctgcaaaaatgtctcttccctgctaatggaagaaaatagtcctagaagaagctaaagggcagtatcaagctgtttccctaactggggactaagtgaaagacagagcaagggggacagcagtccctcctgcaggagactgactgacctcactccctagtgatctacctggagagaataagtaagactaaaccatgaatgcaaattttcatttaaaaaatattttatgtattaagttatgtgtgttggagggtacattaatgagcattggcgaggtggaagatgcccctggagctggcagcataggctgttgtgagccaccccaggtggtgctgggaacctctgttcttctgcaagagcagtgtgcactcacaactgctgtgtcatctctctagtacccatgtaagttcctagatacaaaagaagaaggggaaaaaagccattcaagttgcagaggtggtaggattgcatcagatctgacgttcagcttggactatgtagcaaaaccttgtcttaaaatacactatgccccatcccaaagaaagaaagatggggagggaaggggggaagacacaagaagaaaaaaagagaaaaaggagcaataaatacaaatcttgagtgacaattttgtgaatatatatatcatgttgaatgttgacataaatcttccattgttgaaacagccaatctaaatttaaaaactaatctataataccaataataatatagctcttgttcaaaagcatttttgatgccccagttatgtgtaactcaccaagtttttgtgataacctgtgtaagacttaattgcaccatctcatagatgataaaattgtggcacaaaaccattaaaatgcaggcagcccagctttaaatctaggctaggtgggatccaagtccaggcaatggtaatgaatataaatacacagagactccaaaagcagagctacagttcccacagcaactagcagtcagcagcaagctgagaaagccagagttctcccacataactcagctgggttgtggctgccgggtcttttggcttggcaagtaaaatctcagaccgtccatgtgggctgaggttttctgctgatagcgagacaattaacagggctcttcgagagtctattacaaccacggagaggccttttcacattatctaggggaatggatcatcattccagccaagggcctgccaaggtacacccattggggtgaaatggacactttctctgttgcatcattggcaatatgcatcctgacaaacaatgccatattggtagaactgactgactgtcaaatgaaccagcgcagagcaggagaggggaatggagagaaaaaaacaaaaaacaaaaaacaaaccaaaacaaaaggaatcagtgcttcaatgaggaggttttttatcagctccatgtccacacataaaatatctcttgatcaatttcatcttaattactgaatgtaggaaaacaagaccattgctaattgatgtggctttaatttatgcatcagagaattatacaggataattacctgcagttgaagaaaaatgaatactgtcaaatctggctaatacatgcgcaattcacccttctgcgtcttcatctgaaaagatttaaagtggtaaccaacctaaatgatatgcataacggcactggcttgcaagcagaagtattttctggtgtataccctttgatttgcatcacaaatagagttctcagattgagactgatgagatttgaatattatttctagaacaatagctgtgattcaccaatttaatgtgtatttgatctgttccagaagttcccatttttcaactcagtaaaagagaagttgtcttcatagccccatgtcagcccaggcatgatttctcttctgaggataacttggtgggattgatgatggtttcccttatcgagattcatgggagagttccagtttccatcagtaactgcttcccacattgtcccagaacctccacaaagcagtggcttccaaaaatctgaaactcaaacaagcagctggaaagaattatgggtccacaaaagaacaccaatggaaatttcctgatgacttgagtcaggctgacaaagcctctgggagctctctcactgtgtcgaggggagactaaggcttggataaagttgacttaaaaatcaggttacacacctgtcatcacaacactcagtagaggaagggggttggctgtgaatttgaagccagcccagtctgtcttacaagttcctgtccagctagaataaataacaaaaaccctctaagctgcagaggtagcttggtatagaacatttgtctggcactgctctgatcaccagcacaaaggtcttgccgtattcatgccatattcatattccatattgtcatattcatgccatattggtagcagtggcaggctttgttctaagctttcttacagccaggcaaaaaaggcaacatagcaagttattacttaagttgttgtgatcagaagtgtatatgtgtatatatatatgcatatacctttgtgtgtgtgtatacatgtacacatgtacacacgtacacacatatgtatacatatacatgcatgtatgtatataagctggctaggaatatatacagacaggactggcctcaattgtgatgacaggtgtgtatccctagtttttaagtcaactttatctaagccttagtcttctctcaatatgagagagcttgtatatatgttatggtatagtatatatatatatatatatatatatatatatatatatatgtgtgtgatatatattagttaatataataacatatattccttggagggcaaacctttcaaagtgaggaattatgaagaggtgtcttaatgagggaaatgaatggaaccaaagcaccacacaaaactcaaagacaacagccctgtgctcgttgctcttcactcctgtttccttatctctccttgaagctcttcccaaggcctaaaaatggcaagggaaagaaatacttaaaaaaagaaaagaaaaagaaatgtctatatttggttatcaattgcttctttctgggaaaagccatataatttaatctaggccaaaattacacaccataatcagatcttgttttcagcaaatattagcaagaggtgttaaagatggttgaccctagccccacagtcctttatagagagcccaacctagagtggggccacagctgctcagcggtctcatgactgggccagaattcgtcatttgacactttaaagttctgagaagactaaagtgatcagcaaaactgagaagtgtcaaagcacacaattttcattgctaggcaaggtcctttgtctctgcagccttgactttggtgaatgtgtggatgtgaacagcaggccttggtttatatgagcatctatttggtggaactttccacttggcaggcctgatgccttttattcctcagaaattaagatgcaaatgttacactcaacatcttacagaagaggaggccaagtaggggggcacttgtccaaagagaggactcatagcaatagggtgactgcaaagtgatgcctcacatgctatgtgtgtgttcttaaccttgcagagccgtctacttccttgtttgtgctccttacctctcttgacctgctattaaggacattggctgggaccatctctaagcctgtgtaacacaaggcctctctattcctgagagctgtggttagtcaggagagaggtactggactcatgtggaaggccaagctgcttttgcacactctcagactaacactttgcttcaatgctttgtgctgactctggaagtgctaaggaaagtgaagttggtagatacttgccctttcctgctgtgaatattaattgtgtcaccctgtaatcccctctctgacacccctcctccagagctactctagagaatggcagaagtgggagggggttgcagtgactggctgcgtccagccacctgttcaagtggtggcttcttctctcttggccccaaatacccaagtctgaacagttggagggcatctgctctctaagctggaacacccgcactgctgactcttgaaaacaataggcccagcctgccaaacaatgtatttttggtacagagaaaaatcctgtccctcctagggatcaaaatacattcttactcgaatgtgtgtcttttttttttttttttttttttaaagaaagctgcctggttcacattctgaattctactcatcccatttgactgtcatcaatgcctacatgtcaataccctcagtacttctgattccaaaatctgggttgagctttcagaagcaagatgaatgtgcctcagtgtggttcactgaagccccgacaagtggtgccttggaacagggactccgaaagcttccccagccacagtccctctttgccagaggaagatttatgcactctcaagcgtctagatatacaaaataagaatagagatcagacattcgctgataacaaatcataaagaaattaattttaaaacaactcctttaagggctggggaagtaactcagaggttaagagcacaaactgctcttgcaaaggcccctactttcttcattcttggcacccacatctggccgctcacaaccacctgtaactccagctcaggcagatccaacacctctggcctctaagggcacatgcccttgtgtgtacataccacatccctgacacatacaaggatatataattaaaaatactaagacaataaatcttggaaaaaaagtcccttcatatgcatgtaatttttgccatttcttggtgaaaaacttgcatgcacagaaactggctaggcttatctattcacagaaggagtttaacattggcagaatatttgattctgtaagacagaaggtcttcagtgattctgagctgaccaaaattctgattttataatcattagtgctgagaatgcaactttaaatacttacataatacggaagggcagaagtatgcttagcgccatttcagaaattgctagaatcctagtaaagacttgcaaataaacacttgttaagcatcttgagtgaagttgggatcagatgaccagtcactattaagcacccaaaggtcaaatgtgactctgcttactgtagcctgtgtgcatgaagaaaacctaagccctaggaagaggtttttcaaatcttatgcaggagtcccagtccagaccacctaagttggacaatcagggaatgagtcttaaactacaacatttttaaaaagaatctccccaggaaatcctaattgcagccagtctgaagagtgctcttttggctcttgtgtttgctggtgacatcaagggacagtggctaagatataggggccttattttagtgcaggaagatccagtaattcagttcctaagaatgcatgtgactttctggatttaacacacgagataagatgcagggcattgcccctcgagcagtagaggctgcctgatcgtttttgctgaatctacagtgttgtcatcaccataccggggccatccatacctaataggcaaccttgtggtggagaatggttgaagaataaaagagtaaagtctatgggagccgtatgagacccacctagtcttctccaaccataaaagcattggcttagtagagactgaagtttataggctgacaaccctatggttcaggttgccagagagtctccctaaggaacaggaaaataaaactcagcatggtggcacacacctgtaatcccagctctccagaggtggagacaggaggtcaaggtcatctttggttatgtaggaaattcaaagccagcttggactacagaagacccttcctgggtcagggatgcgggagagaagaaacaacaaaaccatgaaagctgtagtaggatttgtacatctcagctaagggacagtggacatgaagggtggcaggatgggctgattctggttttagttttgccatccatcttattagaacagttgcctgaagaccagtttccttatgtgtaaaggaatgctaataactgtcactcccaattcacaggctgctatgaggcctaaggacttgggaacatgcaggctatactcatgagctatggtgaagaagtaggctcactgatgagatcctttcctgatatgtgagatatgaacagccttgtagccaccaagacagagccatctttctgttgattttgatacctgctgggctatctgctcctaaaagtatttggttccaggtgttttacaaatttaatacagtggagaatgcctctgtcaggcagtatcaatgagtcccctacacagaaacatcattccatttttgcagggctgatgttatctagcctgatattgccagcctgctcaaaacgtatgtgtttctgcaagttctgtcaacatgagacttctgtgttctcttagccgtgactaaagtcctagaaagctcccacgtgcttctggagggcaggaagagagtcaggggctccctaaaggccgctcccattcttctgttggtctcttccaagtccaagagccatgatcccaagcttgggctttctatgtttatacagatgtccacccacgtggagtggaaagctacatggctatggaaatcattaaagccagctaattttaccacccgtgtggcttcttgttttctttgaagttgtatagggttgatccatcaatttaaaaggccaaaccaattctccttcctttcctagagaaaatagacaaattcctcctcactgtggattcatcttcacctgcttcacatctgggggtgcaggttttcatgcgttactattatctttggtcccccacagggttcactgtgccctgatgagctcataaggactgtaaaggttttgtagaggagacatagcttcggtgggtggttcctgagaagtgacatcaagtcagacctttgctcccccccacacacacactggagaatgcaaatgattaaataaataaaattaattattcaaacatgcataaacataggttgcgtaaggcaaatccctaaatatccatcatccagttgtaaaaattgtccaagattttctatatttgcttgatagatcattttagctttcgtaactgcagaagccaaaccagacctcatgtcatttccctggtacacacttcagtgtgcattttgaaactatggtgttttttttcttggataattccaatgtcatttcataccaatgaaataagtaaactttcctgcctattgtttaatatctaaaccatattaaatgctcacgcatctcagaaatgactcctcattagcttgtcatgatgagaagggacaagcattgcagagtgagggctgagttcccaaacagcaaaagcagtccttcacatggcctgatgtggtccagaggactgagagattgccttgatggtggcatgggtgtaggagaaaccagcatctgaataccgggacagggaggtagccaagctacacaccagggcttccagaacacttaggaaaagccatggtcaatttcctactccataaaaatagttgtggctcccatccaggtaaattggctgaagacaacaaccgggcaaggcaggcatccgagtgcttgagaggctgagacaggaagatcacagcatgttccaaaccactctgcctcctctgtctgtctctatctctgtctgtctctgtctctgtctgtctctctctctctctctctctctctctctctctctctctctctctctctctctctctctctgtgtgtgtgtgtgtgtgtgataagcagggaagaaagcagcttatgcttgcccaggtgtcagcctgatgtaactgactaggagttccgtacgctcacaaaagacaatgtgacaaggccttctgagctcaacgtgcaagcaatgtggcttccacgtgtgcactagttacgctctcatatgttcttttgtctctgttgctggggattttccctatgtcgttaaatccagtgctgggttccttctttacactgcactgttctcgaagcttaagagagagatgggtttctgcctcgttactgttttacagcttcatatcctttgaacaagacataggatactaagaaatcattggaaacctcactgtccagtgggaaggcacattattctgctgtgcttgagcacatagctgttctgcatttcgatgataaacaatttggctttggcagccaagaataactgtgcagatgttctgcacccggccacttcttggtatgcagcagcaaggaccagcagaaaccaccccaattatagcagattaatgtgctaaaattaccacaaagagagcatgcgtatgagcctctggaaagccacttaactttgaacccgctggcatatgatgggacctacacacacacccctgcctcagactaactagttgggcatagatgcacatacctttaatcccagctctcaggaggcagatcagtagatctctgtgagttcaaggctagcctggactacataatgagtttcatggtgaactacatagtgagaccctgtctccaagaaagaaaaaaaaaaaaaagactaattctgaagccaggtttttctgcaattaagcagtttgttggcattgaaatgttgcttttgaaatgttgtcataaaaacaagagtaaaatgatggattgacctcagtttgaaaggaatggttttcgagtactgttacagcctagctgagatgtaggcattatcagttcttattaccatgccaacagttgtgactgtatttacatcacagactccccggtccaacctctgtcaactcagtacctcacagatgccttgtaacactggctccaagggatccgatgtcctctgcagacttttatgggcacctacaaatgtgtgaatatacattcacacaggtaaatcatacaataaatctccaaaaaaaaaaaaaaaaaggacaataatgaggttgcaaggggaacctgttgtggggtggctggtgcatttggggagaggaggtgtgtacaatcataatacatttgtatacatatataaaattctctaagaataaatacataacataacataacataacatagaggacatgaaaaaatatggccacaaaaaattagtgggtcctacaaaaaaaaaaaaaaacactatcagtttgattttatacacctactctaagaagattttaattacctgtccattctctaacatgaatgcagcatatagctttatgtataagaactcagactcattttctacctgactcttgtcccattaaagaatgtcggcgtttgtcaagcttacaatatgcaaaagcaatccctagcacactgctgggcatggtctcccagaacccaaccgctgtttctacctaatgtctcaaagatggagctcagttctgttgagaacaataaaacacaggcactcgtttaaaaaaaaaaaaaagtgacaattttagaaaagccaaatcggacggaagagaacctgtcagtatcattttgaggttgttataaagaaaccacgactaagggagtggccaggccctagggatgatcggtccggtccgagtgcagagtctctgggaggagctcactttcttccacaccacagcgatgttttttcaatctgatgatcaaaaaggggagggggcatggtgggtgtgtttttctctcagcaggatcagccaagctgtctccaaaaccatgttcccaagacacattccccttttgatactcacggtttaaaaaaaggtggagggaggagggaggaggaggggggcaaaattacttattattacaaacagcctgagcctcctttaagcgcaaaacgctcttgccttctaacccactttgatgtgtagtgtgtgctctgaagtcctgtgcgtgttctaggctttgcattttaaaatgagtaatgccaacattagtcaaaatcaacccaacccctctagagatttaagtgggttttgtgtcctgaatcatttctcgtctaattatcctgaggccagctgctactccctgcatttatttaatccaccagaacggaagaaggagcagaattgtcattttccccagggctgaagcacggccaattatctagaagttcgtacaattgactagcccgatgaatagatgggctgttaacgtttcttctttactcttcacatgactcaggcaggcacttaaaatagcatccacatactgtactgtgctgtcacctttggggaggggacttaggagagagactgggggcagcacagtacttcctcactgtgtgttttctcagctatcaaatgattgaggcttataattcgcatgctctgggcatcatcctgagtgaggtaacacattcacaaagaaactcacacaatatgtactcactgataagtggatattagccccaaacctgggatacccaagatataagatacaatttgctaaacacatgaaactcaagaaaaatgaagactgaagtgtggacactatgcccctccttagaatggggaacaaaacacccatggaaggagttacagagacaaagtttggagctgagatgaaaggatggaccatgtagagactgccatatccagggatccaccccataatcagcatccaaacgctgacaccattgcatacactagcaagattttattgaaaggtcccagatgtagctgtctcttgtgagactatgccggggcctggcaaacacagaagtggatgctcacaatcagctaatggatggatcacagggctcccaatggaggagctagagaaagtagccaaggagctaaagggatctgcaaccctataggtggaacaacattatgaactaaccagtaccccggagctcttgactctagctgcatatgtatcaaaagatggcctggtcggccatcactggaaagagaggcccattggacttgcagactttatatgccccagtacaggggaacgccagggccaagaggggggagtgggtgggtagggaagggggggtgggtgggtatgggggacttttggtatagcattggaaatgtaaatgagctaaatacctaataaaaaatggaaaaaaaacagataaaaaataataattcgcatgctccgtttgattgatgaaactcaagtgtgtcttcaagctgcaattctaggtaatgggaaagaccattgccccacactaggctatgcttttctccttgaagcaaccttgataacttaggacaagaaagagtagggcttacagaagtaaactgagtggaatgcttcaacctggccccaaagccaagcttttgtttgtctgtggatttctgatttatttcttgggtcttgccctgtactgactatcttagaagccttaaaagacagctagtaaccctcaaaaaagatgtggcttggttaaagacataagacatttggaaaaataatggtgaagggaatctctaaagatgctaagttatggctgggctgcacagaaaatgcttccagaaacagctgagccaggcatgacggcacatgcttttaattcctgcatttggaatctgaaacaggactgtagattcaggaccagcccagggtacacactgagatgctgtctcaaaaaaaaaaaattaatagaaaaacaagcaagcaagcaaacaaacaaaaaacagctgcttctttcttaagatgatagtagtagattatagcccactggggaaaaaaatccacgagttcatattaacaacaaactgattaatgaatataagcagtggtaggaaaagccccttcttacataccaaagaatgataggattcaaagatggccatgatgccaccatcatggttataactgactgggacaatagtcagaaaatggcttaccagttcagctgggctgactggagagtgagccccaagaattcacctgcctctgtttccccaatgctttgattattaaagtatataccaagtacctcaagcactttaccaactgtgttctctctccacctttctctgtatttctaaacgaaagccttcccatctgtgtggatgtctgtagtttagaaaagacccaagcagtcttgagattgacttcaagattgaaggaagtttcagtctcagttgaaatgcttaatgcttgcattaaaatggagactactggctaacaagatggatcagatggatacttgctgcaaagcctaatgacttgagttagattcccagggcccacatggtaggagagagcctactcttacaagttggcctaagactttctcatacatgtaccatggaaagtacatacataggagcacgcacgcgtgcgcgcgcgcgcgcacacacacacacacacacacacacacacacacacacacacaaatggatatattgatgactgaatggatgagaaaaataaataatgaaatgaagaattgctttctctgtttcacaaagacagactccatagctgctcaagttacacttgcttaagaggcctatcggacctaccttggtccctccatctgcttgctaaggagtgagattataggaagtcatttatacattttttccatccatttgtatcacttatcttagttagagttggttatctgctttacaatgttgacatttgagaaacaattatcgacactgccttggtttactttagagcatcaatactttaaagaagtaggcaatgggagctggagagatggttgctcttccagatgacccaaggtctcccagaagccacaagcagctcacaaccatctgtaattccaattacaggggattcaaagcccccttctgtcctccacagccatatgcacagacccacatttaggcaaaacacccaaacacataataaaaataaaataaatctaaaaatgtaggcaacgacttaaatacatctcctttttctaaaagattagtcaactctgtaataggtgccttgtagatgtataataagcagatacctatttttaggattcatttcacataatcatttagcatagcaggctatttacattgggctcacatgctcattgagacaactgaattatacttctgctcttgaccaagatgtggaggaacacaaacagaagggcacactgttagggaaggagggacctgtcaggcatggagaaatgactcagagatcagtgggcccagtgctgcctgggacttggccttactaaaaggatcaacttactagggttattctgtactcagagtggggcatccaaccaactcacccaagggtttccttcccttatcttgatttcttgggtcgttctcttgtagaaggaatgatgatttttttttttctggaaactgatgatctttaaattagctttattgagctccagttcctctgccatgacattcactcattttgtgtttccagtgtaagtcttttttttttttaagatttatttattacatgcaagtacactgtagctgtcttcagacacaccagaagagggcgtcagatctcattacagatggttgtgagccaccatgtggttgctgggatttgaactctggaccttcggaagagcagttgggtgctcttacccactgagccatctcaccagccccagtgtgagtcttaataaatgtctatagtcccatattttaaagttgttattaatctatttaattacttgtatttatctttctttacatttccctacattgtagggtgtggaacctgaggctttgcacattctaggcaagaactccatgatcagccatacaccaacctatcacaatagaattctagcttctaccataccctagaagttctctggacttcactgagtgtttctagccctgacctccagaaagcagttgaactgaccatggaattgtttagtgttgttggcttgtcggctgtgttctctccaagggctggtttcagtctgatttgtggaactcctgtagcttcataactttgaaggattagtttctgattggtcctttgcccctgagcaatgctttgatatcgggagcagagctgtccttcctcatctcactttgacatcatagatgtccattttctctcattacaaatgttttgtgatgacctgtttatggtccttggagaattttttttacagaagagaaggacaaccccacgagggtcaaggtgatcgggttcagcacctgctacttctcaagatgtgcttacatgatgttcttacagctgaggcatgtacacatgtgatgcactcctaatttccatggaaccccaccccacccctgaccccgccaattatccttgcaaggatcacctttgcctttggccaaaccctctccatctaaaagtcagaagtagaaacatatgcaatacagtctaggaggctttcccattattgagagagtatggattatgggggttaaccttttaagatggtataagacaaacattaattacgaaactcagcccccaaagaactttaaaaaatgcttgctgaggaaagcagagtgcaaaagttagcatgcagtctgcaccacaggcatgcttgcagggaaaggggaaagtggaaaattaaagaaattccactgtggtcctgtgggtgtgtgaagagcatggttctccttgtctttcccttccccgcccttttctgcccttctgtattttcctgatgttggagacagttttgatgcctctgaaactttgaaaaaagcaaaaaacctaactattcctggttttccttcctgaatctcattgggtgttgtgacatcaacaaggccttccttctggctggctggttggtttgctgcttgctctcgttcagcaaagcctttaagcacttctgctttgagctcctcggggtgtagatccaggcctggcaagtgtgagcgagtctgttggagatctgccccttgccatacctgaccctgttagtcctcaaggagctattgatatttgaagagagaaatatgtaaacacaagataacctaacccccgtgtgtggaatgccggctaataaaagcacaataaaagtagaactgtcatccagactggaatcccattcattctcccatcacttctggtggcattagtgagctactgctggggctacactgtataggcaactttgacaggtgttcttcatagtcagtctccaagcaggcagccctccaacagtgattcccataactggctctttgacatcaggttatttctaagttctccatgtagccctaactttcattggttttcttcccttccctttctggaccagccacagtgtgagactgggtggggtaaggggaaatcagccagccactttcatctcttcatctgcctcaacctctcctccaccttctggcctagtgctcttgtcccgaacccgactgatgagacttcttctgatatgatgtctaggttgaggaatggccaattgtgtcatataggagacagacatacatgtatgtgtaccacatacatgcagtgttcaaagggaccagaagaaggaatccaattatgtcatataggagaatgtgcaaaatcttatcattttaatttcaaaagatctgtatgtgtttgtgtgtgtgtgtgtgtgtgtgtgtgtgtgtgtgtgcgcgcgcgcgtgtgtgtgtgtgtgttgataccaaaagaaaacaccaggtatcctggagctggagatacagatggttgtaagccgtgtaagtacaggtgctaggaaccaaactaaagtcctttggaagaaaatcaattgcccttagctgctgctaagccatctctccacatctctgtagttctcagaaagaccagtctttaacatttttttttattatttttatgtgtataagtgttttgcctgcctgtatgtatatgcatcacagacatacatgtatctgtaccacatacatgcaatgttcaaaggggccagaagagggaatccagtccctggtactggagttatgattgtgggtactggggcttaaaccctggtcctcttgaagagtggccagtgttcggaacagctgagacacccctccagccccaagatgcctttttgcaaaccccagcagtcttgaagatgaataacagcatccaaaagcgaatctgttgatctgctgatgacttgtgtgcatgaaaggagctctgcttgttggaaatgctttggatgaagcttagaaatgtagatgtggtataatctctgccggtcttttgagtgaaagtcaggaagttgttacctaattcaaaataaggacatcagggggattgtgacttgcttgaatctactcaaaatttatgaaatctactgcattgtttctgagaaatctcatttcttctttatgtggcataagtaaataaagttggcacccaacagctatcttacatgatctctgagataagctgtcctctcttcactctcaaccccaatggtccgcaatcccaggaaacctcaagaaaaggaatttttcatccatgaataattcatgtattaatctctgtaggaataaaatgcagacataccaaaatgttgcttactaccattcaatcctgcctgtccatagacaactctttatgcctccgtaacttttccatcaatggacatagtgtcctatggtttcgttttcaccgttcctgggattatactgtgcctactatgtcctagaggtctttctttaggagaactatatgacagcttagtattattatttactattattactgggtttgagacaggatcttactatagaacccaagataggccttgaattctctcctcctgctccagcctccccagtgctgggatgacttgcatggaccactcagcctgacattgtcttcactgttatagttctctaccttggtgattactccacagtgcacttgccatttccgtggtgatttgtgtgcatgtgtgatgctgagcattgaactcagggtcttgtgaatgataagcaagcactccaccaggcctggtagttagcatggatactatttctcagtgtgacaaacatagcctggaatgaacgtctcttaggtgcctctctgtgctcttaggtatccccctcaagccacacaaaaggatgagtatgttttacatttccacaggacaagtgtcccttccaacagtggccccacaattctgttagtacttttttaaagttaagacatttggcctaatggagtatctgctatcaaaatataaattactccaggtgggtagttaaatgctcagtaccttatactatgttggatagtagagagggtactgtgtagagcagctttagaaactgaataaacttgcaggctttgtaggagggcaacaagctatctgaaggcagaggaccctaaaaagtagataggtcagtcacacttcttccactgaccaaatatctgacaacaaagcaacttacggaagtttatcctagcttgtagttcaaagaaatacagttcatcagggcagggtagagacatagtgacagccacatgtgcctggggtctggaagccaaaccaaccacgaagcggagagccaagctatcaaatcccaaggtgctcttcacttcttccagtgaagtgccacctcctgaaagttccaaaactgtgccaccagctggagaccaagtttcaaggccatttgtccatgggggacatttcacattcagatgtgacattcaaatatccagagtaggggtagagtgatttaaaaagatgctcaaagatgcagattgcaaggtcatttccacggactaaaggccgtagaagctgaaaaaaacgcaacaaagaatggtccccctagatgggcatgctggtacccacctgtagccctggagctactggagaaggaccaggaagtcaaagtcagcctctacttcatagcaagtatgaggccctctctcaaaaacaaacaaaaagatttgtcactgttcattctgtgtctggagacctgactccaggggttgagggacagtgttttgttccctctatcctggtcagttgctccccaccctgcacaacccactccatttctttaagaattgggtgtgtgtccatgtgaatgtgcgtgcatgtgtgggtgagcatgtgcatgtatgcgtgcatggaaatgtgtgtgtgtgtgtgtgtgtgtgtttgtacgtgcatgtgtgtgcacatgggtgtgtgcatgtgggggcagtcagggaatggataggaggatagagatttcagcctaaaccagctaacaaagtctttcctggcagatgatgatcattgctgggagagaagagatgagttagagttaacccctcgccagccacactcctaacagtcacacaacccccatgggaagttaagaaaaagactctgagtaacacttcatcttccaacgcatgtctatcctaaaatccttcacaagcacctgctccgagatgcttttgtccccatgacaagaaaaggagaaatgagcagattacacagtcttggagcacaacttttgtaaggtaccatttcattcacctaatgtgacaccaggattttgcagacaggggcttaagactgaataacaagccaggcatagtgttaaatgatctcagcattcaggaggctgaggccaagtctgggtcacagagagagttacaggacagcctgagttatatagcaatacccggcctcaaaataagtaaatgaatataaaataaaaataaaatgaagaataaaaattcaagaacacattttggttttgtttaattgtaacactgatgtaagtttgacattttgcccaacagggtggatttcccctgctctcttgttctttttgttgcaagcctatctttgtgcaactgactgtgcaattgaaacttctaaggcagtgtcttcacaactctgctagacatcagaatcacctgagggacatttggaacactcatataaacaggtcattgcctgtattaattatcctagaatgcctgcggcttaaagccaggtgactgcagcttaatttactgatgcaaagagtaagagtgaaaaaatctttgggtttaaaagaaaaaaagtaaaacatacagtttcatcatacttaaatcctagcacagggagcaatggtgccaggttcatccaggtgtgagcccaactttctttgcgcagcaagttctagaccagccaggactgtatggtgagaccctgccaacaattccaattgctaaggcaggggaattgctatgagttcaaagtcaccctgggtggcttagtgagttctaggccagtctggtctacatagtaagattccctctcaagacactcacactaaaaaaacctgaaaatacatgcatacatacgtacataactataatttctagaaactctgggacacttttaagtagctttagtgtttgtttgtttttaatcaaatgactgcttcattagacctgttgaacaatttacagatgagacacaataagattgtcaacttggggcactggttgctcttccagagggcctgggttcaattcccagcattcataaggcagcttacaaccatctgaactccagttccaggggatctggctctctcttctgacaaaaagacataaagtaacataaaatttaaaagatttatcaagttgaaacttattcagatgagtgtttgtcaaattattgcatacagtactgggtagagcccctgacttgcatgtggggccctgggttcaatgcctagtaccaaaggaaaacaaacaagcaaaacccgatgaagtgaagtcagaacatgggccatggtgtcttcctgacgactcttgcaagcttgcaggtgacatcatgctgcacagagctgtcaccgtgagcccaaggactatgtcctcactgaaatgtagatagacacctaagggcaatgaagagcaattgcaagaatttgttgagagattcaagaactgggttttttgtgagccttggggctgatatggagtaaccaggaaccacctcatttctgtgcacagtccgacaaacaaacaaacaaacaaacattaaagctatttgtattagggttcacagaatatacggaatgtctttatgtattgagggactttattatgatgacttacagtctggagtccaactccccaacaatggtcagctatgaatgagaagtctaggaatctagtagttgctcagtcccacgaggctacttgtttcagctggtcttctgaggaagtagattcctacagatgtgctggcaagtaagtgcaagtttcgaagaaaagcaaatctttcttcttccaatatccttatgcaggcctccagcagaatgtgtggcccagatgaaaggtgtatgccaccacacctggatctaggacttgttttgtcgcaggctgaccttgaactcagagatctccttgcctcggtctcctgggattaaaggcatgtactccttgcctggtcataatcttttcatggccactgtgcctcaagatctccatgccaagatccaggtcagaaacttgtgtcttccccacttaagatctatatcatggggctcatgagatggatcagtgggtaagaacatcgactgctcttccaaaggtcccgagttcaaatcccagcaccatatgatggctcacaaccatccgtaaggagatctgacaccctcttctggagtgtctaaagacagacacagtgtacttacatagaatgaataaataaataaataaataaataaataaatctttaaaaaaatatatctagatcacaggtgagccctccaattctggattgtagttcattccaaatatagtcaagttgacaaccaggaatagccattacactatttaaaataattaagtgtctcagagtttctagaaattatgtatgtatgtatgtatgtatgtatgtatgtatgtatgtatttttgttttgttttggtgtgggtgttttgagagggaatcttactatgtagaccagactggcctagaactcactaagccacccagggtgactttgaactcatagcaattctcctgccttagcagttggaattgtaggcagggtctcaccatgcagtcctggctagcctagaacttgctgcacagaggttgggctcacacttggacgagcctggcacctttgctccatgtactaggatttacgtatgatgaaattgtgtgttttgcttgtttcttttaaacccaaactttacatagttctagcccattatatttaaaattcgagagaatccctctgtctttggcagctataaggtttttgtcccatcccatggagaagccagcctactgctgcctgcccccagattgacctccttgcatgtgagcaccttgtccccgggaataaggcacatttctcccaggagtgtagagacttaaactcctgtgacagtgtggagaggagtctgccctctgaggacttagctgttctctctttctcctagggtccttaaagaacagtgggtgacaattcccaaacacactaattggtgtgtgtgtgtctgccttttgaggtttcaatgtggacattctcctatcctgtgagctcagcccctgcctgggatgacatcacccactgagacaatggtgcatgctttgaggctgtctgcttgacagtgggtagggttacctcacagttctagggcagtcccttgggggactaaccttgggcttctatccagctgaagttgcacttgacacggcatcttggtctgtcacagggaatcttcacaaagccaaacagagaactgaagaagagatcaaaaggagccctcgtgggcctcctacctctcttgtgttctcacctaaccctgattatcatttcttttgtgggctctccttctgtcctttcttattttcccagacaatgcagtgacacaaccttacctatcaagataaggagagaaagggggaagagtttaaataagttcatcttttaaaaaaccctcgtattttcagccttacacatgaaaaaatcctatctgcaggcctgagtatgttttgaatttcaggtcgaactatctgaaactttgatggtggctcatttgtgcagtgctgttgtcattgaatggactgaaccatcacacaagttctcatctttagtaaaccttgattgagcctaagaaagaagagggaggggagaagaggaaagaagggagggagggagggagcgagggagggagggagggagggagggagggagggagggaggaaggaaggaaggaaggaaggaaggaaggaaggaaggaaggaaggaaaagaactattaaaggaaatatacattgggcttgggagatacagaacagctcagtggataaaacacttgcaatgcaggcttgcggataaagtgtcagtcaccagaacccacgtaaatgctgggcaggcatagcagctgcctggcagagcatctggcctataaccccagcactgggaagttagaagtgggatccttgaagcaagatggctaagtacactagccatatagtcaatttctacattcatctgaaagacaaagaggaaaatgaacacaatcttggaagattcccacagtcacccttgagtgtctacatgcctatacatacacgcccacacacatgtaaacatatgtgcttcatataaacatgcatgcccccgactccaaaggaaacctaagtggcagcaattttgtgtttgtatttattgtggtctaaatggatgagtatccttttaggaacatctcagaagcagttcatggccagggtcttgtgagacatttcaccttgtcacgcccctgaatattgacaagcctgacagtcaccatgattttccctctgtctacaggactgccaaccagactcccagaaatcatgctggtgggatcccagtccttctctcctggcgggcccaatggcatcatccggagccagtccttcgcaggtttcagtgggctgcaggaaaggcggtccaggcaagtgctgggtgctcctcctgggatgcagcagaaagggactgtgtgtgtcttgctgatgtgcatgtgtgtgacagctaatgtcttcatggaaaggataacacatccatattaagtgtgatctttcctatcatttacaattccttgtgtaaagatatctgagcatttaggatgatatatatatatatacacacacacacacacacacatacatacatacatacatacataaacacacacacatacatgtacacaagtatgcatacacatctggctagcttatcctagctgttatgagaggctacgccctcactattgagtatgtggtcactccaagctgtggttgaggggaaggtttttaatgtagatgtgagggagagatcagcagtacagccaaggcatctggaagagtccagagccaggagagaaaataatacactgaacatggccagcagagtgaaccaagccatgaaatggggtggggagtggggggagtaagaaagggcgctgagagaggggggggtgcaaaaagaggaccaagagagcacatgtctgaagcggcagggttatataggttatgtagaggctaggggaagggaagcccagcagtgcagaagtttaggcttaggagccctgtgaatccagccaggattctgatctgaggaggtctggaggccagcatgcttggttatgctaataggcaccacagttagttgcagactccttcctgtctcactccctttaaagcacactttcctttaccctcctgtttcagagactggattggtatgaaattatgcagtgggtgaagactgtgcctcacagactgcctctggagagctgatatcatgtgggtgggggttgggaaattaggctctagtttccctggaacctcctctcataaaaccaaggaaggtcagagagtgaatgggtgacatgcatgagaagtcgccctcacggatgaggttctccctttccaaggggagctccagactcagagagagactctgtcttaaataaataaataaataaataaataaataaataaataaataaataaataagtgtgaagagtgacaaaggacgatacccaaaagtcacctccagacgcatgagtacacacatgcactagcagaccctgacacacaaaaataactaaagtaaaataagataactaagacttcaaggacagctctaactctaagctccgtgctttactttaatgccctagaaagttagctatttgcggggctttgggcactttacccaaaaggtatcactcatatcctagcaagacatacatttgtatctgaatttatgcaatgacttttcttttcctttggttggatataactcctacctgtttcttgtttccacctggaaccatttatccctggctctctatgagctagaccacgagagcatcctcaaaaggcatacactgcaagccaggctatgcctgcagggtagagcttgtgctctgcacagctttcagcaagcaaacaaatgtcaagaaacaaaatgtggctctgttcagttctgtgctattcaaggccacgtctcattcctccaggcactgggatgaaggcaagatggtttaaagtcatctctccagtgggtcttttgatgcctgaggctcacagtttcctttctcatctctgtcgttaggtgtaactccttcattgaaaatgcctcggctctcaagaagcctcaggccaagctgaagaaaatgcataatcttggacacaaaaataacaacactcccaaggagcctcagccgaagagagtggaggaggtctaccgggccttgaagaacgggcttgagtaagaactgtgcctttaggaaaggtcttcttccctaaaatgaccttcctaaaaaccagtcataggaaatccgttttgaaaggaccatgtgagccattgctgctttattctttggttggtttttgaggcgggatcgcatggagctcaggctggccttgaactccctatgtagaccttgcagttctgatcccgtctccatctatcagacgctgggattgcagggggaagtaaagtgtgccagcacacgttcctgggtgtttccttcttgctctatcattgaggcagctttttatgtctcacagatgggagacaggttgtatttgctcatggaatcgtgaccctgaagtaggcttgatgcagtattgtgtctatagctaactccctgaactgtcggacttcacttagacaatagctaactattagatagagatggctaaagaacggttctgagccaggcgtggtgtgggtcacacttgtaattctacctagagctcaggaggccaaggcaggaggatcatcaaaagttcaaagtcaacctgggtgactcagtatacaatctgcctcaaacagacatacatgctgtttaaagtttgtaaagggttctgaaaccttcctgaatgtgttttaaggacagtttgtcctgaagaaaacttgcctagcatttggtaagacacctacagtaactactaggtttaacttgacaaaactgtgtgacccaggtcctgtctatcttccctccccgtggacttttctcttctggattttcagcctcgaaggggcactctggctacctctgtttcctttcttcaaactagacaggctcagatgcagctactagactctcaaaatgctcctgaaccacaagtcaaagttttgattctttttcaagagagaggcagggtctcactctagaacccaggttagcccaagagttactatgaagcccaggctggcctagaatgcataatagccctgcttcagtctcccaagggctgggctgagctgagcttacaggtgtgagccaccacctgacagtgatcgatattcttaacccccagtagtcagcgactgcccagattgctcctgaagtgagcgctcactaggatgtcttacctttgcagtgagtacctggagtttcaccagacggagctggacaaattgactgctcaattaaaagatatgaagagaaactctcgcctggtaggtacctctctggtcatgaggatgttaacacagagtagagggtgtggagttcctctccttacttactggaggggagaaggggcaggaacattaaagaaaacagattcaaggagcaaagctatcgcctcctggtgtgtattttagaaggaagaattgctgagcctggcggctcacatctggaaccccagaaggagggagactgaggcaggaagatagccagcctcatatagggaagccttgtctcaaaaaacaaacaaataaacacacatacacacaataataataataataataataggaaaaagatgtttttcttttaaatgtttaattcttaatacttccaaaggtcctgagttcaattcctgcacccacttggcagctcgtgatctgaagccttcttctggcttccagccatacatgcagaagaacactcatatacttagattcataattacatctttaaaagaaaactctacataatataacaaaatgatctgttgccgttttcctagcatctccttagtacattcagaaaggagaacatgcgctttatcttccatttgtaaatgtaggccagtgtcctcgtttgctttctgttgctgtggcaaacaccacagccaaatgcaatttacagaaaaaaaaaaaaaagtttatttcagctcacaggctgtgtactccatcatagaggggaagtcggggcaggaacctgaaggcaggaacattagctgaggccaaggaggagtactgcctactggcttgctccccgtggcttgctcagcctcctttcttacatccttgggaccatgtgttcaggagcggtaccacccaaaatggacaggacccacccatattaatcattagttaagaatatacccccacagacttgcctacctgccaatcaatggtattcccttaattgacggtccctctttgcagatgaggctgacttgagtcaacctgactgaaagttaaccaccacggtcagtggaggcaggcagggaagggagggaggaaggtcactaagaggccagtgtgaaagcaccattgagcccccttagaacccatgctgtatagctaatgtcttctcttctgatgagtttgtgagcactgattttgttcatttcacagtgttccttattgcaccttaacatttcaaggcagcaggaaagcccaggcgagtctgcatccgtagacctggcagctgtggttagcatgtgtttgcctttcatctcactgacctgtaaactaaaatgctttttgggttttgtttatgaacccttcaagctgccaagaggccaacaagaactgggtgcaactgtagaatcacagaggccatgtgatgctggctcctgagagcaccccaaataacccagagttttactcattaaaagtgaatgccaaaaatccagtagaatttagtggggctggtgattccttcaggcaatgtatagatgggagctgagtcatttattaaagtgggcaatatctccaaggaggatgtgtcataaccaaggaaccttcttttcatttcagggtgtgctgtatgacctagacaaggtaggctagcattctttgttggggtgctactgaaaaacgaagctctgcgcctggagctgatgtttaaacatttgtagaggccctttgggggacagtaagattcctgataaagggtgattggagggggtttccatgagcgtcagggcccgcagaaccaaagagctgagggggaaacaaggcctccaggatgtaggtttgctctggtgtctgagtctggaccttagatttggagatcctcgccgtgtagctgctgcccttttcatcaaatctgaggcatctctgattagaaaataccacagttggttatgtgccaggaaaatgaccccatatatatatatatatatatatatatatatatatatatcataatgtctcaaaaaatataaaagtagaaaggaatgattccagttatatctagttcttcctttttgtgaaaagtatatattcttattgagagaatttctccaggccttttagaagggagatttttgagtcttcctttttagttgtacacaacgtcactctccatgccattctatgtacatagctttatttatttcagtgcctaacagaatcatggcattccccacagagatattttaaaggccaagtaaatcaaatgcatgttgcaatattaataactcacaggaatggcataaccagctgtatctgtgagcccaaacggacagctgtcacaatgcacaaataacaattataaagcgtaccccagctctagagtcaactgtataattcagtgtgcagaagctcagtttagaacatgcaggatatgaagacatttagataccgtccgaatgatactgctccaccagacatcagatggactggccaccttggtgtttaccatgggatgaccataattaattagttcaagctcatctctcaggctagtcagtgttttgaaaaatatttttcaaattaacattaggacacctctaaaatagtggccaaggcagaaggaaaaggaaagcaggaagtgcttgtgggccttatgtggaaggcaggctgctgcaggttctctcaggagcctaatcaatcgcactctgaatggctgctcgttcttcaagcttctccttttaattccagcaaattaaaacgattgagagatacatgcgacgcctggagtttcacattagtaaggtaacccgtgctgctcttgtctctgcttctgtatttctgctctcagttactgcccagtgcgtgcccaccctgagtataacgtgggtactgggtggctttaactagatacctccactgaacatagaaatgaaagccttggggctggagaaatggcaccatagttaagagcattggctgctcgtgctgcggacccaggttcagttcccagccctgacaggctggctcacaaacaattgtaactccagttccgggggatctgacaccttcttctggcttccataaataccaggcatgtatgtagtacacaggtatacatgcaagcaaaacacctagttacataaaatatagataaataaaatctagaagaaagagaggaattaaggaaggaaggggaagggtgaagagagatggggagaaacaagaacgtggagtctgattaactggcacggttggacttcagtcttacaagtgtgaacaacttacctgaattttctctactcttgatccatgcattctcaaaattgttttctgtaaataacctcatttttaaaattttttaaaaatgcttaatcctggggctagagagatgactcagtggttaaaagcacatgctattcttgaagaattcacatccctcgcttcccaactacatgtaactctagcaccaggggatctgatgctgcctctagcttccaagggcacctgcactcaagtacacatcccagcacatagacagacacattagacacatgattaaaaagaaagccatctttaacagaacaagaacaggccgagtctaggcttaggaggatggttctgtggttaagagtacttgctacacaattacaaatcatgaggaccagagtttgtatcccaccacccatgccacaggctgggtattccgaaaatgcttgtaacccagctccacttggggcaaagacaaaagggtgggtgaggcttgctggccttctgcttacagaaaatctgagctaccggttcagggagcaacccctcctgcctcaaaggaatagattgagagtaatagataaagacagccagtgccatcttctggctcctgcacacacacacacacacacacacacacacacactcacattcacacaggcactcaccctacacacactcactcacacacagtcacactcatacacactcacatttacacaggcactcacacacccacacacagtctcatacactcacacatatactcacacacactcacccatactcaacacatacattcacatactcacactcacatacactcacacactcacagacacatgcacaaatgcatagataaaataccgactccaaagttgtaggtatcatctattgataatgcctcttaaagtgataatagttttgcatactacccattttctctttgatgtaaaattagaacctttccaatgcttaatccacatgtaggggactcctgtcctcgttgtctaaccccacagtccagcacagacctacacatttcccaaagtatgtccccacttctctgtccccttaacccctctctacccaaccccccccccaaccctctgaggcaggatctcaatggcctggaacccacaaccctcctctcaagtgctgggattataggcgtgtgctaggccagctgcttaagccaatttaaacaatcccggtcgtagcctcaaagacatgaatgggccttttcaacttgtataatttggaaacaggattcaagcaaaatctgctttgaaacaaacaaacaacaaacaaacagttcccggcttctccagaacagaaatccagtgtatctttaagggcatgacaacagcttattgggcttctctcaagcaggacggctatttatctgtttcctgtttgggttctggcaggtagacgagctctatgaagcctattgtatccaacggcgtctccaagatggtgccagcaaaatgaagcaagccttcgcgacgtcccctgccagcaaggctgcccgggagagtctgtctgagatcaaccgcagctacaaggaatacacggaggtaaatcctgcagtctcgttccatgcttgagaccatggctcaaaatgtaaacaacaacaacaaagtaaaagaagagctgggaaagtaggtcagtgggcaagcatttatttacctggcagacaggaggccccgcccctcatatatggaaaaaaaaaaaaaagccccaagcaagacaatggtggaactgtcgaaactaagccatgaagcccaatatttcatcattcaaatttacttctaaatactgtagtgtgccctgaaggaagagtagcctacatgataagatgactggctagcccacatacagttttgatatcggactccattctgcctacagttctgtgcctatgcatgtttgtgtgtgtgtgtgtgtgtgtgtgtgtgagagagagagagagagagagagagagagagagagaggaagagggagaggaagaggaagagggagagagagagattgatttatccaagatatagagccatgaacagaaatgttatcttcctggtttctgacagtctctggggtctaagtatcatccgacagggagggtttcaccccctaggggtcacctaacactaatgcatgcccttcatgtagagcctgaattattagagctgcccttctcacagtccctggagacttcattcagagatcagatgtcaacagtgaagtcatgactcaagcagggtctagtgggcaatccacagagccgagcatctgtcttgggatccctttatgtttgcaccacggggctgcttgaaccaaataagtctttctcttttcatgatttaacattaggcccttctttgcctactttccaaagcatatttttaaatttataaagtaagctgggcttagtgtaaccccaacactcggaggctgaagcaggaggattactgcaagtttgaggtcatcctggactgaacagtagtgactaccaggccagctaggactacatagcaagaacatgtctcaaaataaatgagagctgtggcgatagcgtaactgtagtaacgagtcacaggataggtgctgggaactgaccgtgggtcctcaggaagaacagcctgtgctcttaaccactgagtcatctcctgctttttgagcaggctcaaattacaggctccagcatagccctaataagcattacagttttgaagcactgaaacccctaagtgattttatccaccctgcaaccccaggagtgggtctctaagtattttctcatttggaacagtgttcatccccagctgcatccatgggtgacttcagccgttaatctagtgacccctgagttcttaagacagtaggagcattcccaacgtgcctaatgacacatctggtacgtctcgaaactggtcccttgcagagaggccccaggctctgaggaaacaaactacttgcagtgctgagattctcctttcaacgctttcaagctactcagagctcagacctgagcaaacgctcccctgctttgcccagctctctgaaggactgagggcttcttacaggaaagagaaacgccattcttcccatgtcccacgagagtgacggcaggtgctgagcgaacaaagaatcaaataagaagcggagcctgcggacttcctagagctccctgaacaggcttgagcctgtcggtgttcactaggtggcctcacttttgccggaatggcaacttgcccaggcctgagcctcagcaaagctggccgtgaggaagaggtttgcagaagcagagatgcccagtgctgcttactacagtagagaggcttgtaaggctcaccccagctgagctgcagggagctctcactggagagagagacactggctaggacacttgaagtccacctctaactgctctcattaggtcctctgatactggggcgctagaatgggtatgatcaggtattgtaaccttgagtgtctcgttcctttcacaccacagtgaggaggggacccttactcaacctaggggctcattctggggcttcatatcatcacattgaaagtctgccttacttgggtagactcaaactcctacactcctcgccccccctcctcctccccaaaattttgtgtgtgtatgtacacatgtctgtgtgtgatatagagaggcaggtatagaaacctgaggaagacctcaactctcatcctctcgggtgctaccatccattttgttggggtttgtttgttttgagaacagggtctctcactggtctggaattctctaagtaggctaggcttgcaggcacaagccccagagggcgacatctctgccttccttccactgagattgcaagcacataccaccaagcctgattactgttttcttaattgtttttaatttagcaagtaaaagatacatatgaatgcatagtatataacatgatattatgaaacaggcacacactagagagtagctgacccagcatgtttaacctggagcgtggatctcttcctatttagtgtgcatggctgattctctgtcacaatgcctttttgtacagtcccgagtctgttcttagaacatccacactctagagatgtctgactactttgatatcatctaacttgtccacctaagccccagctatcccatgcacccggagcggtgtgtcgtgctgcctgtcctgcagcgggtactgtgtactcgtggaagacaggaacatgcctctcgttcaatgttatcattgccgagacgtcttgtgccaccgtgcagaggaatgcagatctgacatcatttcctatgctctttgcagaacatgtgtgccattgaagcggagttggagagtctgctgggagaattctccatcaagatgaaaggtaatctgtccttgttcagagagggataaaggtgccatgtcgtccacagagcttcatgagaaggcatgtcattgcaaagacatggggttgcctgctcttgggccttccaccatgatgatttcttgatgggtctcttcttgtaccttgccttcgcatttgaaaatggtgtctattagatgagtgaaacaacaaacctcggaatccatcccacgactcagtaatcaccaaggctttgccactttttcttttccctttgatgaactagaaaactccagaggaggaaaagccaagtatgtcactccactgatcagcacctgtaaacttcagtacagttctgaaagaatagggccatcttacgtaatgtaaccgcagtgcctcagcccgttgtcccattatcgcatctaatgaaattagcaagtctttgttattaacctagttcattggcagatatccccagctgtctcacaaatgcttcctagagttgtgttgcttcaattaggacccacacaaggtccatgtgttataattagctgtcagttgggctccctttaatctaacacaaacccccatccagccttctagattacctggcagcctctttacattgtcatttagccatctgtttatttatctactttgaatatcttctttttagtttgaagacaaaatctttctgtgtaattcaagctggtttcaaactcacggcagtcaattctcctcctgtgatgggccaagcactgggattataggaccgcctcaccatacctgtctcaccttacctgtctcactatacccatctcaccatacctgtctcaccagacccatctcaccatacctgtctcaccatacctgtctcaccagacccatctcaccatacctgtctcaccagacccatctcaccatacctgtctcaccagacccgtctcaccatatctgtcttatcatacccatctcaccatacctgtctcaccagacccatctcaccatacccgtctcaccatacctgtctcaccagacccgtctcaccatacctgtcttatcatacccatctcaccatacctgtctcaccatacccatctcaccatacctgtctcaccttacctgtctcactatacccatctcaccatacctgtctcaccagacccatctcaccatacctgtctcaccatacctgtctcaccagacccgtctcaccatatctgtcttatcatacccatctcaccatacctgtctcaccagacccatctcaccatacccgtctcaccatacctgtctcaccagacccgtctcaccatacctgtcttatcatacccatctcaccatacctgtctcaccatacccatctcaccatacctgtctcaccatacccatctcaccatacctgtctcaccagacccatgtcaccacggcttgctgccacatcaatcacttcatttgtccctccactcccatgttgctgctgtgagtctgttcgaatcgagagcattgttactttaagctacagcacctgcagcccaaaaggaaaaaggaaaactctagctagatgtggtgagcctcacactgcagtgtccacagtgcccatcagggccgtgggacagtggcatcacagccagcccttttctctcccatgtttggctcatttaactgtactgagcagctgggcccctgcagtcctctctctgggttggtttgcttgtttaacagtttgatccttaggtcgctaatgggcattattaccttacccactctctgtgataagaagagtgaaaaggggaaaccccctctaaaagcagttctgggtggagctggagagatgacatagtagttaagaacaccagtggttgaagaggatgtgggttcagttcccagtgcctacacggcagcttacaaccactggtaactccagtccccggggatctgataccctctctgacctcctcaggcagccggcaagtgtgtgaagcacatacataacgccttgcctgtgatggacatctgcatctttctaactttccaggtccatttgcttccacttaaggtctctacctgagttcgtggttcaaaaccactctggaccatgctccctctcagcagttcagaatctgcacagccaggacggaggttctagaggtctctttgaactttcaggatggttctgtcagcggcctgattcattgcagtcaagcatacaaagcagagttactttgccagtgttaacacaaggattgcccacgtcccagggcatgtaggccagcacacagagactggggtcagcacgtgtgttaacacagggctgctgaggccgtttctgatgttcactggtatcagatgcttctgtttttgatgagagggataatttcttccatttcatgtgtggacaccagtagccaaaaagcattagatgacgtctccaaggccacacagtaagctgacatcagacttaaagctgaatcctggggtcctggctcctacattaagttacttttcccatctctatgacaaatacctgattcaaaagggaactttgggaagaaagggtttgttgtagtttatggcttgagtgggggacacttggtcatggcgggagggtataaaagagctcatggctgtgggggtctgcagttgagatgccttaaatttcccaggaccaggagcagaaaaaggacaatgctgatgctcacctcaccaccactcctgtttgtttgtttgttttattcagtttaatatccaagcctgcattcagggtgtgtcttaacttctaaagatcttggaaacaccctcatggacatgtccaaagggttatgcctcattaattctcagagtctcgtccttcccttcccttcccttcccttcccttcccttcccttcccttcccttcccttcccttcccttccctttcatttccttatttctggatggggtctcattgagtatttgttacatacctgaagctgaccttgaactcttgatattcttaccactcactacccactgagtgctagggttatagtcactgtttcgagcaataaggtaggcatacttagtttgtataacaaacgttgtattttcttatgctgagggtcatcacacaaggttcacactgtaaattcttaactatggttcttagcctagctctccaaatctgctcacctgtgaacataacttagctaaaggtctggtttcagtctccaacagtagtcctggctcaggagactccccagtcttgtgggatcctcactatttttacatgtctaaaaggcatttcttactctgctcactatagtcagccaccaccatacccacttctaggcattccttattcaaacaatttgaccatggaaattaaccatcaccgctgccagtacatgaccacctcaatgccacattatgaagaagtcctaataattgagcagacactatcaaccatcaaatgccagttttcactagagaagggattcccatcagcttaaaacataagcacctaaaaggtatggcatggggaagggactacccacccacccacccacataatccaaatctcagatctggagggagtaagcttctgtcatgggtggatgccctggtcaccaactgtgaactgagtgacttgggctgagacactgaatgcctgagccatatgctctgctatccctctgcccacttttctcttatgcttccttggttgccctaaactcaacttttatcacctctaccctcctaacgtaaaaaacccagaaactacagctctgattaaacacacacacacacacacacacacacacacacacacacacacacacgccccgtccttttctccctccacaaaaggagtgagaagacatcccaaattctcatgagctactgctgtccattatgtttgattagtatacacctcaacctctaccctcacccctgttcccaaagccaagcacttgcatcacattctcagatctgacaacccctgagttcctcctgccacaccctcccacacttcccttttgctcaactccacaactaactacaatctgaaaggcagttgccctcgagatggtgatgataaagacatggggacaagagctgctaagctatgcacaccagcctctgtcacttcatgaccccaggacaccacagttgtctggagatgcagggtggaggggaacctttgagtatcacatcctcacgcagtgggcatacatgagcaaacacatgaccagactgttgtagatgcttgagcccaggatggatggaggggttgctagggcagaggcaggaggatctgagtacaaagctagctgtaaactgtctcaaaagaaaacagaaaattaagtcgggtctgctggtccatgcctataatcttagcactcttgaggctgaggcaggaggattgtgaggttgtggccagcttaggcttcacagtgagacactgtcaagaaagaatgaaaaagaaagaaggaagggaaagggaaagggaaagggaaagggaaagggaaagaaaagaaaagaaaagaaaagaaaagaaaagaaaagaaaagggctggcgaggtagctcagcgggtaagagcactgactgctcttccgaaggtcctgagttcaaatcccagcagccacatggtggctcataaccacctgtagtgaaatctgatgctctcttctggcgctgtctgaagacagctacagtgtacttatatataataataaataaatctttgggccgaagcaagtagaattgattggccagagtgagcagaggtcctaagaattcaattcccaacaactacatgaaggctcacaaccatctgttcagcaactatgtactcaaatacatagaaataaataaataaataaatctttaaaaaagaaaaagagacagagagagaaggaaagaaaggcaagaaggagagaaggaaggaaagaagaggaaggaaggaagaggaacagagggacagacagaaagaagaaaagaaaaaataaaaaatgttaagtgaaggttcccactgaggaaaggatggggggggggggtgcagagagcgtcctgaataacctctggctagaacaactaaactgaaagtccctcctgaaggcggggatgctgcccaaagctgtcgggggggggggggggtgctgtgatctctgtgctctgtaaaagtgctgtggggagctgttgaggccagattccaaaaacctgtaaggacccagctggattcaggaccccaaatcagaaaagaagctaagaactgcgtgtcttacagaaaactgcttttcttcccaacgatgacctcattcaaatgagttccaggaggacacatgtccagaggtcagtgctagctggtcaccatggcctttaggatgaactgggaaacctgcccaggaagcaggaaggccagtactaagacacagtccgaggtacactcttaggaaggtcatggcaaaactgggaaacaatggagtacttctatgaccagaaccgtgtctgagcaaaggcagccagtggcacggggagccaggtgagcagctgtgtggctgtaggtagctgggaggctctatagctgtgtagctgtagatagctatgaggttgtatctgcaacctttctccactgtgataaattctctgaaagaaacaacttaagaggaaaacgatccgtggcggcttaagatttggaggagtttagtccactatgggaaggggagctatggtagtcggagaggccggcagctgaggcaggggttagagtggatcaggaagccagacacaggctggaagcaaagcagagttataaacctcaagaacacactctccagtgtctgattcctccagctaggccctaactcttaaagactccataacctcccacaacagagctacccagctggtggccaaatgttcaaccatgagcgggggcatcatttatccacagtcacactgggggcagcaccctgtcctccattcaggctgtggaagagctgttggatcattaacacaggagcaaggtaaaagatcaaaagagacccacctgagggaacccagggatgatttctgagtggccatcatgaaaacctagctgatacaacagttaccaccaagcagctgagaaaacactgggcttttcgcagctgtagaaatgccagcagggccttgggccagaatttgcagaacctagccaggccccaaagtccacgatagctggtgctccagcagaagtgctccccccgcctggggagcttcggctggaactggctcctcctacctgctgccattctgctgttatcactgtcaccagaggctggagatgccttataaggaatgtcaataaggtgtgttcattccatggacagtgagacccaaaactcatcacgaccccagccctcctcctcccgtgataagaaatttctggtgattttgagaagggagatcgtcaaagagtccccccacccttctcaacgtatccatcatggtacatagtcagcttccctgaagcggggtccctattgtcacctcaacatgtaaccagctagtggattaaccaggagctgataatttgtaggtattcaaagggtaaatagggttttcttagaattagcacattgggcttcagattcataaaagccagccagcagtgctttctttccgatgtgtttttgtggaggtgggggaaaaaagcctaaatgctccagaattattcatgaaaatcgcttcctccaatcctgcttttattacagtgggtcctcctaagtggctcattagcttctaattgttagcgagagctgctcctaaatgcatgggctcgccaactaaaaggcatgccaagttggtgagctgctgccatctagtgtcgaaagatggtaagaggtgagcccattttgaagcttccctggattcgtcttattcatcaccatgcccatgggtcaatgggaagcagatttgtccatttgagataaattgagccattcactgaaggtaaaacacacagtgtgacatcatccttgttatgtctacgtgagtaaaatcttgtttgctagaaacacaacccagggcagggaagacagcataaagcgagcaaaaggatatgggtttggatctgcagagcccacataaaaagctgggcatcgggtcatgtgattataatcccaacttggcctctgatggaaaagggacttgagatgggtagtaggtccctgtgctttctggccagccaatctaaccaaacagcaacctccaggttcagtaagagatcccatctcaaaaaggaaaaaaaaaaaaaaaaaaaaaaaaaaagggtctatgaagcatccgcaaacataggcatacatatgcctgtgtatacatgcacaagcacgtacaagcacaggagaaacttgccccaggactcaaaggttagaaatagaaaacgtctgtgctgattttttcactgcaattatgtcatagttttttttttttagtgagaaattctaaaatgtaaattaatattttcaccctcacacagtgggcttttggtaaatatcaataggaaggtggaaagggtaatggaagctgggactctggagctgtcccagggcggcggccgtgtattctgacaaggtgttgctgctgaagcggtaggctcaagttgacctgcagatgacacaggggaagaaaaggcaccttgtgctaactggatctgtcaatcaacgcaggctagagtcacctgagaggagggcgcctcatttgagaaaatgcctccataagatccagccatagaacattttcttaatttgtgatgatggggaagggcccagcccatcgtgggtggtgccatccctggactgggagtcctgggtgctataagagagcaggctgagaaagccaataagcagaaaccctccatagcctccatgaccttcgtatcagctcctgactctaggttcctgccctgtttgggctcctgtcctgacttccgttcactgatgaatcgtgacagtgacgcttcagctaaataatcgctttcctccccaagttgctttggtcatggtgtttcatcgcagcattaatcatcctaagacacacttcttcttttgaaggaacaggctattggcagtttgttgattggatttagtttgttttcttttctttatttatatttatttttatgtgcagttgagttctgtctctgtcagatcctggagctgcagacagttgtgagctgccacgtgggtgctgggaattgaacccaggcactctagaagaacagtcggtgctcacaattgcttaaccatctttctagcccctgggtttgttttcttaatcaccagtgtggggtacatgacagtctacttctagcaagttcataagcatcaacagtggcatcactgtgctatataagtagaatgagagaaacaggaatgagtgtgctgcagacaagtgacaggtgtggggacaaggactcacaggaaggtatctagtgtcacagatcttgggagacaggaaaaccaagaggccagtttatttgcatgggaatattttggtcagtgaaagaataggtctttttggtcctgctgccctgatcctgaaatctgccaaaggtacacagagttctcaccacccaacagactccccttgaaacctcctcccaccaccctaaggggcatgtcctgctagctgtatatccccacaaaggctattctctgaagatgctcctacacctgttacattattacatgagtttttaacccatgacaaattgtgtctctaaagaagggaaatgtgttctgcaactcacagaacgatctcttgttttcaggtctggctggctttgcccgcctctgtcctggagatcaatatgaagtaagtaatgtgttggtctgcatgttggcattgaaggcttgaagggctatagttatgattgttgttgttgttgctgctgctgctgctgctgttctggtactattaaccaaggaacttgtacatgctaagcaaatgctctaccattgagctacatcttcagtcaatgttttacttttttaaaatgtgtgtgtgtgtgtgtgtgtgtagaggagtgcctatatgtgtttgtgtaggtatgtgcacaggatgcaggtgcctacagagaccaaagcttgagtttggggcagttgtgcttcctgtagatgctggaaactgaacttgggttctctgcaagaatagtatgtgctcttaatgctgagccatttccccacttctactttttattattgaaaccgcagttcataaagttgtttgttcaagctaaaacttgaacttgtgatcctcctgcctcagtttggatgtcaggcatgtaccatcaggcctgagtccagttgttattatttttccttcatttgtcttttaacattttgagccagtgagaaagtctggagggtaatctgagaactgactcccacatgtggaacatggcagttccatacaccccactattaccatcctcatatacgtcgctcactaccaattatgacccttcctccctcagttcctctcccaacactgaaaggacaatctttcacataagacccagacaattcttttattattattattattattattattattattattattagatattttctttatttacaattcaaatgctatcctgaaagtcccctatactccccccactcccctacccacccactcccagtacagggccctgccattcccctgtactggggcatataaagtttgtaagacctaggggcctctcttcccaatgatggccaactaggccatcttctgctatatatgcagctagagacacgagctctggggtactggttagttcatattgttgttccacctatagggttgcagatcccttcagctccttcggtgctttctctagcttctccattggggccctgtattccatcttatagatggatgtgagcatccacttctgtatttgccaggcactggcatagcctcacaagagacagctatatcagggtcctttcagcaaaatcttgctggcatatgcaatagtgtctgggtttggtggctggtttatgggatggatctctgggtggggtaggctctggatggtccatcctttcgtcttagctccaaattttgtctctgtaacttcttccatgggtgttttgttccctattctaaggaggaatgaagtatccacactttggtctaccttcttcttgattttcttgtgttttgcaaatgcatcttaggtattctaagtttctgggctaatatccacttatcagtgagtgcatatcaagtgactacttttgtgattgggttacctcactaaggatgatatcctccagatacatccatttgcccaagaatttcataaattcattgtttttaatagctgagtaagtactccattgtataaatataccacactttctgtatccattcctctgttgaggggcatctgggttctttccagcttctggctagtgtaaatagggctactgtgaacatagtggagcatgtgtccttattaccagctgatatatacctagaagatattattatatcttctaggtatatgcccaggagaggtattacaggatcttccggtagtactatgtccaattttctgaggaactgccagactgatttccagagtgattgtacaagcttgcaatcccaccagcagtgttcctctttctccacatcctcaccagcatctgctgtcacctgaatttttgatcttagccattttgactggagtgaggtggaatctcagggttgttttgatttgcatttccctgatgattaagaatgttgaacattgggctggtgagatggctcagtgggtaagagcacccgactgctcttccgaaggtccagagttcaaatcccagcaaccacatggtggctcacaaccatccgcaacaagatctgactccctcttctggagtgtctgaagacagctacagtgtacttacatatattaataataaaataaatctttaaaaaaaaaaaaaaagaatgttgaacattttttcaggtgcttctcagccattcggtattccccacttgagaattctttgtttagctctgtacctcctttttttttttttttttttggtttctctgtatagccctggctgtcctagaactcactttgtagaccaggctggcctcaaactcagaaatccgcctgcctcttgtaccccattttttaatggggttatttgaatttctggagtccagcttcttgagctctttgtatatattggatattagtcccctatcagatttagtattggtaaaaatcctttcccaatctgttggtggcctttttgtcctattgacagtgtcttttgccttacagaagctttgcaatttcatgaggtcccatttgtcaattcttgatcttacagcacaagccattgctgttctgtttaggaatttttttccccagtgcccatatctttgaggcttttccccactttctcctctataaatttcagtgtctctggttttatgtggagttctttgatccacttagacttgagcattgcacaaggagataagaatggatcaattcgcatttttctacatgataaccgccagttgtgccagcaccatttgttgaacatgctgtcttttttccactggatggagacccagacaattcttaacacctataacctttatcattgcctcttagttattctctctctctcgctcgctctctctcgaggacataaatacaggtcaggttagacctagttaaaagcagataaatgcagataaatgtaggtttattaggcactgctcattggtgtgtttatctgtcccaaagaataggactaaggaagtcacaactggactaagtcacaacttgactgcatgcagccaagaatataagtgtggcctgacacaaaattaaaagcttcacacattaggagatattttttgtgtatgtgaaaattttgggtcactcaattgcacagttcttgagtgtgaactttctgtatgacagtgtcatctgctcatacccaaaggttggacatgactaacacctgattatagagttttctttgtcaaaaaaaatgtacttataaacttcattgtagctcatatctgaagggattattatttaagacatcctgaccctgtctcagaaacaaaactttctcaaaatcaaaaggccatttgtctcttccttcttcaaaagagcatgcatgtaataatttcctctcttggcagaggctctgaggccattcacaccaactgccctcctctgcccagagtctggaaggtcccgacccttaccagcatcaccagagacagatctttattcgtctctacaggagctggggtcagcagagctccagttcccatggctgatggactgatgtagggttaaaaaaaaaaaagacaggttttatgtgagtgggcagattgacacagagctatgaccgccattgaaagtgcctatgtagatttattttgtatctgagtgcttgccttcatgtatgtctttacaccgtgtgtgtgtgtgtgtgtgtgtgtgtgtgtgtgtgtgagagagagagagagagagagagagagagagatgcctgaagaagacggaagagggtgttggatctccctggaactggaattaaagtcgctataagccatagtgtgggtcctgggaagcaaccctcagtcctccgcaagagccgcaagtgctcttggcctctgagccaacgatccagccgctgctctaaccttttactaaagaaacatccacaccctgagctagagaaccagagtgcactcctaaactggtccagatttgttacaacacggcctgaatattagcactcaggaggcagaggcaggtagagtgctgtgagttggagaccagccaggtctacttagtgagttccagggtaaccagtgctacatagtgagacactgtttcaagtcaataaactaaacctcctctacactcctcacgcgctccactgagaacccagactgggtgggcaggggaatgaagggtgtgggccagattcctggctcttggatctgggcaattgggagggaaggtggagtctggtgaaacaggaggctccctaatgtcttcaccccagattttcatgaagtatggtcggcagaggtggaaactgaagggcaaaatagaagtgaatggtaaacagagctgggatggagcagaaaccgtcttcctgcccctcatagttgggttcatttcaatcaaggtacagtgagtccctgtcttttgttgtctttccttccttcctggtgtcctggcccaatgatcccttggtggggaccctccatcccataggtctctctgtgtgcaaagcctcttttagttgagatgctctcagagcccagagacaatgtaactgtaacaaagtaacattaaaaaaaaaaaaaaagataagacattcctcattttctcccctcactttctctaccaggtcacagaactcaaaggactggcgactcacatcctggtaggcagtgtgacctgcgagaccaaagagctgtttgcagcccgaccccaggtggtggctgttgacatcaatgaccttggtaccatcaaactgaacctggaaatcacctggtagtaagttccttgtttttcaagttcatcatggacaggcaagggcccatggctagtgttcttccaggctagcgctggaaccaccgtgtcagcgtggagcagtggtcacacctgaactgctcactcagaatcatttaagctcaccaggtagcatgtccaggtatctctccttttccactgcctacttttaaacgttttattgtaacctggtgtgggggcacatgtctgtaaccccagcatgtgggaggtggaagcaggtgggccagtaagtttaaggctaacctcagtttcatagcaaatgttggaccagcctgtctcatagaagacctgtctcaaaaagtaaaataaaataaggcctggggagatagctttgtgataccgcttgccccgcaagtgtgaggagctgagttaagatctctacaacccatgtaaagccagactcagtcgcatacgtctataatcccagaactcctgcagtatgacaggagaatcacaggaagccagctagcctgctagacacagcagtgaacaagaaacaccatctcagacaagattcaagaggaagactgagaccagtggttgtcctctgacctctgacctttacaggcacactgtaccccactacacacacacacacacacacacacacacacacacacacttcttatgttctttttaaaagtccctaatgaaaaatacacagcccttggcttgtgagtgaatacaccatgttgctatttgtgttgaaaggctcccttacaaatcaaagtcagctgtggcgacagccaagacgccgttgttctgtcacagaaacatcaccccatgtctggctttttctgggctcacagtctgtggttgttcatgaacatgccaaaggtctctgttcccgatgggtgatgggatgtcagtgaccagcaaccagaccatctgaaaccccagcgactgtgttttccttagtgctgaatgacagtctgctagtcacttacctgcctagagtccatccagacgaagttccgaggactgtttacaggttctcccagcatccagcagctaatccactcatgtctcttaacactcgtggggaaacagacacacccgaagcttctttgtggccccacagcaggtccagagtcagtcttctgctgcacattgtttgtttatttattttctgataacccaggttggtccaaagtagccccattcccactggactaagtcgatactgtcataatgagagaccatattcccccattctgggatgacaagtgattttaatagatatgctgacctaagtacctgttgttctacagtccctttgacgtggaggacacaaccccatcgtcgggccctgggaacaagacagctgctctccagcgaaggatgtccatgtacagccagggcaccccagaaacacctaccttcaaagaccagtccttctttgtaagttcagtgtgatttctggcataaaaatgataacactggggtgttccagtagaatttgaagttgtgtatcacccacatcagagactttcaagaacaggggcgatggctctgcagttaaagtgcttgcttgctatgcaagcttgagggctagaatttggatcaacaaaacactcgtaagcgctgggtgggtgtgctggccaacctgtgactcgagcctggtacagctcagatgggaatctctagagcaggctaccttataagacatagagctctgggtttgattgagagaacctgcctctgtgacactagccatatcatagagctctgggtttgattgagggaacctgcctcagtgaataggacgggagaataattgaaagagtcctgatggactcctcgcctatgcatatgcatgtgcacctatatatctgcacctatatgcataccacactcataaacacatgggaagaattgaagcctagcgatcaccctaatagtgtggtgtctaaggatgccacgttctgagacacttgggccctctgagaacagcactgacttcctctgcctgactctatccccactcgacttcacttttggaaaggtgggaaacggcacgtaggttttccgagcattctacgacatgaatcttttcgagtgtatttgaatgacgcctgcttgaccctgtggagccctgctaactaccaaggggaacccattaacctgcttctttccactaacttgcccttctcgccctgacttctgaagagatggttgcggctgtctgtcttgagtgccttgcgagacactttctttgccacgttgcaccacaaccactctgtcggtgacctgccttccctcagcctgaaccccaaggccctgctagaattctatgtgagtgtgggccgcctggcgtgaggtgcttggcaccagggagcctgtgcatgcagcccagcatgtctcttgtgtcttgcctgcctgtcttgcttgctgggttatgagaactgtcctgtccttggggtgggaagcatggtcttgcatgcaacttttttcaccctcctttgccaacaattcctgggtttatgctgtgattttttttttctctgtggtaacaagattttcactcttaaaaacaaacaattgtttttaaacaattgtattggggccgggaatatagctcagtttggtagagtgcttgaggcctggattctaaactcagcgccacctgaaccagatgtgctggtacacctataaccttgcactccggaagtcaggcaaggggacgggaaggtcaaggtcatcctccactctacatcagctcaggggctgagctcctatgggaacaaagaaaagggaaggaaagaagggtgctttcagtttaccactgacctcagatttgcaaaagccagcactcagggactcagaaggatttgagccaacggcgttgccatagctgctgctttttgtccattccgccctgctctagagaaacaagccctggaactcatagaaatgtcctaggcaacctatttttatgaattacatattatatggaggagaatacacagccaagtacacatacatatgagggatcctctgctcttcgtctgaaaaataaatgtcacctttaattatcttgaaaggagagtaaagaattctggctaatacagtaacaacaacaatgattgtatgtcattcatgaaggtaaaaaggacaacgtaaatactcatggactttctgaggaaaataggaagaatgtatggaacaatgtgttaaaataaaaatcataccaaaacccaatagcctgatacacttgtacactgatacatttgtggatttgatggctgtccacgctcacgtggtataccttggaggcctacagggatgctgatgttacttgccacttgtgacgaaatacctgtcacgagtcaacttaagacagagtttatttgggccctcaatttaaggaggccacatgggggaaggcatggtggcgagcatctgacacagctgatcagcgagtgttagcagtccggaaacaggtgaacccaggcgctcaactccctccctcctcttattcagtctgagccctgccctgtggaatgctgccacccacgttcagggtgggtcttctcgcctcagttaaacctctctgccaatgtcctcataggcaaatgtttccacagtgattctagtttactcaagttgacattgaagatcagccatcatgggagaatcgctagaagttgaaagcataatttaaacaagattaaaaaacactggaccactacctgtagtatttgggaaaacataaaggtcctccgggtagccattcccatttgctcaaagcccattgcaccaggcccacttctccctttccactccaccctttctgtatgttccacggctctgcaaataccccacattcttttcagaactccttcctcccgtcctctgcctcaccagtctccatggcagggttctagaaccgtcttttcacttgctaggaccttggtctcatggcgtacttccaaatacatcctttgtgaaccaaggtaaaaatcaacctagtcaaggggtaagaaggacttctatgcctctgtccctgatgattatgatacctgaaggccaatgtgcaaggtgttgtgagactgtgactgtagtttaagcttcaaagagaggttacatctctgtgattggtgccataaaagccgaactgttttgagagacaggaggtaagcgatcttggggagccagtagaatggttttgctgttacacagggtagtgaatttttttctaaacagtgtggaaagtttgcaaggtcatcacatagccaggtagatttgcacacacagctctgttggaacatttggctgtatgcaagtctcccttcacaggtgtgcattcttcatagactgtgagcagggcatctgaacgtagtacaacttagcatttgtcacttaagtaagtaagagttgaccctggccacccagccctctgtacagtcagcagctccgcccctgatgcagccaagaggtgtgtacaggcgaggctacacaggcccttctgaagaacttgtgccttctgtaaagggcctaagggttttttggagatgtcccaacaattagtactctgatcctttgaccatcagctccccaaactttcccttttatctttactcagggtgtaagggtataaccgaatgtgaaagttgagggaggaactcagaccggagaggaggaagtgtccaggagcccatagcctgggagagctcagcagaaagcagcctctgtccttcggcttccttcttttcacttgctgggattgttcatgggggccatctctaccatggttgtgaaaactcttgatttttatatataatcaaaataggcagtagcttaataccatgtatccttgagtgtctactgggaattgataatgggacccaatcagatacccaaatccccagaggatcaagccccttatatcaaatggcacaatgattgaatggaccctatgtacaccccacatcccctgtacttaatcatctccgtatgagctaacatgtgaattctaacccagggtaactgatgaggaaataggtattctgccatagtgggtaatggcaaggaaaaagtctgtatgtgttccaagtatttcccatctgaggttggttgactctgcaatgtttagaatcaaaggacgcagaggaatggctgttcttcaaaagtccaatatggaggaccaaggaggtggctcagtgggtaaaagtgcttccaacacaagcctagccaccttagatcagtcactggtgtcccttaacctccacacgaataccttagcatacacacaagcacagatagacagacagacagacagacagacagacagatagacagagacacacacagcacttgtcatgcaagcatgagggactaagcttggttatccagaactcacagaaagctggatatggtggtgcacatgtctgtaatcccgatggtgtttctgtagtgagatggggagcggaggcaggagaattatgaaaagctcacattgtcagctatcctgccatgctcagtggtgaactagagaccatagctcaaacaaagtagaagatagtgaccagtacccagggttgtcctctgacctccacacccacgtttatcctcatccatacagacacaaacaaaacacaaaaaataaagcttacaatttcaacctggaatatacaaagaaaaaaacccaatttctaagaggctaatttcaaagacctagaaagccttgtctataggcaacatacttatgaacacaacacaacacaaaactgtaaacttagttaagacatcatcagatttttatttttattttttttgcaattttaaagactcagctggggagttcatgatatgaattttgtaaagtttgtagatgacaatgtcatacaatggtgtcaaaagtttggacacaccagcctgaagaaagacagtgcaagggctgcttgctttgaaattgctctgctcatgagagcaaactggttgtcttaattatctggaaatctcttcctgtgtgagcattaaacccaggggctcacacatgctgggcagactgtctacccactgagctatcgccccagctcagttgcctgcttgtctctcttcagagcttcctgaagcacaaagtcaaccagaggcaggccttacttgacagagagctgtatttccagagacttagacttaagagacttagacaccaccacaccctccacctccacctcctcctcccctcccccccagggtttgccttctatggaacagatatcccacccatcagtgtctttcttttatttctacagaagctaaacgaatttcaaaagtccaaattttgtcagtagatatttttcgaaagataattgttgtgaaccaaagccaaacaaatatccttggagcaaaagaacatgggattgcaaaatcttttatgatacacacacacacacacacacacacacacacacacacacagtacacacacaaaaataataataaagaaaaagatgggtagtgttattcttaatgatggctgccaagtactgtgagatcctggaattcataaaaacaagcagcgtccccactcatccttaaagtgcatggaaaaaaatgtcaaacctaagaatagcactgtgacctttcacctaggtccaacaatggcaaccatttttcatggcttgttttccctttgcctgcaaacacatacatatcaaataaattggtaacattaaagcattttcatcttaactgcctcccctcttgactggaggtgaaccatgccaaatgtatcatctcctatctttctccacagtcaaatctgccagatgacatctttgagagtggaaaggctgcagaggagaaaaggccactgtccctcagcttcagtgacctgcaggatggagactgtgtcttcacctccagctcagccacctccccctccagttcacactcagcccatccagagattaccatcacccccgcagagcttacccacagcagcctgtcctcacaaaatgagggcaccgaggacagcagctcagcgtcttccaggaattccttgggtgaggaccatgagcccaagtcccacccaaagagtgatacggtagagcccgggaagccgggtgtggctacaaggtctggtaccgagagcctgtttctggagagtagtgtggccgaggctctcctgcaggaatcggatgaggcctctgagctcaagcccgtggaactggacacttttgaaggaaacatcacaaagcaactggtgaagaggctcacctcggctgaggggcccgtcactactgacaagcttttctttgaaggctctgttggtagcgagtctgaggctggccggtcctttctggatggcagcctggaagatgccttcaatggactcttccttgcattagacccacacaagaagcagtacaaagagttccaggatctgaaccaagaagtcactcacttggatgatgttctcaaagtaagtacctttctgggaaaaaaaaaaatctgatttagtttggaaaaatgcatcctaaaccaacatggcatttaagataacaaatcttgtcctgtcacaggaccagtgtatacctgctacgtaagtggaggtaatattttaattccagttatatctataaatttttatttttctgacaataaatcagcttagctaaatggattaggagttggtttataaactctaaaaagaagatctaggaatagggtgatggctcggtggcctagtgatctggactgttagtcatgcttcagtgacaggttcccgagaggaaggaccgggggatgataagataaagaaggtaggaaaagttgagggcaagaggtctcgcacaagctgtgtcttatgacaagttcatttttaaagaagcacagcgtctcatatacaattttcagagggaaaaaaaatgggacagagttagaggaaaactctaatacaatgaggcaaagtcagcaggaagctaaccaagcaatgttgcatgaagggaacaaggatatgtcaagtgagtcacaggctgagcacacagcaagcggcctcaggactgatacccataatcctttagtagggacgtgttggagtctcaggatctgaagctccagctcccgcaaggcccaggccattactggccctgccaagcgcttcctgcttttaaacaaggaaactacattccttcttcatacatcagggcctcaaggaaagccttgggtcagtatggccctgcaccccaaccaggaagagtttaccaaaaacccaggaggacctgagttcagcctccagaaccctcatagaaaaagccaggcatggcttgaaatgccagaaatcccagaagccggtggactcctgtagtttgctagccagccagtctggtcaactcagtgagttccatgccaggcaaagaccctgactcaaaacaagttggaacttcaaaaagcaacactagaggttgacctctgccttgtgtgtcacacacacacacacacacacacacacacacactcacacacacacacatacacaccacatgcatgcatttcttcatgtagtacatacatatcccccgccagaccccagaatctccagacgcatatgaagtctaaatgtgaaatactggtgtttgttcatcgtggtctcaaagatgctagtggttaggatctttctgtgggttccatggaaactggggaagttagccccaaggtgaggagccatcctctcttctcacagtgccaccagctaagggtagctccttgtgaatttaacctaagtcagcaaacttttgagacctcaaaacaatcagcaacaactcacctttgctcatgtactagaagtcggggaaccaaaaagaaaaaaaatccaacaaagacagtttcctctatccctggtggccagataaggtgtaggtgtaaagtcaggagggagagttgatgcccacttaaggaggatatcataatgatggtgtcaccatggcagacagaatgcagctgtctatacctgacatacaggtagaaactcttcttaaatgcagcatggggagacaagatgacagggacattgacctttgtgtccctgctctaagtatttggtcacttaccttcagcaactgagagccagtccgtaagaggccccttgtacctttgtaagatggttgtctgtggcctttgcagtgacaactatggagagtatggagctatactctcaagactttctgaccatctcctttctctccgtttgctcatactgacctagctccagacaaggtttgtgtctgaggaaatgatgaattacgtctccgacactctatgccctctggcttcacaaggtttgtgtctgaggaaatgatgaattaggcctctgacactctatgccctctggcttccccagagttccgttctaaagagaacctctgagaagcaggagagggggctgcgaatctgctctctgtagtacacagcccaaacatgtgcacctagagcccaaacatggagaacactggatggcatctgttgtgcatctcatctgcatgactgaccccctgtcaatcaagaggtgttcatctcaaaaagctgaagcacacacttgacccttctacagaaggtgcccctgagaaaaggcagtgattgggtttaatcttcattaagaggggtaagggttcaacccagtctaaggtactgattaggagctcagctcatcaggatactttgagctcattatccatccatcttggaaaaccttggtgatcccagaatgttttctggctcagcttgcccttgtccagtactatcccaaccccatcctagtgaaatcctcaaccacttgtctttttgctgtgaccagtgtttgaagtcatcactgagctgtgtacaagatcttgttacacagagggctgacttaagaaaagagtcttaagggatggagaggtggctcagtggttaagaacaataactactcttccagaggttctgagttcaattcccagcaaccacatggtggctcaaaaccatctgttaaaaagtagatagatagatgatagatagatagatagatagatagatagatagatagatagatagatagatagatagattgatttttaaaaaggtagccgggcggtggtggcatatgcctttaatcccagcagttgggaggcagaggcaggcagatttctgagttcgaggccagcctggtctacagagtgagttctaggacagccagggctacacagagaaaccctgtctcgaaaaaaacaataaaacaacaacaacaacaaaatctgtaatgggatgggatgccctcttctgttgtgtctgaagacagctacagtattgttatataattacaataagtaaataatatttttaaaaaagaaaagaaaggcctaataaacaccagtttcccttttctccctgacgatgattaccagcatcaattggcagctaggtctggggcaagtggctttcgccagacaaagctctctctttttcttcctccttcacattcctaggatgctaaacatcttgaggatcagagactcaatgatgctgcttcccggatggagatcacagagggtgaatgagacaaccgtgatttaaaagactgaaggacattttcccatgtgcttctgtgtcatcccaagtgtctgggacagatccccgcaaggcccttcctaccttgtgctaagagtctgcaaggggatcctcctagccagacagaggacacgcagtgtgtctcctttgcaagatttgtcctgttcaacctacctcacgtcctcttgaatatgtggatatgcttttctttctccaggctaaagccactggcatagcagccacatagcaggcttctgtgttggctcatgtcctgcaacctgctgtagaaggaacttgtccccataattccagggcttgccccgaggggtgatgggacttgtgcctttcaccttcaggggagtcgggatcattgtcccatcatgcccaagtcacccatttgcctctccgtgctcagaaaaaaaaaagcatccttgaatggaacatggtgatgcagggctccgtgccaaagcagcctagggcaggtgtatttgagcagtttccttttctggaattcatttttgtcaattctttacagcctactctagacagagagctccaggcatggcactttgtcacttggtagcagagactggttctggttaagagtcagcagtgactccgtggcttttaaaatttgtctgctgggttggtttgaagaagaatttttttctaagagtctcatattcactaggctggtcttgaatgcatgagatcaaatggagctctcagctcaaccttctgcgtgcctgggactgctaagtgctgtggtacccagcttgctcattctgtttgatttggtggtgagcactacaccaaaggaacatgtcacttctgtttcccaagactttcaggttgtcatttttttaagttgttttatagtcatttcagggtgtcaattttttatagtaatgcaacttcaaacagaggtagatctgtcaatctgccaaaacccccagtgatacccagtgactctcagtgacccccccccccagtgaccgacttaacctccagtcctgtatcttctatccttccttctcaattctgttagaacaatttacaaatgttgtgccattgtttctgtggttgtaattcttttgtctcaagatgaaaactaaacgccaatgaaaaataaaaccttggaaaactgtaagaaagtgtcacgtttcccacgggtgccatgagtcctgccagtgcccctggtgtgttgattggtctccttggtaccttctgcctttgcagtgcaagccggctggcagccgcagcaggtcttccagcctaagtctgacggttgagagtgctttagaaagctttgatttcctcaacacctctgactttgacgaagaggaagaggatggcgatgacgtctgccacgttggaggaggcgcagactccgtgttttcagatactgagactgagaagagtgggtaagtgtgaaggcagcgtgtgcttgtgttcctgcccaccccccatcacagttggtatggtcaccctttgctactggcagggccagcccagtgcacatctgcaagagggtgcaatccttgtcatgtccaaccgcatatggcccaagacagccatgagtgctgcccaacaccaaatcataaacttacttaagacactgcagcatgctttgtggggtttgttggtgtcaagatttcgtggttcttgggcatggactttgtagggtacaatatcgagccaaaactgtcaaaaggttgagcgcacctgcggatgacttgatatgcagttccttctagtggttaagtacagcttctaattatcggtgacctactggaggttacgtagggaacaccaatatctcttgtttccgagaagcatctgtgtgattcgtgtacacaggcatgtgtggtgtgggtgaagggtctacacagcaggtggcccggactttaataccctgcccctgctgtgtacttcctgtacttccaaagcccttagtttgctgagctctgttttcccagcatccttccctctttcattacaactcatctctgcatgaggctgaaatcattggtgcacatcccaaagccaagcttacgtttccctataatgtaagatggaggcttggcactccttttgacctatgtctctccaggtagaaaaatgtgtcaccttctccataaggtgtctcttgcagccaagccaacgttcttttttgtttttgctttttgctttttttttttgtatttttgtttgtttgtttgtttttccctctgagacagggtttctctgtgtagccctggctgtcctagaactcactctgtagaccaggctggcctcaaactcagaaatccgcctgcctctgcctcccaagtgctgggattaaaggcgtgcgccaccactgcccagccaagccaacgtttttagagccagatcctgagccctctttgtgatttcaaatgaaacaaaagcagcttggtggccagtgcccaccttctaagaatcctctgcctttacctttgctacaacagaagcgacgtacgcaggttttcagattacagcaaacttgcctggccagccttagagaaccagcagtgaagagctattgtttttggtttggctgctattattgttgctggagggagttccttttccaaaataagaccaagtttaaagtgtgtgcgtgtgcgcgcgtgcaagcgcgtgtgcatgcatgtaaacaaaagcatgaggacaaaaatatattccttgagcaaacagagtaaaaagaaatgaagtgtagaaaatgtaatatttaatgtatagttctgcatgctatattgagattcttttggcttggctgaatttgcaaaatatttcttctcttaaacttttccatacacatgttggctttagctacaaaatatcacctcttttatacattctatgtatggcagcctaaattgaatccctggcacccaaatgtggaaggggagatccaactggacagagatgtcctctgacctccaggtgcacaccacagcacatgcgcccctctctcacaaacacaaaattataataagtagttttttttatttcagcagaattaacatatagaagaggcatgccaaataattctaaagtataaaaataagttacagccatgcagtggaggcacttgccttaattcctacactcaaggggcagaggcagcagatctcagtgagttcaaggccaacctagtgtacagagtgtgttccaggacagtccggggaacacagagagaatctgtctcaaaaaacaaacaaccaaaaaagttccttttcccccaaattctgtttttactatatttcttgagtggagaatattcaactcttttgactattagaacatattataaattataatgactacaacatcatgatgtaaacattgaacacattgaaaagacagatacagtgtggtggtttcctcccttcagtcatgacagattagttcattgacattcaagaatgtcactttcagagctagaaaagccattggctttgtgtcctccttcaaagctgtgtccatcacctgtacccagtccttccttatatctatatatatattattagctaggttctgcatatgaagatcatgtgagtttcttttctttctgagactgtgtgaactttctgagtattatatattcattgtctaagtccatccatttttgcaaatattgtgatatatctttcttcagagttgaaatatgcatatatgtatataatatatgctatttttatgacccattcatctactgatggacaactagcttggtgccagtcctttgctataacagataaagcagtaggtgtttgtagttctacctctcttatggatttttcagtttgggtgatggataggtgcatataaatgcattcaatagtaaacaatagttgcattgtgtgtaaagcccacagcaccaggattcctatcctacttcattgagatatatagactttaggtctggttaattttggtgtataatggtttaatttacaaggctcttataatgaagtttatatttaaaaagaaaggaattcactgggtagtggtggcacacgctgccgtcactcagaaggcagaggcaggctgatttctatgtggtagaggccagcccgaactacagtgcaagttctaggacagccagagctacacaaggaaaccatgtcataaaaataaaaaaataaatgaataaataaataagaaagaaagaaagaaagaaagaaaagaaattcatttttaaaattctatgtacccagatcatacaataatcaaataacccaaataaataaaagacttatttgtaaacttgaaaccataaaatataacaaaatatatgccaattggaaaaagaataaactggccgtagtgaaatccagctgtaatcccagcacttagaggcacttagtggggacgaggcaactcagggccatgtctcagaaagagaagggaagaaagaaaattagataacatgtgaaactttaaaatgagagtgtccgtgatggtatgacttcacagtgtgacagtggataatttcagacagtgtgacagtaggtttaaagagagcaggagaaacaggacagagcagagagctgcacagccacactccccttctggtgtctgcctgtcacagcactgtcacccagcagcagccctctgcagcttttttttccttgtcttagagtagcagttggtatgaggccatggcaaggcctgcgagattacttttttttatttatttacttttattattatacataagtacactgtagctgacttcagacacaccagaagagggcttcagatctcattaagggtggttgtgagccaccatgtggttgctgggatttgaactcggaaccttcagtagagcagtcagtgctcttacctgctgagccagcctttgagattactctttaatgggatcactcatagaagcccacaagcaggactgttgattcccagggaagctggcagaacccctgcctacagggtgggcaagcgcagcaggtgcagcatgagggcacagttcaaagccttctcagggaagctacttcacaaagagctcattgtgctcagaagacaaacagcagcctttgtttgcctggtcttttgatacttaggcaaattggcaaccgagctgaaataagttattttagaaaggtacccctgcttttgagagcaaaccagggaaggacagatttcagtggggaccacgttaaacttggcctgtggtttgtgcacagaaaaaaaagagctcgtgtttcacctgccttcctctttcagttacaggtcagttcacccggaagccaggggtcaccttagcgaggctctgactgaagacacaggtgtaggcaccagtgtggcaggaagcccgctcccactcaccacaggaaatgagagcctggacatcaccatagtcaaacatctacaatactgcacccagctcatccaggtaggatgtgtaacgtgggggaggaggggcgctgacgtgacagaaaggtgtgcatagcgtgtgtcttagctttgccaaggaaatgagagttcagaagtaagagcatgcggctgttttgatttgaaccaagtcaaaaccttgatggacacatctaaccctttcttaagcctgggttttcaacttcacgttaaacctagatctgcagtctatagtggttaccgggcagagtatggccagtgctcacatccaaagcaccaggcagtaaaggagagggattcaacagaagaagacgaaggtgccgtccataggcagagctggagaacagtgttaactagatagatattatggaatgtctagttcacagcccaccacatgttgggctaacagcaatgtactacagaagcagattatggctccccaaatggtaaatgagaaagtttcttctgtttaaaacagggtcttatgcaagccaagctgtctctcgaacccactgtatagctgaggctagtcttgaactcttgaccctcctgctgctacctcccaagagccagggttgcaggccggcttggagtagtaattttaaagagcaacgggaaggatcattcctccaggttatctatcccctcaccactcagtgctctcactggaacaccatgggtaaatctgtttaccacctgaggtgttacagccccagaagcaaaagcatggaaggcctttcacgggctctcagctgtcccgaatggggcactttcccagaggcctggacttaagggcttcctccttgcctggctgcttgtattctccctgctgtgatctgttcccagatggcttgggtgtacgtgaagcaggaaggaacacacaagcaattgttgtaaccgcagctttacagaaatcggcccctgagacaggctgcggtgagaagaggaagggtgaccctgtgccagccaaaacccaggaggcagggagagaacagagggagggcccggggctgggcttcccaggggctggacagcactaggcacacagttatagaaaacatagaagaagatgactttctctagcaaacaaatagctttctgagcatagtggaacacacatataatcccaggactgggcagatagacataggaggatccagagttcaagacaaaacctgggctacatagcaagacattgcctcaaaggaaggaagcacctgatgggaaaacggaggcatggaggtgctgtgggaaatgggctggctgtcaaaatccttgcctctggccagacctgagccctgtctatgtgcagagctgttgagtatttctgctatagccagagcatcctcgagcagcctctcgcaggcagttttccctgctgagcgaatggacccagatgtggtgctcatgcctacagtcccagtactggcaaggctgagataagaggatcgctactacacgtctgagaggccagcctgggctacagaagtagatgctgtatcaagccaagaaagaaaggatttttgtttccttccagctattcactgcttaccgtcacctgagtaagacccttttaggtctctaattatcttctctgactctgataatgtgctaggcaaaccgccagcctctgagaggcaaatagctttcttgtaagacctatgagaggtgtcttccatggagcggggaagtcagtcagtcaggatgctgctcctctagcagggccatgagggacagtccaactctcttgtggagcagatctgtcctaggaaaaaacaattttataggtaatcttcccttttttttttttttttttggttttttgagacagggtttctctgtgtagccctggctgtcctggaactcactctgtagaccaagcaggcctcaaactcagaaatccacctgcctctgcctcccgagtgctgggattaaaggtgtgcgccaccaagcctggcactatgggtaatcttatggagaaaaagatataagctgaaggagtgagaattacaatccccacttcccacttgttatcaccctacaatcctagtgtttcctaccacttggtatatataattgcaggaagttaaaaaaataaataaataaccggcattctgtgagctcactgtacttctactttagaaacaaggtttgtgtccactgtgcctgctggcaggaaagacatcggtgtgtaactgatactttcattttgttttgacttttattttgtagcccaagctggtttagaacttagctgtgtagctgaggctgaccttgacctgaccttcctgcctctacttgccgagttttgggactacgggcatacaccaccacacttgggtacttgttagactctggagtttgagaattccatttatctttagggttcgagtgatctagacagtgtggcatggcagtgtcattatcacccaggggtcatgcctgccatccctgcctaccaggtaacctgggcaggtttccaagggtcacagaaggagcagagccttggagcaacgagttgcttaggtcctttcctgtctcagagctccttttcctgcccccccacccccccccaacacaagtgaagccaatctctgtttctgtggcactgggccagttacttaccctgggtgtgcctcagtcacaaagtgttttctgtcaacaaaataggactcacttcatcaggtcaccatgagacatgtgtgaactagcactcgtatagggctcagaacggcaccaggaataccggcagcactcttggattacactgggatagctctaaccacaagaatgaccatatgatgatatcctcttaactttcagcttggaaacagggaaattaaaccacgcagtgaaaaacccaagcactcataaaaacaaatcctatactgctcgtcccccaggtcacagcctaaatgccctctgctatcttcaaggagacggaactttacatagaacgaagggcagggctgagggtggagtttatagcacgtatttgggaagctaaggcagggggattatgagtttgagggcagagtgagctacatagtttcaggccagtctgaagcacatggtagaccctgtctgaaagaaaaagagaggcgggggagaagagagagaagaaaatggaaaattcacaataaattgaagctctgccagtgagaaatctccagaatatgtaaaaagcttgaaagtaacaaaaccaggtgtgatttttctgacctgaggaacactgacaaactgggactaaaagtgcagcagagctctgcctctgcaacctcttcgggaaggatccggaggggaaggtcactgcccttgtcatcattaaaagggcttttatttgtcttgtcagcaaatcgtcttctctagcaaaaccccctttgtggcaagaagtctcttggagaagctgtcgaggcaggtccttgtgatgcagaagctggcagccgtgagtgacgagaacctcgggaacatcacctctgtggtggaaggtaagcccgccacctgcaggccatccctggaaccgaagcacgcccgaccacgcatgctcactggaactcagtggcgaggcagctgagtatactccagcctcagtctggctccgagcttgtgtctggtgcagaactttgggggacggttcaatgtgtgcgaagatcagacctcattccttagtagccatctaccttggtttttgaaacaggatctctcactagcctgaagctcactaggctagctagccagcaagcccaggatcctcttgtttctctctcacccctccctagcactgaggttacaagcactatgtaaccagctttttaactgtgggtcccggtgttcaaacccgggtccttgtgctttcaaggcaagcattttaccaattgagccattcttcagcttcacagcagaacatgccatggagtagatacccttgactttttgtgatctggccactggactctttcataaaggcaagggtttgtcctttttcacatcagatatgaatggaaacagagacttctgggaaatctgtaactgagcctgaacccaccctgaagttctcccgatgcatttctgcctctcttttctattcctgctaagagcagtgactttggcaggtaactaaatggtgggagaaatggcagacattcgggctgcaaatgagttgtgtctcgtgctctactacagcctcgtcctgatcacaggcacccacaagtgtgattgtgagcatgtgccacctgcccgtgctgtctgcttggactgacctgggagcctggggcagaggaaaggctcttccagcaaaccctgccgtgttccggcccctccgagggcttattctgtatggcgtttttgctataaagtcacaggagtttagtgtggcctccccaaggctgagcagctgtgccttgtctttgagaacaaacagctgagtagtcactgaggtctctttgctccagggaggaggggtttttctctggaccgcctaccaatccacaaagactgtagtagttccagtagaaaagcacagtcctagtgcctgtgggggcatatctaatctcatctactcaggacactgagaccacttcaaggtcagcctgtgctatagagtgagatcaaggttaccctgggcaagacatatttcaaaatcattagtaaaaaggttagagatgtaactcagtggtagtgcattcctgagatcctaggatcaatccccagtaacacacacacacacacacacacacacacgatgaaagaaaaaggaaagaagggaaatttgcctggggggggcggaggggatagacaagaagattgggaattcaaggttatccctttgtttgaggataaactgggttacatgagacctagtcttagataatgaatgaatgaatgaaaatattgttaaaaataaaacaaaataaaggtttttaaaaacacaaaagacaggctctaatgtccctgggacagcttaccaccagacccaggttgccatcatcctctcttcattaacatccctcttctcttccagccataccagaatttcacaaaaagctctccttgctggccttctggaccaaatgctgcagccccagcggggtctaccacagctccgctgcccgcctcatcaagcagctggaggccagcttcgccagaagcatcaacaaagactatccaggactggcagagccaggtacagaccgttgtgagaggctgtcctcccgcagcccaggggggatgaggccagcctcaaaagagaattacacgctctccaggggaaagatgggatagccagcttgactacaaaaaagatgctgagcatggagaatagcagcggtggtgtcttttaaagtactgtatccatcatcccccacctcccactcggctgtggcaaactgcctgacagaaacggcttctaaaggaggggtagactttggctcacatctcaggaggtactgcccatcctgtcagggaaggcatggcagctgaagcaggttggtgcaagatgctgggagcatgtggctggtcacatcagagatagcacccagaaaacagaagtgagccaagtgttaaccccaactgctcaccccatggcctgtgtcagccagttaacccccgagttccgatgtgtccacagcctcccaaacaggaccactggctgaggactagataacatctgagcccatgagagaagtttcccagtcagtccacaagtacttcgtgtctgtattgtttgtacagttgtccctcggtgtctgtgggtgaacagtgccggagcctgccatgcatggctgagtctgtgtttgctctcttacatcctttgcttacaccaagcatgggtttgtatacaagctccacacttcctcctccataccccagaccacttacaaggcttggctaggcaaacaccaaataaatggttgctgcattacattgcctggggagtggcagcatttacatgttcagtatagatgtgctttcccttgggttcttggcctgcagttgcttagattcatagatgtgcgaactcaggggtacagagggctttttcctgaacgtacctccaatgagaggatgtcagacggtacagtgactttcgaagaatggaatcctagtctatgcctacaacgtgagccagcaattctactcgtaaatacacaaagagaatgtacgcctgtctgtgtaagacacgcataagaagattcacagcccgagacacaacagacagaatctggtgacaactaaaatgccatgggcaaagggcgactccacagagactgtgttgagtaaaataaaccagacataggaagcgcatgctgtacattctgttgacacaaaagttcaagagcaggaaaagctagcttatgacggagataaagcttgggttatgaaagagggcgtggtaaagacctatcaatcaggagtctaaggccagccttgggtgtatggcacactggacatccacgtgggctgcatgatgctgtgcctcaaaaagaacacgaaaatggacttgaggttatttgttccctgttgggaggctaagtggctaccaacaggaaagaccccgagaactcctggaaggatgttgctcatctttcactccctgacttagacgctatcatgtgagtgtgggaaacagtgacaccgtctagctgtacactgcgcaggttagctcactttcagtgctgtaccttagacttcagtgataaacatgaattaatgagtgcaagtaccacaaggaaaaggtgataaaagatgaatgaatgaatgaatgaacacaagtaccaaaataaaaggtgaatgccctctggcgtgatggctcagcagttaaaaatcactggctgctcttccagagttccgttcccagtactcacaagacagctcacaattgtctgtaactccagtcctcggggatccaattccctcctgtagccttcttgggcatcaggcacacacagtttacattgatatacatatatgcaggtgagacacccatacacatgaaaatgaataaataataaaaagtttaagtgaatgcatgaacacaagtactatgttaaagatgaatgtacataagtgccatagtaaaaggctaatgaatattattagtacggtgataaacaaatgaatatataagttctatgatattcacatctgcttccacagtgtagtggttagcacattcatcatgaatagcatgcaaaaagatgaatgagtggatgagtgaatgaatgaaggagtgaatgaatggtcttgtttcttcagccaccttgtctcttcctttccagtgtttagaaccctggtgtcccaaatcctggaccgagctgaacctctcctttcctccagcctctcgtcggaagtcatcactgtcttccagtactacagcttcttcaccagccacggtgtgagtgacctggagacttacctgggccagctaaccaggcaaggtaggctgtggtctcccgtcctgttgcactagtgtctcagcctgggtcagcttgggtcttcctggtccatccggtctttagtgaaggtcgtcctccactgctgagctgaggcttgcctttttaatgacttctgtggacttttaacttcagtcaacttcctggtgttggagcgggagcttgctaagcacgctggtccccagcaggagttcactgtgaacaggaaactggcaagggaatggaagtctcagggctttccttcctttctcaacttgtttgctgtgctgtttgatgctgtgttttgtggtggtagaattcccattcgggatagacagaaatggacttcaaatgaaggctcacatgagacggcaggaagggaaatgagaaaagaaagtctgaggttatccgttcaagaaagatagaggtggtaggggtatggtaagctcagtccaccctgaaacatggccctttgaaggctgtacacattctatctgactattctttaggaatgcagcaggcactggccagggcctgaaggagcagcgggaatgggaagtgctctctgaaaccaggtagtatctggtatagcaccgcacagcagcaacttgtccagcttagatccaggttcgctctgctcttttccgagcattaaatcctgctgcagcgtggatcttgtttggcatcataaagaggtgacagttctgtctggcgtgggacacaggagctctggagaaagccttgcagctggcctgcctggcacagaagagtgggacagggagactgacttacagatgcagaacctcacggtataggcgtgacactaggcttgtcccgtgtggatccgttttccaggcagacgtctgaatgattcagagtctggtgtggcaggtcacgttcctcagtctcttagtgaggagccttgacaaagttcactcattcagcagtaggaatgtggagtgacggaggggaaaattctgtttaacctttgaaggattttgtgtttgttttcctgatcttgtctttggtttgttttatttaaatcttgattttcatcttaaattgtgtgtgtgtgtgtgtgtgtgtgtgtgtatgcctgtgagtgcagtaccttcagagaccagaagctggtgtttgttataaagggctgggagccattccacctgggtcctgggaaccagactctggcccagtgcaagagtagttcttaagtcatctcttaagtcattgtgttcttaagtcatctctcggctcctcacttttgtttttgttttgagacagaatctctagcccagactggactcaaacttactatgtagccaagaatgatcttcacagaaggtagtggggcacctaagctgaaggaagatttagagatgtggagctaggagtaaagggaaggacacgttagctgtgggaggcttggagagtcctggagagatggctcagtggttaagaacacctaccgctctaccaaaggtcctgagttcgattcccagcaaccacatgatggctcatagccatgttttggggcgggggataggggggaatgggatgggggtttctgaaagggaaacctggaaaggggaatacatttgaaatgtaaataaagaaaaatatccagggctgcagagatggctcagtggttaagagcactgactgcccagaggtcctgagttcaattcccagcacccatatggtggctcacaaccatctgtaacaggatctgataatctgatgccttcttctaatgtgtctaaagacagctacagtgtacttttatacattaaataaataaataaatctttaaaaaaataaaattaaaaagaaaaaaagaaaaatatccaaaaaaaaaaaaaaaaaaaaagaagaagaagaagccgggcatggtggcgcatgcctttaatcccagcactcgggaggcagaggcaggtggatttctgattcgaggccagcctggtctacaaagtgagctccaggacagccagggctatacagagaaaccctgtctcgaaaaaaccaaaataaataaataaataaataaataaataaataaaaattcaaaaaaaaaaaaaaaagaagagtccagccactgagccaataaggcaggttaaaattttgtgtgtgtggatgtgtgtgtgtgtgtgtgtgtgtgtgtgtgtatgtatgtatgtgtgtgtgtgtatctttcatccgtggatcagagctagctcctgggtgggtgaatgcctgcaacttgcttcgagctcaaagcagtgcagcaaaaactactgcttacacatgtgtatgacaccaagcccagtttatgtgagaaattgaacacatttccttttgtgcgccagtctctaccaacagagctgcatccccagccctccccttatctttaagtgcctttttttttgtttctttctttccttataaaatggatagttttacattacaaaaaggttgggaaacagatcaaatctctttcccccatttgtaaatttaattttccattgaacatgcactgttttagattttaaaattatatcttgtttgggctggggtaagtttgcttatttgtctgtctgtcatgtgtacttgtctgtttttgcagtaatagggtcttaaactcaggatcccctggtggacaagcattgtactcacagctgatgtccccagtgtgattatgccttataaattactatatcttatttttaacttaatatgctttgtgctgttaaatattaaccatttaaagcattttattaggtcttttttattgcccttatatttggatcctgtgtttttatagtgtcaaatgttttctgtgatttgtttgttcaactgttttttaatcctcccttggggatttttattggtgtccttacttacaaagcagtggaactatcagacatccacagcaaagaaagcaggaaattaaagcaaaaatagctagaggattctcacctgtattcactatgggaaaggcatgactgatacaagaggtgaacttggcttttcctttcccatctatctccggtgtccctggatagacacaatctcatcgttacgttttagagaccaagagatatctagttagatagctgcatatctagttagggtttattcatggaatatggccagtttatcccagtggaactcagattcctgtagttcatcacattgtctctaaattccaatagagtcagtgacattccccacctaggcctgacccctcacctaggattaggatcttggcatagagacagttgtgttttctatgaataataatgaggtggcagataatgtttctttatatttcttcattgtatatccacatttgactatttaactcatttgtatgctactagaggatgaatgcctataagtgcagctcttgggagtgagaggcagcagggtcaatagtttcaggttgtctttgctcttggctagcataaactattgtaaaaccctatgttaaatttaaaaagagaaaagaaaagaaaaggccgggtgtggtggcgcacgcctttaatcccagcactcgggaggcagaggcaggtggatttctgagttcgaggccagcctggtctacaaagtgagttccaggacagccagggctacacagagaagccctgtctcgaaaaaataataataatactaataataataacaaaaaagaaaagaaaaaaacagaaaactatatatttctgccaccatttcaaagtagaaatttaactttacatttttcttacaatttgccctcgttataattatttaaactattgaccttttcacagtaatttgaaataccgcctttatcgtagactaagtttttacacacacttgggtctgctttcactgaagacatgcatgacacacttgtgttctcaacaatcgcgccactgtgctatcacaacatgagctatggctcctccccttccagttgccatggttcagactctgcagtcactgagagatgagaaactgctgcagactatgagcgaccttgcacccagcaacctccccgctcaacaggaagtcctcaggacgctggccctgctgctcaccagggatgacaatgaggtcagcgaagctgtgacactctacttggcagcagcctccaaaaatgagcacttcagagaaaaggtaggatactaaacggtgggtatcaaggcttaactgcctgtcatttaccgttagcatgacgctgggctctaatcctagctaaagcaggaggattgctgagaattcaaggtgggcttagaatggagctacttaccgtataggattatactagggttatcacataattttttaaagatttatctatttattttatgtatatgagtacactgtagctctcttcagacaaaccagaagagggcgtcagatccccttacagatagatggttgtgagccaccatgtggttgctgggatttgaactcaggacctccagaagatcaatcagtgctcttaactgctgagccatctctccagccaccaatttttaaaaggatatttcaaggtgactagaagggaagaatccaaagcttcccaacccgtagatatgatgagtgtgaggagtgggaacgccggtgggagccgtgagcaggtgagcagagtgttgcatcttatcttcagttactgccctctaatctacataaagctacatagctctgtttttaaaggcaaaagtggtatggtttttagaataaaattcaccaaaggagaaaactgattattaaaataaaatctataatcataactttgcatcttccgtgtctacatctacagtctggtaaaaaaaaaaaaaaaaaaaaaaaaacaccaatcgactctttaaataaacttgtgaacttttgtggttttttttcttaccctggaaattgtgtgaaaggccatgctacggctcacctcaaagagatatatttctgtgtttttttattattttagaatacagaaatgggtaacttttttttttactttatttttttgctaagtttgttctttggtaatttagtgtgcatgtacagtgcatgctgagtatactcacccccaccttctcttgtctcctcccaccttggtcatatctgcctccacccactggtcacttcctctatggcttttttccttgaccctttgaattttaaccagggttgtatgtgtacccacggccttggaactgcaaactactgaacagatacaccattcagaacacagctgaaaataataatcctccccagaatccatcgataaccaacatcgggagctagaacctcccacgagcccctccctgatctaaacctggcaggcccagtcttgtgcaggcctagcacccagctgctgagagatcatgtttgcaatagttaggtgatgccctgacaatagcgttttaaagccgcctccctgactcccaatgcttacgttcttttctgccccgctgtccgtggcatttccgcactttggtgcgggtcattagattccttgagactgaagttacagctgattgtgaactgctatgtagatggtgagaaccaaacctgggtcccctggaagagcaaccaatgttcttctgggacgcctctcactggatacccctgcctagcttggaatttctgatagagaccatgctggcttggaactcaccaatcagatcaggttgtccttcattctctgcatgcacatcacatggtgcacagacatatacataggcagaacaccatacccataaagtaaaactaaagtgggtttttagaaattaaaaatctacatagcacatatgggagaagatattccgtatccccctacaccaattacctcctttgttcttacatactatattatgtaatatatattatatactgtattatatatatgtatgtatataatgtatagtatataatatatatgtatattatatatatgtatgtatatatatgtatgtattacatatatattatatactatattatactgacaaacaattcaaaatgtctcacacatctcttcttccccttcaggccttgctctattattgcgaagcactaacgaaggccaatctccagctacagaaggcagcatgtctggccctaaagagcctggaggtaaagctctacagccccacccctgtccagactcagagcccccatccctggtcaaccttagagcaacatatgtctgtgaagcttagaggccacaccatgtggacctatccagtgcttgccatattcaaagccatattcacattctctagtagtgtagcagtgtctctcgtctccctggagccacctagtcaaggtcctttttccccttgaacatggactacatatgacttttgttaaattcaccaagtaggaaataattactgtttagccttgccacactcagactgcatggtgattgtacctgactgttctgcagtggtcactgcactagaggagggaagccttggtgagcagggagagaggtaactgcaaactcgagggggcaaaggctacagatctccaacagaagtgtggctctccacgagatctcatgtgtgaccgtctttgccacagaaacactaggagaggtgccaggaaaaacaacgagagggtcaccccctagtgcttactaaaaccttagatgggcacaagggactgatgtcataaaaggaaaagctaatgacctgtgaagaaaaacaaccgtgggaaattttgccttccttgttacttggtcaaaaaaaattacctaccagtgagcttcccccctcctccccccaccccccaaaaaaatccccattggttaagaatttatttgggcactctcctggtgtgctgtgactcatcgctgctgagcgtctccctgtctctgctacagactttacacaggtagacacgtagggtgcagcagcctatctgggttccactggacttgtgtgctgtgaaggatgaagcaggagccctggttttaaccctggtgtagctccagctgagagcacctcgtccctactctatcctttttctcctcccatcctccccaaccccccaaatgcagtcccttgtggaaacagaagacttctttgtgaaccaattcttcacccgtcccgcccccagctcgaaaagaattctccaccacatgttgtttcaatccaagcacaagagttctaaaatgagggttattttagaatcgatgggatcgagcataaagaattagctgtttagtcacctggaagactgaaggtctaagtgtcaggcaccgatctgttttccctggcaggccaccgaaagcattaaaatgctagtgacgttgtgtcagtctgacactgaagaaatcagaaccgtggcctcggaaaccctcctctctcttggtgagttcgtttttgtgtgctcatttacttctgatattctccctggaacctaagggaaggttcgtgtcatctgctttaatggcttcctccttgcctgtgtactccctgctcctagaatagaagaaatcgattgtgtccagatcttgcaccttgttctctctgcacaggaatcagggggctttcaccctccaaggcttcataggtcctgtttagaatcaaaacgatgatctgacagtggtcactcatacctggtaatccagtactgaagacgaggaggcaggagaatcacctcaagttcaacgacagtttagactacacagtgagaccctttcatgaaagccaaagtgttaggacctggagcacagaagacaaagaggagctgtagagatcccagcatggctgccagtgtggagatggcatgcccaagtcaatggcctgagctctgcagtgcatgctgggcagctgaatgcctcgcctgagctctgcagtgcatgctgggtaccagagtgcctcggcctcactgtgacctcttcctgcctgctggcatctcattctggaatatccagatagccctccccttcactctgtaaaggtccatgccttttgttgttattgtcgttgttgttattccatttgggtagacactcgagataagaatatcaaagacttgctttcccctttcctgtttttaaaggcaggcgtgccctaaaaaataggcctgaacttctgatcctcctgcctccacttcccaagagccagccatacaagtgagtgacatggcctctgatttatttggtgctagtgatcaaatccaggattttgtgcatgttaggccaatactccatcaacccatccccatccccagccatcaggaaaatctctcaatcaaaatctctctctctctctctctctctctctctctctctctccctctctctctctctctatgtctctctcggtttttttcgagacagggtttctctgtatagccctggctgccctagaactcactctgtagaccaggctagcctcgaactcagaaatctgcctgcctctgcctctgcctctgcctctgcctcctctgcctcctctgcctcctctgcctcctctgcctcctctgcctcctctgccgcctctgccgcctctgccgcctctgccgcctctgccgcctctgccgcctctgccgcctctgccgctgcctctgcctctgcctctgcctctgcctctgcctctgcctctgcctctgcctctgcctctgcctctgcctctgcctctgcctctgcctctgcctctgcctctgcctctgcctctcaagtgctgggattaaaggcatgctaggattaacaccaccactgcccgccatggaaaatctctcttaactctgcatcaaatagacaattgttgtcagtagctcacacctgtaatccaagctctttggaggtagagacaggaggcttgccacaagtgtggggctagcctgggctaccagtgtgggctacaaagtctctgtcctcacatatacacacagagagaggaatgggaagggaggggggaagaggaaggagagaagaaaaggaagggaggagaaagctatagaaaatgttactatggtcatatgctctaaattctaaaagtctttaaacctaaccctgccaatgtcacaaagaaaaaagccactctggtttgacaatacatcttaaccatgtgaagaagatttatggttattataaccaccatgaaaatcccattattttgagcccttctttcttacagggatgggattaataagacttggcgctgctgttgaatacaccattctttgtagaggaagcttagccagcccatgtttgtttaaaggataaaatagttattctctatggctgttttagataaagaagttatttaattctctaaaatgtacccagggtattagtggcgtaatgtcttttatcccccagggttctgaaataacagtgaagatttaaaaacaataaacaatagctagatgtttataaagccagcatctctcttcccatggtaaactgaggagggggtaccctgtggcctgtactgcaaactcatttagctgcactccaagatgcaccccaggaatgaccaacacatctgcttccaccaccctttccacgacgctcataccacccaggcctccctgccctcttcaggcttctccacttgctgcatccccaagtctccagggaagcctaatgtcaccgtgcctctgctccacctcataaggctgctccctgaggtctccagggcgcctctgcatggggactttaaaaccttctaatatggagtagagttggaagaccccaccccaccccaaatagtgttatgactcttccttgacccctgatgcatggctactgctgcacttttcccacagaagcctgaattcatacagggctcgagtattcccaatggcaacagagaggacaccctatgacaaagggctggagtcatgacaagcactgagagggacaaacagcagctcctcaccaactagtgcatacttgcttcaaccttataaccttcttgatatctgagagaccctctgtgcaatgggagtggttttttgtttgtttttttgttttgtgtgggtttttttgtttgtttgcttttgggggtgttggttttttgtttgtttggttggttggttggttggttggttttagttttttggtttttcaagacagggtttctctgtgtagctttggctgtcctggaactcactttgtagaccaggctggcctcaaactcagaaatctgcctgcctctgcctctgcctcccaagttcttaacatctaccatccaaaatagcatctagtaacagcatccagtgcttgctcagttcaactaaaaactcaagttccaacttttgagcggcagatgtaactcagtggtgagcacctgtcaccatgggcaaggtcctagctttgatcccagcaccctgctccctccaaagtctttatttaattctatttccattttttgaaacaatgatttgtggtattttgcaagggagagtatgtacatgttgggggcatgcctgccagggcacctatgtgaaggtccttccagtatgtaaatccaaggagttgaactcaggtccccaagtttggtggcaaacatcttcacccatagccttggctatgccagaacagctagcaagatgccctgggggacagctctggttgtgccactgtatcagtaaaggctgactatccctcgtcccagatgggttccatccaaagagcttgaggttgtattgccttttttttttaagtttagaatattagtatatacatgagataccttagaaataaaacttaagtttaaagatgagaattatgtgttatgtaagtgtttatgcctacgctgaaggcatttttatgtaacattttacatttataaacatttaactacaaacctatcctgtccaaggtgttggggtccaggagtcaccacacaaacactgatctcagttagacagggatggtttattgaacacacatctaaagactgatcagggcaacagctaaggctctagagctcaaagctgtgtgctggacatttatcagggccagcttatgcaaaaaccacaatgaggtcatacgcaggggatggaagtgttgcctggtggtcagccctggctcaagccattttagacataaaagttcatactggcctttaatttgatgggtcctatgtgaagtttatagttgtgcaatttcgtaatattaacaaacctcataatatatagaacataacaggacatgtggtcagcatgaccctgttctgagtcaagttatttttctgtgccagtgactggcaggcatgttacagtaacaatatgaagtagctggtgggcatagaacaaaatgtctgtggctatgctagggggacgggcttcaggacaaggggagcaaaggctctcacctgtggggtcttcccagggctcacggatttgaatgctgaagcatttggacttggggttttggggttccaggtgcttggtggcacatgtagaggactccgggatctattttgagggtctgtccttgtccgaagccactcatgtcggtatattcccagcattgtgttaaccagtgtttcccttcacatgacatacgagttctacacagctgagccttctctctggcccgatagcaatgtctgatatagctaacatactttgcaaatatgttttgttactattttaaaaaaaaaactgattaaaatgtaggcatatgagggctgggtgtgaaccagggacaacgttcatattacagagtgagccagagactgccttggcaacactgaaagtgggttaaatcccactttgtctctctaagaaagctgcattctatctatctctatgcttcactttccccgttgacctaaaagaacactggggacttattgtctaaaatactgtgctagggctgggcttggtagtgcctgcctgtgatcccagtacttgggaggcagaggcaggtggatctctaagttcaatatagcttgatctacagaacaaggtccaggacagccaggtctacattcttttttttttttttttttttttaaagagaactatggattgaacccaaggtctcctgcttgctaggcgagtgcactacaactgagcctgataaatcaccccccttttaaacatttcattctgagacagggtttcactaaatggtccaggttttgattgaactggtagtaattctcctgcctcaggctcttgtgtaggtaggattacaggtctgtgccaccacacctggcttttatttgttttcttatgacagccttccagtgtcaccaaggcaatctctggctcactctgtaatatgaacgttgtccctagtttatccccagccctcatatgcttactgtttgtttgtttgtttgtttgtttttcgagacagggtttctctgtatagacctggctgtcttgaaactcactctgtagaccaggctggcctcgaactcagaaatccacctgcctctgtctcccgagtactgggattaaaggtgtgtgccaccacactcggctcctcatatgcttacattttaatcagttttttttaaatagtagcaaaatatatttgcaaaataggttagctatatcagatgttgctacgagggtcaggagacggctcagagggtaagatgatagctgcacacctctgacagcatgagttcagtccttagaacccattcaagaaagacgaagcacacacatctgcaataacagcatcccaagagtaagatgggagatggaggcaagagactcactcagaagcccatggaccagctgctgtgaagtatgcagagtagcagcagaaacatgagggaccttgcctcagtgtggaaggagagacctgacaccaacatgttgtctctgacctccacacgcatgcagtagtgtacatgcacacatgcacaatacgtaaataaaccaaggaggtggctataaacaagactggatgatctactgtgtgttagagggtgtattagtcagtggtctctagagtcatagaacttacggttagtaaggaaatttgttgatgctttacagtctgtagtctaactcccaacaatggtcagcagcagctgtgagtggaagtccaaggatctagcagttgctcagtcccacaaggcaagcaggtgaagaagagagaatcttccttctcccaatgtccttatgtaggtcttcagcagaaggtgtggcccagattaaaggtgtgtgctttgtcccagatgaccttgaatttagagatctccttgccttagtcttctgggattcatagtcactatgcctcaagatctccatgccaagatccaggtcagaaacatatatctcctagcctcaagatcaggatcacagatgagccttccaattctggattgtagttcattccacatatagtccatttgacaaccaggaatagccactacagggggtaaagactatagcggaaacttgaaagcctaacttttaccattagtcacatggatgtacataatgataggatgtaaaatgttgtgtgtatatgatataatgtaactaaaccaatatagactgtattcaagttacataaagattcaatacaatgaggtcaaggattaagccttactaaagtccctaaaacactaaataaaaattaacctggcatgtacacttggaagcagttggcacaggcttgtactttgttttgtgccttgcctttcatctggtctctaatgttaactcaaaggttcttggtggttctaagcgttgcctagaaacccataatctagtgaagaataatggaaaatcacttttccttaacatagtaactagctaagacagcaatgcaacgctgaaggtgcagctcagtgggaaagtgtttggtctaacatacatgagggtctgggttcaatccccaggaactgtgcagaaagtttccatagcacagttccatttcattctgtgtgatgcatatgtaatgtagtcgtgtttaatgttccctatccaggagaagacgggcgactggcgtacgagcaattagacaaattccctcgagattgtgttaaagtgggaggtcgtcatggaaccgaagttgccacagccttttaaatttcacgttaaccctgcctgactgctattccgatgatacctggcccctgttctcaagagggtgctgtgatgtggccagacagcagagagctgctgccgctgccaagacggagatgtccaagtccaattgcactgtactgtctacttttccttagcccacagaacagggctgtgtataactccctggactgcatcgtagttttgactgacagcacttcaaagtagagtttgaaagtagtcatctttatgcctttgtggaagttcatctgtaagcttgaattcttcatgtgctatttggatacatacatatcgtatgccttgccgtctttctgctgtgttctcagggttgagtggccccttagttaccgaattttattaaacagacaaagcacaaaaggaatgtactgcaaataaaagttgttgttttttttttttatttttacagagcctggcaaaagtgatcagctataagacagtaagttttggagctgagggtgtggctcccttggtagagtgctagcctagggagcaggaagcttgggtctatccccagcactgcacaagctggctatgctgcgcatataaaatcagtgctcagaagagaagaaggatcagaagaagttcaaggtcatcttcagctacctagggagttcccagggcaacctgggatacatgaagctatgggggttgaggagacctaagttttctgtttttgtttttgtttttgcttttttggttttttgagacagggtttctctgtgtagccctggctgtcctggaactcactctgtagaccaggctggcctcgaactcagaaatctgcctgcctctgcctcccaagtgctgggatcaaaggcatgcgccaccacgcccggctgggacctaagttttatagcttagttttttatagttcctactatttgtttctatttccatcctgagaatcccatatcatctatccatgtggtttaagagaggaacggaagaattctgcttcgttgaggttgtgcctatactattaaaagtaagcaaaaccttaagctttcgttctttaaccagagccatctttatcacactcttggttttttgttgtttggcttttgttttgtcttgaaacagagtcttcctattgtagtcctgaccaacctggaactcaatatacagtccagcctgacctcgaacttgcaagggttctccagcctctgcctccagagctggggttataggcacaagccactaggcctggttctacatgtgtaatttttttttctaagacaaatacacacgcctaagttgtagattcagaaagatgtatttctcttttaagtgaaaacctggactttggatgaatcctaagtcactggactacattgtagttgtgactgacagcacttcaaagtccatcttaccttaccgtagaatttgacactggacagaatattgaggtactgaaagtggttcctgcttctatagaatagccatgaaccttggaagcaggatgccctgagagatggaaactgccccatagtttccacagcagctcagtaccagggtagagattcagtctcttacaacgtgtgcaaggagtggggatgccaagacatcacaataatatgtgtgggtgcaatgtgaactgtattctggatgtgtttgtataaaataccaattagatattagttccaatatttacatttcagcaagacttttaaaagttcctttcattttaaagtgaaaattgttcgctgggcttcttgcaacacatcctttcaactgtgaagtcccactgtacatatctgtatttttgtaaatgttatatatatgcatatatccctcattttaaaagtatgttgtacagttatagtatgtataggctacagtctttgttaaatggttgaaatgtctcttttgtagaaagtgaaatcacagctattacagggcttttgtttggtttatttgtggatttgaaacagttttgaatattgcatggataattaatttcacatcttttgtatccacctctgtgtctggcttttggttgggaagtgcttttaggtttgtgatatttgtattcatccctctttcaatcatgtaagtcaaaataaaaattatttttaattactagtctagtgtagaatctgatatatatttatttatcatttttatctgttactatgtgtgtgtataatgtggtgggggaggggtatacatggtgcacctgtggaggtcagaggacaaccctgtggtgtccattctttccttccaccgttacgtgggaccccagaatcaagctcagattgttttcaggtttatacagcaagggcctcactcaccgagccacctcatggtccttctctgttttccagtcccttccagagttagtatttatacaacacactactcctcattgtctactagagcttctatcctgaagtgaaaagcataagggaattttgtatcccgacaaagtagcagactggagtccacaggaggaaagcaaccacttaaaacaccttcagactgagccagcagccttcctgccttgcctgagtgatgctatcccaccaaaaccagccttccagtaagtatcaaggtctttacttagtgaacgttctagctaggcctctgcccactttgtattggtctttgcctctcatctatacccaatataggttcactgaatacactcggagtttcttctcccaatttttaaaaaaatgtcttgatttagttgcatatgtgtgtgaatatgtacatgtgtatgttgggctttgcacttgtacacacatgaaagccaggagaagtcagatgtcctctgtccctcactgcctattcttttgaggctctctctgaatccagggttttgatcatttgtctaacctaggatctaacgagacccagcaatccctgtctcctcacccctcctcagacctgaggttataggcaaatatacagtgcccacctgggatccaaagcaagcgctcttaacagctgagccacctctccagcctgttccctgcccaccctaccctggtttgagacaaggtctttatagctgaggctgcccttgaactcattatgcagcagagaatgacctcagcgggagcttccattgagatttcagaagaaaaaaactgaagcatgcatgtgtggcagtgtaggagtcctgcgaggggtacccacccaccccactccaccccactccaccccacccgaggatgacacctcatgaaactgcaccgaatgaatccaaagtctgcagaggaagaagttatgacctgactgtgtcgtgtctgcccaagaagccgcaagcagtaggcagagccaggctgagggagcagccacctggttggcaaggctttttttggagcccacatcgctgtgtcctgtatgttggccacgaagctggaagacctcatgttttctctgcgggggttttaccttcacctttgatccttccttttggtaccatagtcctcccttctggaatgggaatgtaccactgtagtttggatttggagctgaccaccaagcagcccttcctgcagctatgtatgagctcactgtttttttgtggctgacactgaagaatgcgactaataagccaaaaagttatgattataatactcatgctttgttatctcaatgtctattttatgaggagagtgagaatggaggttcccagaaaagaagctgcactgcacgttaaacatccgacaaaggctgaccagctaattaggactttaatgatcgagggtgctgggattcaggggattgcctcccccccccccgcatcccccccccccacacacacaccacatccatcaatctcagtcaagcaaaaacaatttactgaacgctcaccataataaatggactgcacgttcaagatcacaaaaagaattaggagcctaattgctgtatactagtctgctctcaaggtaggctttttataggaacaaccaggttcaaaagtttaaagggcgaggagggaaacagttggcttacgaggcaaagtattatcagctaacctttcagctgattggtcctgagtaaggtaagggggttggacacaggagtttcagaacattgagataacaaagcatgagtattataatcataactttttggcttattagtcgcattcttcagtgtcagccacaaaaaaaacagtgagctcatacatagttgcaggaagggctgcttggtggtcagctctgactcaagatagtttagacataatagttcatactgacctttgatttgatgggccgtacataaagctttgtggaatttcttaagattagcaaacctcatacagaacatacagaacaaaacggggtgtgtggtcagcgtgtccttgagccaagtcacttctctgtcccaatgactggcaggcatgttacagcaacaacaagaaatagctggcaggcactgaaaagaatggctaaagatattctaggggtgcatgtcagatcataacagtggggacattggaatgttgtaggtctagaacctaattacaaagtatctagtgctagctttagcccccttgatagccatttattgttagctctgtgtatgacctaacatgtttgtgactagtggataagtctttttagaatgtacgaacaaatccctagcttccaccaaccccaaaactaaggatgtcatcagaaatacctgaggctacacagagggactataatccaccctcccagatgttccaaccaagttatttggaaagcatgctgatatatgacttaatctgttctgttaccataaaaagtttgtaggactgttatgttggaacctggtatttgagataacctaaatctgtgtgtccagcacatggtcatttgtatttatcccccaaataaactctttgtcccctttgagatgagagcttgtggtttttgttctgtttgttgttgttgttgccattttcattaatatgatgtatgagcatttgggaatacaagttacatttgcttgtttgtttggttagttggttttggtacagggtctcgctatatggccatgtctgccctcaaacgcaaaagattcgcacgactctgccttccaagttctggaattaagtgtgtaccaccatgtcctgttagtttgtaccttaaatacaccccgaaggctcatgtgctaaaggcttggtctttaacctctggtgctactgggaagtaatagatttagaactgtattctagcagggatatgttaggtcactgagtgtggcatgctgggacctggccccatcctgtgtctctttgcctcctggccaccataaaataaacagcttcactctaccacatgctccctgccagccccatggtctacctttctataggatcaaaagcaaggggctgggcctgatagcccacacctttaatccaagtattcaagagggagagccaggtggatctctatgagtttgaggccagtctgatctacatagtgacagacatggtgattttcaggccagccaggactgtatagaaagaccctgtatctaacaaacaaacaaacaaacaaaggcaaggaagctagctgactcagctgactgtagacctagcctctcaaactgtgaattagcatttctgccttgttgattgttcctctcagatattttatcacacgaggagcttaaaaaccagatcctctaacttctctcttgttcaacagcacttgctacatcgtcgctgctatgactggcaccagggactgggcaccagatgtgcagctgtgagggcaaaagacatacaatagctgcccttgcaagacacattgtctggccaagaaaagataatgaaaccaagaaagaaaaaccaatggctgtaaaacattaggttgaaaatggggactgtcttagggtttcattgttgtgaaaaaacaccatgaccaaggcaactcttataaagaacaacatttaattggggctggcttacagtttcagaggtttagtccattattgtcatgacaggaagcatggccccatccagacagatatggtgctctagaaggagatgagatttctacattttgacctgaaggcagcaggaggagactcttttgcaggcagccaagaggagggtctctctactctgggtagagtctgagcactaggagacctcaaagccttcctaaacagggatacacttcctctaacggctacccctcctggtagtgccacttcccatgggccaagcatattcaaaccaccacaaggatataaccaagcattaaaacaaatgtttcacaagcttgaagctctgagtttgaactctggttccaaagtgggattggaggaagggaggttgcgtaggaagaggcaaagtcaaaggtcataaatttaaagaccagaaaaggcatacaaaaaggtatggttgaaaactgaacagagaaagcatgtagattatctctggaaagaatattccaggatgctagagagatggctcaagagttaagagcactgctgctcttccagaggacctgaaatcaatttccagcacacaaggcagctcacaagtatctcacaccctcttctgccctttgggggtaccaggaatacatacggtatacaaacacactcaggaaaaacacacatacacataaaataaaaataaatgttaaaaaataatattccagaggcaagaaatacaaaggctttgaaaaagtaccatggttgatgttttaaatttttctatactctttatatccttatacttttatgtaacagaggtacatagtcaaggacattttctgatttatgggatatgttttgaaaaatagagccaaaagaatttggtagggagttggaaatggaatagaaaacgggcttaggatgagttcatatttagcctgaacaagaaactgaaaagatagaatatctacagaaacccctacagcaagaaggaaaaaacccaggagctattttagacatgataaagcttatatccaaagataaagtttttgaatgaatatgagtctgaaattcaggtgagaagtcctactaaaacattataaaattgtggcagagtgcggtgtcttttatctttagtcccaccacttgggagacagaggcaggtggatctttgtgaatttgagcctggtctacagagtgatttcaaggatgaaacagatgatagatagatagatagatagatagatagatagatagatagatagatagatagatagatagattgatagattgatagatttatagattgattgatagatgatagaactgcgagaggctgaggcaagtggataagcagatctctatgcattcaaggcctgcctgtctgcatagcaactcccaggccacccaaggctacagagtgagactctgtctcaacaaataaacaaaaccacacatacatacacacacacacacacacacacacacacacacaccccacacacaactgagcatcagagcataatcacagtgcctgatttactaagacagtgaaatcaaggtctcaggggttaagctgtagaaatagctcagtaattaagagaacttgctaccttccagagggccccagttcacccaagtcagacaactcacaaccatctgtaaagtttagcttcaggggaatccagtgtcctcttttggcctttgaaagcacttgtactcatgtatggacacatacacacacacacacacacacacacacacacacatatccactacatcaagttcaattacactaggacatacaccttgcctctaagtatttgtatatattggagttggggatttggagtgtgtgttttgagacaaggtttcagttagttaagtctgcttcagactcactacttttgcagtatgtggtataggtatggggtgaggtttatgtgagcgtacctgtgggtgccggcagagtgtaaccaaaaagaaaaaaaaaatctttaggggccggagagattgctcagtgcttaagaaaactccatgttcttgcgaaggaccctggttcactctatagacgtccatggcagcccataatcaatctataactgcagggaatccaatgccctcttccaacttccaagtcagaaggcatacatgtggtatttagacatacatactggcaaagcttatacacataaaaacggaaaacgagacaaatcttttagtttaaaaaaaaaaaaagatggaacttgcctagggttccaaatctacttctggccagtgcctgcacattcctgtgtataaccccaactcacagccacacttgtagagaccttgtctccaaatgtgcgtttgtgtgtgtgcgtgtgcgcctgtgtgtgtgcgtgtgcgcctgtgtgtgcgcctgtgtgtgtgtgtgtgtgtgtgtgtgtgtgtgtgtgcgtgtgtgtgtttgataggggctgagagagtatgtccttgtgtgaccctgatgcagtgctgtacacttatggtcccagctgacttaactgggaggctgataccggagaatcacttgagcttgggaatttaagatcattatagtcaaatggcaatgtccggtctgaagacaatctaaacacatgaaattgagtgttcaggatgtagccgttatttaaagctgccgtgtgagctcagctgatctatccagaggaaagatggaatacacagaatcaagagtggtttgggggctggagagacggctcagcggttaacagcactgactgctcttccagaggtcctgagttcaactcccagcaaccacatggtggctcatcaccatctgtaatgagatctggtgccctcttctggtgtgtctgaagacagctacagtgtactcgtgtacataaaatgaataaataattctttgaaagaaagaaagagagaaagagaggaagaaagagaaagagagagagagaggagaaaagaaaggagttgttttggctttttgggacaggatcttgctatatatggcccaagttagcatcatcgtactcaaaggcctgttgcagaagcttcccaaatgcttgaatgataggtggataccaccacacccagctgaaagacttgacttaaagcccagatccttgtatatacaccttaggggatctagttggcgatgtactaagggaagaatagaggagtagtgtcttttaggggattgggagaagttagctaccaccacaggcacagaaggaaagaagacatgggcagacaggtgggtagatacaacggaagggacagatgattctcttgatggcttcagctctgtcatcaaaacgggaaatctacgatgtaaacaaaaacaagccttgcaggtttcagaaaaagccactcagaagctagtgggcagatcaaggagaagaaagtccccagtgagccagcataagacagttgtgagctatgtgttggggtcccagagacgctcaggtggcttttgttctagtcctacggggcctggaatgccaggctaggaacctcgtgtttattgcttctggcccctctgttctttttgttctaccaggttgccaggcagtgccctaaattccgttctatctccttgcggggcagtgctccagtgctactgactgaactccagcctcgcctacacacaggagcaccaatgtcctatgagaattggggtatttgtggacggatttgcagtatttgcagtcagacatgtcaactcttcagaaccctgtcggagagcctcagaagtttctgggataataaggtgaagagacggttttttgcttcaccgcaaaaggaagaggtgccaacctccacggccgactacatttttcacagagaaaagattctggagcttggcagcatcctgaagaataaaagactatcccttgataagagagctcaggctgcccagaaaatcggactactgtctttcacaggtactgcttcaccactgtgctaacactataggtgcttcagtctgcttctgctagttagagcccagcagtttagtggggattattagtgttgtttatcatcatcaccaccaccaccaccaccatcatcatcaccatcatcatcaagatgtaattgttttgttttgttttgttttgtttctttttcgagacagggtttctctgtgtggccctggctgtcctgtagctcctgctgtaggctaggatggccttgaactcagagatctggctgcttctgcttcccccatgctgagactaaaggcatgcactaccatgcctagctttgtgatagaattttgatgacatatataagtaccaaatattttcttgttatagtttgtaaagtaaacagacagacaggcatggcactgtgcatctataatcacagggccaggagtggcgttacacaactgttatcacacagccaggcatggtggtacacatatatattcacaaagccagatgtggtagtacacatctgtatttcc

SEQ ID NO: 366 - DNA, 3543 bp, Mus musculus
agagctaaagtggctcccgtgtgtcctaggttgtgagtgccttcagctcctggtcttcccacaatgcaattccttgaccctgaggatcttctggatgaagaggatgacatttttggcgaaggactgccaaccagactcccagaaatcatgctggtgggatcccagtccttctctcctggcgggcccaatggcatcatccggagccagtccttcgcaggtttcagtgggctgcaggaaaggcggtccaggcaagtgctgggtgctcctcctgggatgcagcagaaagggactgtgtgtaactccttcattgaaaatgcctcggctctcaagaagcctcaggccaagctgaagaaaatgcataatcttggacacaaaaataacaacactcccaaggagcctcagccgaagagagtggaggaggtctaccgggccttgaagaacgggcttgatgagtacctggagtttcaccagacggagctggacaaattgactgctcaattaaaagatatgaagagaaactctcgcctggtagacgagctctatgaagcctattgtatccaacggcgtctccaagatggtgccagcaaaatgaagcaagccttcgcgacgtcccctgccagcaaggctgcccgggagagtctgtctgagatcaaccgcagctacaaggaatacacggagaacatgtgtgccattgaagcggagttggagagtctgctgggagaattctccatcaagatgaaaggtctggctggctttgcccgcctctgtcctggagatcaatatgaaattttcatgaagtatggtcggcagaggtggaaactgaagggcaaaatagaagtgaatggtaaacagagctgggatggagcagaaaccgtcttcctgcccctcatagttgggttcatttcaatcaaggtcacagaactcaaaggactggcgactcacatcctggtaggcagtgtgacctgcgagaccaaagagctgtttgcagcccgaccccaggtggtggctgttgacatcaatgaccttggtaccatcaaactgaacctggaaatcacctggtatccctttgacgtggaggacacaaccccatcgtcgggccctgggaacaagacagctgctctccagcgaaggatgtccatgtacagccagggcaccccagaaacacctaccttcaaagaccagtccttcttttcaaatctgccagatgacatctttgagagtggaaaggctgcagaggagaaaaggccactgtccctcagcttcagtgacctgcaggatggagactgtgtcttcacctccagctcagccacctccccctccagttcacactcagcccatccagagattaccatcacccccgcagagcttacccacagcagcctgtcctcacaaaatgagggcaccgaggacagcagctcagcgtcttccaggaattccttgggtgaggaccatgagcccaagtcccacccaaagagtgatacggtagagcccgggaagccgggtgtggctacaaggtctggtaccgagagcctgtttctggagagtagtgtggccgaggctctcctgcaggaatcggatgaggcctctgagctcaagcccgtggaactggacacttttgaaggaaacatcacaaagcaactggtgaagaggctcacctcggctgaggggcccgtcactactgacaagcttttctttgaaggctctgttggtagcgagtctgaggctggccggtcctttctggatggcagcctggaagatgccttcaatggactcttccttgcattagacccacacaagaagcagtacaaagagttccaggatctgaaccaagaagtcactcacttggatgatgttctcaaatgcaagccggctggcagccgcagcaggtcttccagcctaagtctgacggttgagagtgctttagaaagctttgatttcctcaacacctctgactttgacgaagaggaagaggatggcgatgacgtctgccacgttggaggaggcgcagactccgtgttttcagatactgagactgagaagagtgggtcagttcacccggaagccaggggtcaccttagcgaggctctgactgaagacacaggtgtaggcaccagtgtggcaggaagcccgctcccactcaccacaggaaatgagagcctggacatcaccatagtcaaacatctacaatactgcacccagctcatccagcaaatcgtcttctctagcaaaaccccctttgtggcaagaagtctcttggagaagctgtcgaggcaggtccttgtgatgcagaagctggcagccgtgagtgacgagaacctcgggaacatcacctctgtggtggaagccataccagaatttcacaaaaagctctccttgctggccttctggaccaaatgctgcagccccagcggggtctaccacagctccgctgcccgcctcatcaagcagctggaggccagcttcgccagaagcatcaacaaagactatccaggactggcagagccagtgtttagaaccctggtgtcccaaatcctggaccgagctgaacctctcctttcctccagcctctcgtcggaagtcatcactgtcttccagtactacagcttcttcaccagccacggtgtgagtgacctggagacttacctgggccagctaaccaggcaagttgccatggttcagactctgcagtcactgagagatgagaaactgctgcagactatgagcgaccttgcacccagcaacctccccgctcaacaggaagtcctcaggacgctggccctgctgctcaccagggatgacaatgaggtcagcgaagctgtgacactctacttggcagcagcctccaaaaatgagcacttcagagaaaaggccttgctctattattgcgaagcactaacgaaggccaatctccagctacagaaggcagcatgtctggccctaaagagcctggaggccaccgaaagcattaaaatgctagtgacgttgtgtcagtctgacactgaagaaatcagaaccgtggcctcggaaaccctcctctctcttggagaagacgggcgactggcgtacgagcaattagacaaattccctcgagattgtgttaaagtgggaggtcgtcatggaaccgaagttgccacagccttttaaatttcacgttaaccctgcctgactgctattccgatgatacctggcccctgttctcaagagggtgctgtgatgtggccagacagcagagagctgctgccgctgccaagacggagatgtccaagtccaattgcactgtactgtctacttttccttagcccacagaacagggctgtgtataactccctggactgcatcgtagttttgactgacagcacttcaaagtagagtttgaaagtagtcatctttatgcctttgtggaagttcatctgtaagcttgaattcttcatgtgctatttggatacatacatatcgtatgccttgccgtctttctgctgtgttctcagggttgagtggccccttagttaccgaattttattaaacagacaaagcacaaaagga

SEQ ID NO: 367 - protein, 1033 aa, Mus musculus
VPSAPGLPTMQFLDPEDLLDEEDDIFGEGLPTRLPEIMLVGSQSFSPGGPNGIIRSQSFAGFSGLQERRSRQVLGAPPGMQQKGTVCNSFIENASALKKPQAKLKKMHNLGHKNNNTPKEPQPKRVEEVYRALKNGLDEYLEFHQTELDKLTAQLKDMKRNSRLVDELYEAYCIQRRLQDGASKMKQAFATSPASKAARESLSEINRSYKEYTENMCAIEAELESLLGEFSIKMKGLAGFARLCPGDQYEIFMKYGRQRWKLKGKIEVNGKQSWDGAETVFLPLIVGFISIKVTELKGLATHILVGSVTCETKELFAARPQVVAVDINDLGTIKLNLEITWYPFDVEDTTPSSGPGNKTAALQRRMSMYSQGTPETPTFKDQSFFSNLPDDIFESGKAAEEKRPLSLSFSDLQDGDCVFTSSSATSPSSSHSAHPEITITPAELTHSSLSSQNEGTEDSSSASSRNSLGEDHEPKSHPKSDTVEPGKPGVATRSGTESLFLESSVAEALLQESDEASELKPVELDTFEGNITKQLVKRLTSAEGPVTTDKLFFEGSVGSESEAGRSFLDGSLEDAFNGLFLALDPHKKQYKEFQDLNQEVTHLDDVLKCKPAGSRSRSSSLSLTVESALESFDFLNTSDFDEEEEDGDDVCHVGGGADSVFSDTETEKSGSVHPERHLSEALTEDTGVGTSVAGSPLPLTTGNESLDITIVKHLQYCTQLIQQIVFSSKTPFVARSLLEKLSRQVLVMQKLAAVSDENLGNITSVVEAIPEFHKKLSLLAFWTKCCSPSGVYHSSAARLIKQLEASFARSINKDYPGLAEPVFRTLVSQILDRAEPLLSSSLSSEVITVFQYYSFFTSHGVSDLETYLGQLTRQVAMVQTLQSLRDEKLLQTMSDLAPSNLPAQQEVLRTLALLLTRDDNEVSEAVTLYLAAASKNEHFREKALLYYCEALTKANLQLQKAACLALKSLEATESIKMLVTLCQSDTEEIRTVASETLLSLGEDGRLAYEQLDKFPRDCVKVGGRHGTEVATAF

SEQ ID NO: 368 - DNA, 120447 bp, Homo sapiens
  misc_feature (1)...(120447): n = A,T,C or G
ccattggccagtgttgagcaaagtaatgcaatctgatttaccttacaaaaggatcattctgactgttgtcttggaaagaaagatgggggaataggggaaaaggtaggttaggagactactgacatattccagaagagctcatgggatccttacctggcctgatactggctgaatactgggggtatgggaaaaagtggtcaaggatgattccagggctttggcctaagcatctggaaggataacattgctctttactgaaatgaagactgctgctggaggagtagacttaaggtgaggaagggtattgctgtgatgcggaatcaggagtccagttttggacagttaagtttatagtatacatataaattgtggatgacttcatgaagtcccattctaagtactcagaatagcgaacattcaggaaatagttgttgaaatgttgcctataaagcagcatatacataatagaaaattattcatagatttatctctagcttatagggattgggctatataacctatatggtgtgttccataagaccatgagttcagtaatacaatgcaaactgttcagaacactaaagggcaatttaaggaaagatcagagggaaagggctggcttcttggaggtgaatatttgaagttgagagcttaatgtcctgggaagcagtgttctgtaaacatgataattgtgggaatgcatcagggaatgctttatcttcacatgctctcctgcatttggtgctatgcataccaagttcacatgcttgcatttcttgcccttttgctccaaggccatacattcatagaatttcagctggaagagacctaaagaggtgtttggtctatgttcctaacagaaggctggcaagcaatcagccccagtgctcagctccctccctttttccctccaaaggagatttatctgtctccatcagtcacacatccatttaacagtcaatagctagtaggcaccacatttgcttttattttaactcaaatcccacaggttatatcttcaatcacttctctttattctaattctggggaataattgttcttccttctgtaagacagtcctcaaaaaccattaaaataacatagtaacaacaccaataactctccaaacaccgaaatcaccagtccaatatttgtattccaccaggcacttgagtcgaatagtatctactgccgacaagagggcgagtgtattctcagtggtgaagaggctcaaacgtgtgtgaattaggatatgaaatgcaggggcacacggcctacagctgttgaacttgaattcctctgtgaatgcaaaccccacagctgagaggcacttctcagagaggcctgtgtacgtttgctcttctagatgtacagggcttatcctcattgtgacttagccatcgtcttgtgtgcagagaacaaacgagagcaggtgttcacatttatcttcctcaagcagccccttgaggctttttgggggagggtcaggaaaggaagaggctgaaatacagccttccatcccccaactctcactcctgccagcagacagctgtttcagtctcttcttgctgctgctaatgaaaacatagccgggattccataaaagatatttaatatgggattgcttggagaagccactttctttggagatttgcttaaaccaaagctcttggatttgttaccattgctgtgaaattttcatctccagcagccttagcatgaatgacctattttgaatgtgacagcgattacacttcggtggcgtgaataatttattaggtgcaagagcactgtcaacgtagtgatattacagcagtcttgctagcctggctaattatggaggatgacagcactctatcctgttgtcacagctcctctccaaagctgccagggatgtggattctatgtgagcagagaaggaaagaggggcagtggggccaggttcctgctaccaaagaaggctttgtgggttgagcaagctgtgctgcaggagttggatttccactttcacctctgcaaagtgaaactgtgctgggcccatggggatgaatcttgtatccagtatcctgattttgcataaaatgtgtgttagttgggggaggtgcaggctgtgaaagagtgacttaggaaggaaagaggcattagaccctggagctagctagggtatctaatggtttccaggcttacagaggaggcacaggcctttttagcatgcagctggattcagagcctaggagcaggagtatgagagaaaggaatagagcacagccaggaggagcctcagttatggcttcggtgtgtgttcccttgtgttttaagctaccttgagactctagagctttctctagctttgcctgagtagtagtgacagctcatttaaccttactgagacctcagttccagatataaatcaggctccaaaataatgtccatgaagattttgaagtttaacagtcagtgacaaagttttaagcaatagggcttctgggcctgtaattcctcctaaaagtagctcctgaagttaatggtcccaactttatgaattagggaggaactaaactttgggaagatctttgcataggtgggggcagggagttggaaaagaattaaacaggattacatgcaataacatcactggcctacaatggaaagagaaatgaaaattaaattaaattaaaggagctacctgaagaagaaatatttttaaaatatgaatgactggataaaagcagatactttaaatttttcaataataggtaatgattaatgattatcaatcaagccaatgtcaggaagctgacggctccctcatgttagaataattcaaggaagcttatttacaatgagacgagttacaagggggatggggatgcaggggatactggggcccaaggtgacctcatagggaggagccagggaatgcatattcccacctcactttcatctcctgttggggatccccattggctagacccacctggacatcacagggcggccactgacgtggtccctacaggtgagccctccaggagacagaagatggagatggacagaaaggggcaacatgggataacctgcaaaccagggactgcatcagacccagggacacagaataaataaatcaccttggaagacctttacagatacgtctctttttttaatgtttcccctgatcatgagagaaaaaggaaagatattgtgaagtgaaagtcaacttagaacctttaaaaaagcctactacagctgggcgtggtggctcacgcctataatcccagcactttgggaggctgatgcgggcagaacacaaggtcaggggttcgagaccagcctggccaacatgttgaaacctcgtctctactaaaaatacaaaacattagccaggcctggtggtacgcgcctgtaatcccagctacacgggaggctgaggcaggagaatcacttgaacccgggaggcggaggttgcagtgaggcaagatcgcgccattgcactccagcctgggtgacagagcaagactccgtctcaagaaaaaaagaaagaaaaaaaagcctactacatatcaagtacttagcattgtgcttacacgtagatattgatactttccaatcacttctacaactgctttgaatcatgttatacttattttaatacctttgtgcaataatacatattgattaaatgtatgccatttactttcagcctatggcgtttagaactatacgaatttgtaaagttaacattttgccaacatttttgtccatctagatcactgattctcaaaatgtgaactaaagactcatgaggtttcccaggaccctttcaaggggtccccaaagtcctcaatattttttaaaagcataaaatggtcttgggaccaaaaattcaaaaaggctattctagattatggtattgtatcaatggatcttgaaaccaagaaaagggccgggggaactgttggcctagattatatcattgcagaaaatgatctctatatgtaaatatgtaatataataataatatatgagaaatccaatctcaagtttctggagagaaggagactgctatatttagagaatattttatttcccatcaactttgaacatttcactgattgttgtctacctatgcagccttacaggtcacttggtgtggaagctagaagtgggggtggagaggaggtttaggcttaagataatttgcccaagtacaggggactgacttctgaacctccgggacattcattcttgggacatactaaaatgtcaagagtgttggccaaacaagtttctcattgtgcaagcagatatgtgtgacaatggcaaggaaatagcctaagatgtccactcccttgagaaccttatcatgggtgccagacacgggcaaaggataacagggtctttctcttagcagttcagaaagcggtgagcaagacccagctgtcacttgtcgggttgaaatatgcttctataggtacagttcagacaccaataaatgcaggcttgttatgttctttttccagggaaaaaggtggcagaaaccagcagggatagtgtatgctctcatttctcgtttagtcaatatttattggctatcctctacactcattaatatagaggttactatcctatatgcagcacaaaacatagttcctgacatcgcagagcttataaaccaatgaggagaagtgtattaaatagctacaacaaatggaagatgtgtgattgagtctgcactcaggggacagatgacttacaagaggactcaggtacagcacagatgaccaaggaaagtgtcatgaaggaggtaatgtttgaacagggcttcatgggccaggcaggatttttagagccaaatattaaaggtaggaggaaaagtgaggcaagggctcagcagagaattttcaggcagtaggaatggcctgaggaaaaaggtggaagcaggaattgtcaaatgttagagccaaaagaagctttggtgatcaggttgtccaaacccttcgtttgatagatgaggacataggtccacaaaggccactgagttctctactggcaacactaaaatagaacccaggcatcgactctgagtccagcactttttccaagactcttccctggatgcagggtgagaagagccagagctgagagcctgcatggcagagtggcggggatgcagctgggaaggcttctggaaccaactgcagtgccaagggagctggatgcctatttggacttggttcagaccagtgtttcctgaagtgcattctgagatgactgtgccagaaccatcagtgtgcttgttaaaacgacactgtgtaaggagggggacctaaaaatctgcatgttaaattccttcccagggtgattcttatgcacttcataagctggaaaatcaaaaatacagagagacgggggccaggcacggtggttcacacctgtaatcctagcacttcgggaggccgaggcaggtggatcacgaggtcaggagtttgagaccagcctggccaacctggtgaaaccccatctctactaaaaatacaaaaattagttgggagtggtggcgggtgcctgtaatcccacgtaatcccagctacttgggaaggtgaggcaggagaatcacttgaacccaggaggtggaggttgcagtgagctgagatcgtgccactgcactccagcctgggtgacagagcgagactccatctcaaaaaaaaaaaaaaaaaagtacagacagagggagaaagattggtcagagcagcaaatgaagaattcaatagacgtgagcaatgtggaggccaaaagattatactattagaaaggagtgcaaaactcttagaactggcagcattccaagccatattttggccctggatctgggtggccaagtgcctatacagaaaggtcataagagtaaagaccttcaaggctgttagatctgctgttcctatggataagaagcatcacagttataaagagaaattagacctctgttgtatctgcttacttgtctctaggactagtcacctgtaagaatagaagccaaattcaccagaacaatagacacaggtagttacagaactatggttttttatttctgcagggaatgcagaaaaaattatgtgatagacagatagatagataagggtcggtaggtacaaccaaatctttaagtgaccttctgattagacctagagcaccgacttcacttcataacggcagtggttcttcaggcatggtctaagttctttattacataagtgaagctgtaagtcagggaattaaattggttgcattttggctgctgttctgctttcttctgatgaattgtgtatttactaggattgatcgatggcagtaagaaccataagacttgtttggctgagtccgttcttcaaccacacactggcttaaaaagttctcatgagaggagaatgggatacagttcagttattaaaagaggccattttcagtgctgctgaagttcaaacaccttgttttatggtataaaaaataatcacagttcctatagcacccatagtgctgcctccttcgtaattcaccatcccacttatttacaactgtcctcatcgccaggctctacaaggcaggtttcacaactactgggcttacctccggcccttagcagagtgcctggcacctgggttgcactcaattacttcttgaaataatagctattattactacttggggtcttttttgttttgttttgttttggttgttgttgttgttgttgttgtttgacacccaggctggaggcgcagtgacgtaatctcggctcactgcaacctccgcctcttgggttgaagtgatcctcccaccttaccctcctgagtagctgggattacaggcacctgccaccacgcccggctaattttttgcatttttaatagagacagcgtttcgccattttggccaggctggtctcaaactcctggcctcaagtgatccacccacctcggcctcccaaagtgctgggattataggcatgagccaccatgcccggccattaggggtgtattcaatttaaaatttatatgtgaggggggaaaataccctgacttgtattaaacgatttcttctttggaaagaaccattccttttcattggcctgaaagagcaattcaagtgtctcatgggtgggggtgaggatacccacccccaatgcctgtcaagctctaggcttcactgtttccctggatgaggttaaaaggacccagccgagatatctgagtgctctgctcagtgaagttttggggataaagaatcctgcctaagggatagtaagaacctaaaaggaagtgaacagcattataagagagagaatgggcgcaagcagaaattaactacccaagaatgaagactttggtgaccacacaggagcagtgattggagaggcggtgtgaagacctttagactaagctctaggagacctggtgtgggctttttatttggttatatgaccttaatctctgggatttggaccaggcaatccaataaacagtgtgtcgtggttgtttagatctgtgctgcctggtccctcagtcacacatgtacctgttctctggaggtactctgtgggaggaactgtggggtctacaaagtcacccaggacagatcccaattgccagagcttccagtctaatgcagtcagttcaggcctgtgttggcccttcaccttccatactccacacgttctgctcccttcctaaggaagctccctcaaggggagatgcagcccactgtgccctcttcattcctgtttagagcttcagtcctaaatccacagcggtgagtggggcaacctcatggaatctctaaaggcagcagcttggggagccactccatgcttctttctggtctctgctctgtatgtgcacatacacacacacacacacacacactcaagtcatgcccacagtcatgcccaaacctcagcaagatacccctcagcccaatagggtaagttgggggtgggagtggaatgtgctgtagtaaaaagagcacttgatttggaatcacatctgactttcaacactagcttcatctttgtgatcatcaggaagttacttgttcatcttctcagagtatcagtagtcttatcttttaagtggaggcagctatgggaaagagatgacaggcttcagtgggataatgtctataaagtacctaacatcatctgcctcatctctcttttcatcctcttcctcctccctctcataaaaggttatatgtcacttacaacagtgccattcctgagtcaggaaggtgatgggagtgggaaggtggggaaatacagttggcttctctccagggtggatgtcaggcccttctccctccagattcgtcctatgagaccattagtactgtgctaatccgtagtagcgctttactcagttctccccaaacttctactgcatatttgtacttctttccaggtctctttctccagactccagtaaatagagaaatgtttggaaccatccatctctacacaaatagtcatgatacaaggtggaaggtgtaggcatctggagagtaaactaaggtgctataaaagctctgaaatgaaagggcaaaaaaaaagggggggggcaagggatcttggaaaaatggatgcagattaaggtatttaaactggatcctaatgaatagatgtggccatttggaaatgagcaaaagctatgtggttgcagataagttgcagggtggggttggcaagggaaataaaaggatcaatgtaagagtgaaggggtgcttcagaatgactgggtgatccatctttcattcaatatgtagctatggagtgcctgctctgtgctggggacagcttatatcagacagagatggtccctgccctatgaactcacagtctagtaaaggcatgctcttgggcgttctttctggggatcaagccgattttgccctttctgttgtattcctaggtgagttatgacacagtttatcaggcgatggttctggctgcttgtattccagcccgaggatgcagtgcccagaccacgactggatgtgggtgtttcccatgttgacatgtctcctaggatgttccctttcggctaatgtctcagctcactgattattactgatcctttcacaaggtgactgaatctcaagtggtgtgggagggagtggatgtgtcttgtggtactattctagttaacatattctaaatacacaatttattcattatgatcacttaacagatgaggagactgaggcatagcagggaatccctatgtaaggatggagactgagtcaggaccttttccctgggtccttgtcgactcccagttccatacagtttccactccaaaaggcccttttttgggaatgtctgtctatcaggcagacccatgctttccccacaggaaacctttatcattcaaatccaccagaacaaaataaaaaacaattctctttctgccatctttatgagagctgtgtccaaagcagccccggtagagagagtgccctacaaagcagccctcttcagcggggctttccagcacaacccttgccgtgggcagccaacctcaccctcacaccgcccccaccccatacaccaccgcctcatttttttcaatgcacagcccagcttgtatgaaagatcccaaaaggttagctgaaagggcctttccttgcctcggctcctttcctctgccctctccctccagcgcgctggatccaccgggctcgctccccggcgcgattccacgggtcactccaaagctgccgcgccagctcttgcaaaggagcctggcgtgccggcgatcagctggaagcaggcaccgaagcgcagcctcctggagttgggctgaagtagctgtcaagcagctgtctccacccgccctcccctcccagcacaagtgacgccgccggcccccgcgccgcgcctccccctcctcacggctcccgcccctccgcccgctccgccgctctagctccgcgctccgccaccctcgcgcccgccagccccgcaacttcaccccgcgcgccgcagctgctgcgagcggacgcggcagggcagccggcgctggggacagctcgcgtccacccgacttcctcccggggtccccttcacccaagtgagccagctcaggctgtctgcaaagccggaggtgcgggcagctccgggcattgcattggtgcggaggcttttatatgccagagaaccctgagtgtgcccctgacatgacaaggagccgtcgtcgttaggtaggttcaccttttcatttctccttttttgcttctgattttgcgtacaacgcggtgaggtctgtgtggggaggggtgtcctcgacttgaatgagcgttgaatgctaagcagccgttgaaactggagcgtcctcagcttccaccaccctggtgggttcgggcatctgaagcccacagggtacggtcgggaagttgctgagcgaaaggggcacgcgcactttttgcaagcagaactgaaggatgccctggggagtggaggaacgggccaaggttagaggggcccacagcattgcccggggttgggacatttctggggcgaggaagcgccgggccccgggagtcagggaggggtgtgtgtgcgagcgcccccagatgggagtcctgggtggccccctggcacggaacgacttcggcactcgcagagcctatggggaatccagctcagggctgggatggcagtctcaagggtcttcatttgcccccgggctgcccgtttgagctggactatgaaccagctcgttcctcaccgtgtctgaattccaaattggccaggtggaatgggaggatgagaattgggaagaggggcaagaaaggaaaaaatgtgttgctttgatgccgatctgtgtctggaaagatggggggaggggatgcacctgaggacaggagcaccctagcaggagtccgtggcatgggagggggctggtcaagcggagcatgtgcagctctcttgcccgagacgataaccttctagctccctcttacagggcagtgggcagcagatagagacccctcacgttcgaagggagtaggtgcattttgaaattagataagcagaagtcatcaggtgctaaggtggcagaggcgctgtgagaagtgacagctccctggagagcgagagagcaagtggaaaagcaggagaaccgggctgattctgctgggatgggggtggcgcagagtgagattggtaggctcgtaggtccctgtcttggagatacctacatgttgcttgagtgactgaggaaaaatgttcaagcttttaatctgggaaaacagttatgataaaatatatgttggggctgtttcctccctgctccccacttcctaccctcttacgtccacacgcttggtagaaggtctaggattgtgactaatcactgcccccattctgaagaaattgtacttggccatctctatgggactgggcatcctgtgtgagcgtctgctcgattgttagctgacacacaatcatttcttcccttttgttttctatcgggtctgtcttgctctgagagtgtacccacctccttccctcccctgcccgggtattcccactcactcaattcccctcttccccttgctcctccagccattttggaccagcctctgagcttgcccactcacaccatctactttcctcaaattgtattttagctgctgtcacaagcaggggatgtcagccacgaactctccgagaaccagcaccatcatggctattctccagtggttaattaggaagcatcagtagttatccttctgtaggaacaaactgcagggatgtaccaacttagggtaacagcagcttgaggaactcccctatctgaagcccccatctcccagcactcaggattagctttctgtgctagcttccccttcagttgcaatagtgtcaaattgtgtcctttcccccaggaagataatgcatctgcctgtccaaaaatttactgcatccaaacatctgaaaacttgaacattggagaatctgtttagcaaaaacatactgcatatgttgcttttccaaaggaccccccaattgctgttgcttctctcttcctctgacactctaatgtgagatttcgctttgaatattttatcctcagtataaataaaaagaaataccaagctacagagaaagaaaaccgaaagcatgcgctagggagttgcatagaattctgattacacaaacacaattccagaaatggctctccttccttttgttaactgcaaagtgaagttatttccagcagagaagggacccacccaaggttgacctggagaagccaaggaggctgggggcgggtggagggagatatttatatctgtggatcttgttagctaaactctcataaaaattcttctctttagtattcatacccattgacctggggccctgctaatcactgccaaatgtccttccctaaatctgaggtcactaaagtggaaacatccctactacgataaaaccccacagcccaactgtgataccaactacatgcccacttctaagtataaccaagacacttctctgttacactttgtgttaattcacagattattggttcacccctctgtcaagagactaaaatatagacaaaggcaactgtgcagggtgaatagcacagacttcaggttttatattaaatggctgaattgtacatacaatagtcccttgggttgaagggtttgcaaaccagagttttatttaatcatttattgcattcaatggattatctgttttcattctgaaaagaagtcagaagtctaaaaacagttccttgcttttcttgggaggaagtggtgatagaagtgaaagtccgttttatttacacaatgggtgcccctcagggcaatggcagatttgactttctacttgggcttcctgcaccggtggtcctgtgagtagggcctcgtgcttgtgaacagctcctttaccaggcttattttcatctgccaagctgagctccatgagctgggggagatagacagcttgtgtttgtggccattcaaccagaaaagaataacagctgaaaacagacaatggagcaagggaattggggtggggtgggggtggggagaggaggtacagatagcccagtcactcataattggctccccaaaggcaaacctaggtgtagaatggtctcataaagcagttgtcatgtaaacaccctgcaatgtgattattataaagatctgttcagaaaaggagaatgatcatgagcatatgccttttcatctggaaggagcccttcttttggcttcatttcttcatttcatttacttataggcagtttcttgaaacaacattttccccctgaaaacaagaacctcactgttatgcatatggaaaccttcaagttgattcaactgaacaaaatcactcaatgcatcatgtatctccagtgaattaagcatgaaaccctcacatgtcctcttccctcttctgtgtctcctctctgcagccaccaacttcttctctgggttcatggtccaggtttttgtcttgttttgttttgttttttggtcacagtaaactcatctcacttaggttggaaacattccctaaaaataatacatgttttcctgagtgcggcaggctatctacaaaaaagatcatttacacatggccctgtgctggatttaattccctctaaggaaaccgggaacactatgaagaaaagaagctgctccaatttattttattgtgcattgtttacatgacaccgatgagtactgtgtggaggagatgaatgttttcacaagttcattacattaattaaataggaaattagatttttttcaacagtgaaagcaaatgaggtgcaatatttctatgttgtgttccattagatcaaaatgagttctctaccagaccaaggagagaggagtctcagaggaagttattttgtacaccatttagcattctaaaactgattcacaatcatttttaattctgaggtggattttaagttcaactctgtaatgttatataatttgggagaatcccacttttgtttcaacttaagcatgtgtttactgggcaattattctaaggtctggtcaaagttagacatcgcattcaatataaaaatataacatattggctgggcacggtggctcatgcctgtaatcctagcactttagaaggctaaggtgggaagatcgcttgaacccaggagtttgagaccagcctgggcaacatggtgaaaccccatctctatgaaaaaaaaagaaaaattagccagacatggtggtgcatgcttgtagtctcagctactctggaagctgaggtgggaggatcgcttgagcctggaaggtcaaggctgcagtgagcagagataatgccactgtactccagcctaggtgacagagtgagacccttaagaaaaagaaaaagtgtaagatattgattataccttctagggagcacagtctggtggagaagtaggaggagcacaattgagttggataggtgactggatgtcctggtttgccccatagacacctgttgttgcagcataattattaatagcaccacctttcactcagaggtgttgcaatcacacagtcaccctaaagaaaaggactatgagaggtcaaaggaagaaggctgtgattggagtagtcaatgaagatttcattcatgtgcctattctaagattacaggtaaatggaaaggaaaagggactatttaccagacaaaaagactaggaagactgtgagctccctgaaggcacagagggtctgttttgcttgttcctatatccttgggacttgcatgctgcctacccaatggtaggtatcaactattaactaactgcctgtgaacctagatttaagatctagactgaaggtaggaaagttagggacagtcaaaaggcatgtcttgcaaggaaggtcagataagaacaattgtgaaacaaggctactattaatgatgatgatactagaacaaggttggccaatgaccataccgaaaaccaaccttatgtactgaaaaacaacagtgtcttttaattctttcttgtatttgcctcttcacttttgggtttaatgctattggcctttacctctacccctggaagtgatctcttccttctcaaacaaattgttttggatgttaaatgaagaaacaatgactccattctcttcaagcttgtctccttctgaccttggcttccaggagagctcttggaaggaaggcaagggcaggaaagtggggagagtacctgagaaatacaaaagcaaggcagagaaacgctaaaagcacacgtgattttcctcctcctactaggagaaataaattcaaagtgacagtttcctggagctcctggagctagtgcaactcccaagaggtcaattccagtatgacgcttgatttatctactttttgctacatatgaagtcctggaatgacttggctttggccttagctgtgacagtctaccttccaattaatgtatactcacactaggtgccctgctgatatgtagaggttcaaggttaacctatcctacatgaagattccaagataactaccagctgtaacccttgaattgcagtgccgtatttttagtttataaagttattggcagcattttagccaatttgatctgtatcctcccaagttctcatctaatttagagttgtctcggtgatgcgtcatcctcagaaataagtggagcttagaaaaaaagagagatgaagctgaggtgatggacacccacaggtgatccaacatttcatcagggctcagttgcagagaatagaatctactcagcagaaaagatataaaataaaaagggttacaggattgttgggtcaggaaggccaaccaaatgctctctaagttgaaggataaggaaacacactctaggttgagctttttggaacacctaagaaaagtacattgtaaaacagggctactggagccactgcctaacctatactcaagaagctatacactggccgggcgcggtggcttacacctgtaatcccaacacttggggaggctgaggcgggtggatcattggaggtcaggggtttgagaccagcctggccaacatggtgaagattcatctctactaaaaatacaaaaattagctgggcacggtggtatacgcctgtaatcccagctactcaggaggctgaagtaggagaatcatttgaacctgggaggcggaggttgcagtaagcagggatcacaccactgcactccagcctgggcaacaaagcgagactccgtctccaaaaataaaagaagctgtgcactgatttgagaagctactggctccagaatgagactaccactagcatggtcaggaaaaagccagccaggaagccactacagaaaaagcagatattccatgaaggtggctgccagcagtgacaataaaagaagcagaagtctgctatggtaggcaaaataatgcacatccaccaccccaaagatgtccatgtcctaatgccaggaacctgtgactatgtcgccctacatggcaaaagggactttgcagatgtgattaagtcaaggacttgacagtatcctggattacccagttgggcccaatctaattctatttgtccttaaaaacagagaaccttcccctgctatgtcagagggaatgtgactatggaagaaagatagaaagatcagggagatggaacatagctgactttgaagatggaggaaggacccacaagggaaggaatgcaggtgacctctagaagctagaaagggcaaggaaacagattttctcctcgagccgccggaaggtaacacagccctgccaacaccttgattttagtccagtgagacccattttagacttctgtcctccagaactgtaaatatatgtcattttcactttaagccagtaaaattgtggcaatttgttacaacagccatctgaaactcatacacacagccttgcccccgcttctaccttcaatcttgtgcaagtgcatttgacggagaccccaactcacacatggaatcctagctgcaggggattctgggcagtgcagttttcagcttcccagctccagtaaggaaggcagcaagaaggggttgggacgatgctgagtgccgatcactctatctgacgcagctgccactgaaagtcatgaggaaatcggggagctgctggtctatgtgcatggcacgatccttctctgagggacagtagcatgtggcagaacacaagtggatgcctgagatttttaggaagtttaacgagtgttaagtcattaagatacaaaggggaggtaggggagaggcatcagaatagttgcctgttttaccacattagaagttactctctggaggatacccccatttatcttgatgtaattattatttattgtgtgcctgtatcaaaatgtctcatgtaacccctaaatatacacacctactgtgtacccataaaaactaaaaaataaataagttaaaaaaaaacaaaaaagaagttgctatctggagattaaggagagattttatgtaagtatccatttcagggataaatattgaatttctaaaatttaacctttaactacttacagtccatccatatggcagattggcagattatattttccaaagatgccctcagtaataactcccaccccgcatgatctttcaataaagtgactctgatactctgatacatggagagatgggggtttatgttctctcccctcaaaactgtggctttctcaatcaatagagaatgtgatttctaaggctagatcataaaagatcattcaacttctaccttattggctggaatactaactcttgaagctatcagccaccatgcaagcagtctgactatcctgagactaccatgctaggaggaagcccaagctacctgatcacatagagagacctgagatgataagaaagagaaagatgcctggccagcccccagctcctccaaaccctgctgttccatgtccagccaccatctgactgaggagagaccctgagccagaactgtctggcagaggccttcccaattcctgactcactgctgttgtttcaggccactacattttggaatgatttgtcacacagcaataaataactagattggtttatacggtcagacacagaaaaaggtcaaatatgaccacagtgttgtgttattcctatcaaatttcttccctgtgaggtaaataacatgatagtagcagtcacagaacagccaaatctaaagctcaccttctcctcctgcagaacattggtctaagaaacccattcttaaattgtatattagaagcaaactgttgcacattttggtttgtttgccgggggaggatttgggaaagtggagttggtaccattgagaaggagtttagtttcaaactggctaatctagcatgtgaacaaacaggaatccaaataacttgttttcaaagcagagctgtctcaatgtagcaagtataggtagtgcaaaccttacttcaggaagtgtcctcaaattggggtcccacttaggagatggagaaaaagagaaggaaaagtgccagtcgcggtggcttgcgcgtgtaatccctacactttgggaggctgaggcgagtggatcgcctgaggtcaggagttcgagaccagcctggacaacatggtaaaactccagctttactaaaaatacaaacaaattagccgggcatggtggcgggtgcctgtaatcccagctactcaggaggctaaggcaggagaatcacttgaacccaggaggcggaggttgcagtgagccaagatcgcgccactgtactccagcctgggcaacaaggttgaaactctgtctcaaaaaaaaaaaaagaaaaagaaagaaagaaaaagaaaaagtaattggattgactactatgctctgacacctgcagtacattctgccacaactggcgatcccttacttcctccagccagttgactgctggtctttccttttctaccgcttctcttctgcacaggcctccttctttgatacctaaagtctgctgttcctcaagtttaagttcaaggtccagttgagaatagtcatcacgatactttagtcccagtgatagtgccttatatctctgtggatttttgcagttttgaacaacttttacaaccatggtctcatttaaaccacagaacaaccctgtgatgtaacatcaatgtctctaatttcacaaattaggaaaccaaacgaatggattagctggttagcactgagatgttctgactcctcactgggcgctctccaccccgggaggtccacttagccagcctggaggcagcaaaaactgtgtttctctggagggaggagaggtgatttgttcttcctgccctcccccttcaatcaccaaactatggcctatttgaggtatgaccgttttctcttacaacacgactaatgtcctcagttggacacttggttttgcaaatggaaacctgcccctgtaatgacataaaggtcaggaattgctcccttttcaggctcccatgacattccaaaaaaagtttgccctttgaattttgtcataatggtctttggcctaaaataggatagaaatggcacgtggtgtttcttttttaagggtcattttttctttccagatcctcaatgtgtatttcttcacattaggatgttttccagatgtagtttttgttttggtttggttttgttctttggttgtcacaaaatggctctttccctcactgatggaagaaaataaccaaagcaggaagggactaaggggctgcattaactcaagatgttttcataaatgtgaatatacagtaatcaggctaaaggtactgaaaaaagccctattgaaaggatgcatagtttttcgtgtaggggactagtttcactcctttataatccagctgggggagtataagcctggccaagcctggcacataagattctacatatggtaaaaatgaccttccctctatcatctccctttaggtgaatcatagatcttgagtgtaggtacacaggcaaggccttcctgggcacaagaggagtttgaagccatcgaaattttcaaaaaataaatacgaagtctaaggcaggtgtggtggtctgtgcctgtagtcccagctactccagaggctgaggtgggaagatcatttgagcccaggagttcaagtccagctttgacaaccccgtctcttaaaacaacaactaccacaacaaaaagcaagacaaaacaacaacaacaacacataaatgcaaattctgaatcacagatatgtgtacacatatttcatattgcatattgacagaaaactacagagtctcactctgtcacccagactggagtgcggcggccagatcacagctcagtgcagcctcgatctcctgggctcagacgatcctcccatttcagcctcctgagtagctgggaccacaggctcatgccaccacacccagctaatttttgtattttttgtagagatggggtttcaccatgttggccaggctggtctcgaactcctgggctcaagcatctccctgcatcggtctcccaaagtgctgggattacaggtgggagccaccacgcctggccaagcttctcatacaatgaaacatccaatctaaataaacatgttttatattattataaaagtaatagctatcactaaatagcatttctaatgtgccaggcacatgtactaattcattgagtgctcacaacaccctgaggtaattactccattttatagatgagagaatggaggctctgaaaaattactaagaggcagagcttggttttaaacctaggccgtctggcatcagagtctgggctgtgctgcggctgtggatgtaaatacacagactccaaattcagagccacagttcccacagcaactgccagtttgtagcatgttcaaaaagcccgagttctcccacataacttagctgagttgtggctgccagatcttttggcttagcaactcgaaacagagactgtccacgtaggctgaggttctcagttgataccaaggcgttgatgagactcttcaggcttctattataatcaagaagaagatttttcacatcctccatctgaaaggttcattattccagctgggtaagctgtgtgtctgcaaagatgccctatcatcaggaaatgaaatgggcactttttctccaagtaagcaatgcatgctgataaataacgccatatcagtggcgtgccttctccttcctcttgcaaacgattgacgcctcagagatctgaacaaccccacaaaaggggaggaaaatggagaaaaaacaaacttgagagaaaaaaggaatcattccttttcttttgtgaggacttttgtctgatccgtgcccacatgtaaagtatcccttgatcaattttgtcttaattactgaatgtaggaaaacaagctcattgttaattcatgcagttttaatttatgcataggagaattatgcaggataattacctgcagttgaaggaaaatgaatagcgtcagatgtggttaattcacgcatggtttacccttctatctctctatcagaaaagatttaaagtggtaaccaatctgaatgatatgcaaaattgcattggtttgctaagtagaagtattttttttatttgcatcacaaatagagttctcagatttggactgactagatttgaatataatttccagaacaatagctgtgattcactgacttaactcatattttatctcttccagaagtgcccatttttcaaatcagtgcaaaagaagctatcttcatgggccccatgttagcctgagtatagtttcctttatgaggataattcaatgagaatgataattatttcctatatcaagatttgtgggagatttacggtaatgatcacactacttgttcccacattgtccctgaaccttcatgatccagtggcttccaaaaactgaaacaaacagctggaacaaattatggggcaatgaatggacatcagtggaaatttccttgtgacttttgtcaagcaatagatagctgctaaggcctctttgaactcacacctagtaattgagagaaggctaagaggtggttcaagtttactgaaaaaaaaaaaaaaaaaaactactccctgatgttgagttgagacaggttacaataatgaacaattttgaaaggagaataccagtatcaaaaggaggagccagagaaagtaaatatgttcttgttatgacggagcagtaaattttactctgagcttccttgtaaccaggcagaaaggggaacaaaggaagttatcacctaagttcctgctagcagaaagatgggcatacaaaatacagcagttccttaaaggacacattcccttagtgatgaattgtaaaagtaatgtcttatatgggaacgtatacacgggaggttaaattgagctagttcattgcagtgaagttcaagaggcaacaccttgcatattgatcttcattcttattttcttatccctccatcaagctctctaaagatccaaaaaaggacaaccaaaggaaatttcacaaagagaaaaaggaagatctctatttggctctcaattgcccttttttgagaaaaagtgatacaacttatctaaggcaactttacttgccataatcagattttgtctgcagaaaatattagcagggtgagttgaagatgacttacctccttgccccacaccccctcacagaggaccccagcttagacaatggagttacaacttcataataatcatattactgtgccagaacttatcgcttcagattataggttctagtaagaccaacttaagtaggaaaacacagcaaagtataaaaacacaaagctttgtttaggtaaggccatttgtctttttacctttgaccttagtgatgatgatgataataataggataataggtgtcatttaactgagtgcatattttgtgcctagcattacactttggcttgatgtttccttccttccttgcttccttccttccttccttctttccttccttccttccttccttctttctttctttcttcagggtctggctctgtcacccaggctggagtgcaatggctcaatctctgctctctgcaacctccgcctcccgggttcaagcaattctcctgcctcagccaggcatggtggtgcgtgcctgtagtcccagctacttgggaggctgtgaatcccttgagccttggaggtggaggttgcagtgagccgagatcccgctgctgcactccagcctgggcaatagaaccagacatcatctcaaaaaataaataaacaagtaaataaaaataaaaacactaactgtgaccatctttaagattctctgtaacttaaggccctctggtaatgagaggtatgatggcatgaaattgcctcggagccaactctcaggaaatatgtaatacatacacatgtaaagtttagacgaactttcatttactaagacaaatgcccttattaaacaattttccttgactctggaagtgctaacagaaacataactggtaaatttgatacttgccatttcctgctgcgaatattaattgtggcacacagtgtaatccggaatccaaatctggaggatggcggagggggaggggtgctatgactggctgtgtgcagccacctgtccacgctgtggcccccttctctcttcaccctgaataccccagtctgaacagttggagggcatctgctcctggggctggaacacccgcactgctgactcaaacaataaactcatcctgccaaatgatgtatttttggtacagaaaaaaattctggccctcctaggaatcgaaatacactcttaagtgaatgcctgtcatttgtgaaagacattgcctagttcacattctgaactctgctcatcccatttgattagactcaacacccacattcattgctccctgtgttttcacttccaatgtattgggatgaggtttgagaaatatacagtgtgaatggcgttcttcaaaaagaaaatgttcagagcggctgattgtctggagggtttcactgaaaagctcacaatcatatcatagaaaattgctcttaaaaatcattccttctggtggtaaaataccctgggatcctgtgccacatttaataccaactttatttatttatttatctatttattttgagatggagtcttgctctgtcaccaggctagagtgcagtggtacaatctcagctcactgcaacctctgcctcccgggttcaagtgattcttgtgcctcagcctcccgagtagctgggattacaggcacgtgccaccacacccagctaatttttgtgtttttagtagagatggggtttcaccatgtttgccaggatggtcttgatctcctgacctcgtgattcacctaccttggcctcccaaagtgctgggattacaggcgtgagccaccgtgcccagcctattttttaataggaagagccaactatttttgacctcctgatattatgtagtctctataactgaatctcatcttattaattcaactttcaagagagttgagaatgcacagtagttaaaaatgacagcccaggtacatgataaaattcatgaaatcaacctcctttgaagttttttttcctctaggagatgtacaggaattctcaatctagactttagtaaactggaattgacttgataatatatcctcatcgctgtaacaagaacagcaatgaaccctttcgctgtttaagcactttccattaattgacctatataattttcatagcgacctatgagtttggttcttttattatccctattatacaattagttctggaaaacttaagcaacccgtgaaagccacacagtataaagtggtgctgccatgccgcaaacccaggcaggctggattctttggtctcagcactgctgaagtagaaggcatttgttttgttagtgaaactattggaaaacacaggaacagatgacaacaagttccaatcctgacacggggctccttttaagtcttcacaacagtgcaatgaagaagttcttttttatttttttattatttatttatttatttatttttgagacggagtctcgctctgttccccaggctggggtgcagtggtgcgatctcggctcactacaagctccgcctcccgggttcacgccattcttccgcctcagcctccctagtagctgggactacaggtgcccgccaccacgcccagctaatgttttgtattttttagtagagacagggtttcaccgtgttggccaggatggtcttgatctcctgacctcgtgatccacctgccttggcctcccaaagtgctgggattacaagcgtgagccacagcgcccggccgaagaagttcttttaaatcctaagattcccagaaccattccttgtatgcgactgaacgagtgacacaattttatcctgtttttctggtaaatatttgtaatgcctttttcaaatattttgtgcagtgaagttgaagccaagcgactaaagaacatgaatgactccttttttttctttacatgttaaaaggatgggaggcaaatgtgacatgatcactgcatgctgtgtgtatggagaaaaattaaaccctaggaagattttttttttttttaaagtacgtatgcccaggccccaccccagactaagtcagaatctctgggaatgaggcttgggcaatgacatttttaaaaagctccccaggtgccgggtgcggtggctcacgccaataatcccagcactttgggaggccaaggcgggcggatcatgaggtcaggagttcgagaccagcctgaccaacatagtgaaaccccatctctactaaataaaaaaattagccgggcatggtggggtgtgcctgtaatcccagctgcttgggaggctgaggcaggagaatagcttgaacctggaaggcggaggttgcagtgacccgagatggtgccactgcacaccagcctaggcgacagagtgagactctgtctcaaaaaacaaaacaaaacaaaaaaactgcccaggtaattctaagatacggcctggtttgagaacctctaaattagtgcattatattaggctctttctagaagttattgatagttatatcaataggaggatgcagaggttgggacaagggtaaatattttaatgtagcagatgtcttcaaataaacccattaaatccatctctaacagtcgacatgactgtggatttaaccctaagagtataggtgtgggatgttactctctgaatagcaaagatgacccatttatccatttattcttgttgaaactgaaatgctgttattattgttatactgtgttgttgaccctcaatgagcgcctagtggttgggaatggttatgggatatgaaagtaaaacgcctggggacggggaacaggaggtcgtagtgagacaccagttactgttcttaaaccatgtgagcactgaattggatttgtactgattgatgatgtttgtggggccacaaggcattctgagaactgatgatcctcccctcccggttgacagaaaattaagaaacggaaaaggaaattgttaatagtaagggaattctgcactcttagctaaaggagaatggagataagtagtaacaagaccccatctgggtggtagaaaccctcattccagttccagttctgctaacaatcttgttggaacagttgcctacaggtcagtttcagaatacagatgaatttcccttctatacaacctcttcttattcctgtaaaacaggaataataatcactgtcctacctaactcacaggttgctgttagcatgtagagtaggtgccaaagcatttggaaaagtgcagtctgcaaacatgaaatattgtcctgaatcatcttcgtcaatcaaggtgtttctttgaagttccaagtaatatttgagatacaaacagctgtgtagccaccaggagatgaacctttctttctgttgactttgacctctaatgggtcacctgctcctcatagcacctggactactaaattctttggtagctcgctatggtggagaagtcctctggcagttggttcgaacacctaacttccctacatggagatcatttaatcttttcatttttgcatggctgatgtgatccagttcaatgcttccagttggctcaaattgcgcatttgtttctttggatcctgacagcctaggacctctctgttctcttgtttatggtgaaagtcccagaatattcccacaagcttctccctataaaccagatgatagaggcaaaatctaaggttccctgacaacacgattctcttcccctgttgatctgggtcatatccaagaaggatgctccccagtttggttggggcttctgtatttacacagatgttggcctgagtggagtggaaaattaggtagatctggaatttattgaagccagttaatttgagcaccagtgtggtcagattataaccttcttgtttgctttgaagtgggatagggtaaatgcaccaggctaaaaggccaaaccaaatcatcttctagagaaaatagacacattccccttctcatggcctcatctttatctgcacagagacctgaggaggacaagggttttcatatattgcctacagtctatgtcccccattcttacattcactgtgtcctaaagtgctccataaagggggtaaaggttaagaattactgtctctgagactgccctcacctactttatgctagacgagtgtcctgatacccttaagctatttgggattgtctttttgtatcagcagtgggctggtagacacccagtaaataaacttttcaaacatacacaggaatagagtaaatgaggtaacaaattcctgaatatccatcacccagttacaaaaattggcaagattattccatgcttgatcgatccctttggtgattgttgctgttgaagtatcttaaagcaaattcagacctctggatttcacttgtacctgcttccactgcatctcaagagtatgcacacttttgttttgttttggtttttttagagacagggtctcactctgttgcccacgctggagtcagtggcaagatcataactcactgtagcctcaaactaagtatggacatttccttgcataactctagggccattttacacctgacaaaattagcaaattatcatctaatatctagtacatattaaaacatcccaagtatcttaaaatgacttttcagttggtttgccattatagtccaaacagaatccacacattgcctctcttgctatgtctcctgcgtctcttcttgtccttctcccaccattttttcccacgaataaattcattaatcagtaagaagtctgaggccctgtgaaaatctttccagagaagatctgttgcctgctttatttctcccaggctgtccaaagattcagcacctcttactccactgtttataacttcacccaggctgatgagatgaggacacaagaaaatgaatgaaaactactttctccccagtgaactagaaaaaaaatggaaaaggcaagggccaaaagaagccaggcaatagagtgagatttgagtcccagaaaataaaaagtggccttcaaacagttcttgtgtgacccagaggatagagtacgtcctgggtgtgagcatacggaatgatgcaggagaaacaaggctaaggggagagaatcacttgagcccaggagttccaggctttagtgagctatgattgcgccattatactatccagcctgggcaacacagtaagaccttgtctcttaaaaaaaagaaaaaaatctatcgggtacaaacaagatttaaaactggtgagtgtgaggtgatggagggtgcattaggggagacgggagtcttgggaaaagtctccaaccctcattttcttgctctgtaagaatggatgtggcttacgcctgtaatcccagcactttgtgaggctgaggcaggtggatcacttgaggtcaggagttcaagaccagcctggccaacatagtgaaaccctgtctctactaaaaatacaaaaattagctgggggtggcggcacgcacctatagtcccagctatttgagaggctgaggcacgagaatcacttgaacctgggaggtggatgttgcagtgagctgagatcacatcactgcacttcagcctggacaacaaagcaaaaccctgtctcaaaaaaataaaataaaataaataagaatggatgtaactccactctaggtaaattggctaaggaccataaattggcaagaggattgtggaagctaacttactaacctaagtgagagcttgatgtgattacaggagttacgtgggcctctgagaggggaaacaatgggatagtgccttttgggctcagaatacaagtaatacagcatttcacacatgtacaaatatgcctctaatgtattcttttgtctttggtgttgggaatttgccatacgttgatggatccagtctcggatacataagcatttgttctttctttatgctatattgtacttaaagataagaattaggtggccttttttttttatctcgttactgtcattacagcttcaaatcctttagacaaagaacagtaagaaattattaaacactcttgatatacaataaagaggaacataattctgttttgttaataatctagatatttgcacgtagctatacctaactgctttgcattctaatgacaaattatttgtctttagcaaccaaaaataactcagcagatgttatacatgtggctaccttttggtatgcagcagttagaaccagcaatgaaaccactattccttttatggcagtttaatttgctaaaattaccatgcagaggacatgtgtacaggcctctgggaagccactcaactttgcaactgctggcatatgacggcacacacgtacacagcactgccttactttgttaagatcctggaataactctttgacactgggttgttctgcagggagtcagtttgttatagttttcttcctctactttttttcatcagctatactttgttcagtaataattcacatgactttatacaaaacagcacagatttagaaagaccaaggtaatttttttttgtataaatttatgggagccaggtgcagtggcccaccccagtaatcctaggctggggcagtagggtctcttgagcccaggagtttgagaccagcctgggcaaaatagcaagaccctatttctacaaacaattttaaaaattcgctgggagtggtggcatgtgcctgtagtcctagctactcaggaggctaaggggagagaatcacttgtgcccaggagttccaggctttagtgagccatgattgcaccactatactccagcctgggcaacacagtaagaccttgtctcttaaaaaaaaaaaaaagaaaaaaatctattgggtacaaaggtccaagtgtaattttgttacatgcatagtttgcatagtggtgaagtccaggcttttagaatatacatcacccaaataacatacatggtatccatgaagtaatttgttatccactcccctcccctctccccactgtcccaagtctccatggtctatcattccatactctatgtccatttgtacacattatttagtttccactcctgagtgagaacatgcagtatttgtctttctgtgtctgagttgtttcacttaagataatggcctccagttccacccatgttgctgcaaaagacatgattttattttttatggttgaatagtattgtattgtgtatatataccacattttctttatcaaatcaacccctgatggaaacttaggttgatctcatagttttgctattgtgaatagtgctacattaaacatacaggtgcaggccgggcacagtggctcacgcccataatcccagtactttgggaggctgaggcgggtggatctcctgagatcaggagttcgagaccagcctgtctaacatggtgaaaccctgtctctactaaaaatacaaaaaattagccaggcgtggtggcgcatacctgtaatcccccagctactcgggaggttgaggcaggagaatcgcttgaacccgggaggcagaggttgcagtgagccaagatcacaccattgcactccagcttgggcaacagagtgaaactctgtctcaaaaaaataaaataaaataaaataaaaaaatgaacatacaggtgcaggtatctttttgatgcaattatttcttttctaccaaggtaaaattatcagagaaatttatttcaaggcagagagaattaaacatgacagataattttcaatctactaatacataataactggaaaatgccaacattcagctagcttgtttccttaataaaaacatctccctatgtatagggacatacgttgttttaaagcaacatagttgctttaaaatatatatattttaaatttaacaagcatttctgtgcttttatcagatgatagtacaaacacaataggtcacagatccatgtaagaggttcactccaacacattatctctttatcaataattaattttcataatagttatgtgttatgaatttcctttataaagttatattcacataaacaggtcattccaatagctaacaataagcaactaaaatcaatcagaacacatcgtcacttatagccttttaaaaactgcatgacacaggctataatcaagaaaataaaatacttcaggtcgcgggtgaatttcttattcaaaaatgcaaccacagaatagaggctgtgaataataatttgtatcttcccacataaattctttaaccttccctcccttggatgagctctcactgccttgagggtagaaaaaagcaaagttactgagctctagaggccacagcagagaaagcagtccaggtgttccaactgcatctcttgatgatccccaggctcccttttaagcccctaggagcagcactttatacctcatgtattattttccagtctataataagatgcctaaatgttaagcatttaaagtgctgctttttaaagtgttgtcataacaacaggaataaaatgacgaatgtaactggagtttgaaagggctgaattagttttaagtccgttgctttaccttcatgttgcaagggtttaactctaacctagctcaaacaaaggccgtgatcatagaacattaccatatttgagtaatgttgtcagctatttttaccatcacataattgccagtcaattctccatcaattcaatttacttgttaggatggacagaaagaaattaattggccatatgaaaaatctattagtgtgattatgtaggccatatctgaaaagctttcatttaagattatttcttatcctttctctgagatgaaatacagcatgtagctttatttataaggctcaattcaatttcctactggaccctcatgcccattaataaacaccagcattaattgcacatgttgggcaaaggaaacaagcacatggtgtgtaattatacttcccagcacactgttgggtacattctcctagaacctagtggctttttctgtttaggatttccaaagatgtagcttggttgtaatgagaacaataaaaaatattagcttataaaaatggtaatttcagtaaagtcaaataccagtagaagtgaggatgtcagtatcattttgatgctgttctgaagtaaagaagcaataatcactaatagctagaaatgagttgccaagctctagggaaaacaggctgcatgcaaatatgcctgaaggagctgataataccaggaatggggccattttcttctatatggcaatgtttttttaacctggtgatcaaaaattgaggatccctggtcggtgtatttttctctcagctggatcagccaagctgtctctgaagatcatagtcccaagagatgttccttttttgatatacatgggttttgctgggtttttttaaaataggtaaatgtacttattattacaaacaggctcaggcttcatttaagtgcaaaatgctttttccttctaataaggaaacagttggtcctggtttgccatgtagtgtacaccaaatgagggtctacaagtgttctagactgtgcattttaaaatgagttatgacaacattagtcaaaatcaacccaatccctcattagacttaggcgagttttatgccctgaatcatttctcttctaattatcgtgaggccagctgctactccctgcatttatttaatccaccagaaaaggagaagaaatagttttcatttttccccagggctaaaatggtgtcaattatctagaagttcctacaattgactgtcccaatgaatagaaatgctattaacatttcttctttactcttcaaatgactcagccagacccttaaaatagcttcaacgtactctgctgtcattgctttgaagaggaataaaagagagggaaaagggagagcagtaatgtcaaattacttcatctctatgtgtttcttcacctgtaaaatgtgtataggtttattattagcacattccatttgataaaagtcagatatctctcaaattgcaagtcctaattagtaggaaagaccatttttccacatgaagtcttttacatatgttatctcattttctcttcaaaacacccttggtgacttaggtatgatcatcattttattcataaaaaaaattagggcttagagagagcaggtgacttgggtgaagcctggatcaccctggctgcagagccaatgattttggtatcttaccctgtaccgagcatcagagaagtttcaaaagacagctggtaccccctctcacggtgggtgtagcttggttaaagagataagacatttgggaaaataactaaaatacaagcaaggccctgaagatgttagtaccccatcagtaattcaaagttttgaggttcgcaatgtgagagccctctggctgtgctgctcagaaaatgcttgtagacaacagttggcttttgcatcaaattatagtagtggattataacccattgagtaaaacaagaatccgtgagtccatacagtgacaataaagaaagaaatgaatgaatgaaaggattagaaaagctctttctttacagtagaaggaatgatagagtttaaagagtaccattttgccatcattataggaataattgatttgggcaggagacatcaatggatgctaaaactcctgggttaaagaagcaagatatttgcatagcctcaaggtacctccttaccaactatgtatcaactagaaaggcaaagatagtaactttccgtaggagaaactggccaacaacactttaaccaactgatcaaagttaacatcaccggtaatggcaccaagcaactccttgagcctctgatgcaatgccttgagaaggacaatatcacttacgtggtatcactgctaaaaatgcatagtctgactctttatcacaagaaaacagcaaacaaacccaaagtaagggccagtgtacaaaacaagtggcctgaattccattaaaatgtcaatgtcaaagccaaagaattgccaagaaactgtcccagattaaaggacagactcatgacaaaacagggagcatctgatcctggtttggctcctggaatgtggggaggagggacaatacatggaacattattgggacaattggtgaaattggaataaggtctgtaccttagataatagtattgtattgatgttacatttcctgatactgataattagactacgatagtcagtgaatgtcagcaaatgtctgcaaatgtctgtgattttaggaaatacacattgaagtatttaagagtaaatttgcatcacatctgcaaattactcagtgtgggggaggaaatgtatataaatacatatgtgcaaattagtctcataggatttgggaaaaaataatgtgtgtgtgtgtgtgtatttggaggaggaatgacaaagtaaaatgtggcagatgtcgacgaatgaatctgggtgaagggtagatgagaactttctgtacttttcctgcaacttttctgtaagcttcaaattatttcaaaatcaaaatcttttttgtaaaattgacttttgaactgcacatcccaggtactcatatttatagtccttatgaatccatgcttttcaattacctaaaaattgctatcttcaaaaagatgctagtttctagcttccttagcattacctaaacttgcctggctattcctgtcttatgtatctccctctcttttgagaaaattccttattatttaaattattattaacagctaggcttattaaacacctactacataccaggtcttatgtatattatctcatttgcaccttacaaaaatcctctgaaatgttaatccttttatataaatgagaaaactgggattcagggaagttaaataatgtgcaaaagttcaaacagctgtagctgtagaacccaaactgagtgcagatttgtctgactctggattccacgttcttattgtctctgctgtgttgctttccttggaagattaagaaataggtaccactttggccggacatggtggctcacacctgtaattccagcactttgggaggccgaggcaggaggattgcttgagcccaggagtttaagaccagcctggccagcatagcaacatctcgtctttactaaaaatcagaaggattagctgggtgtggaggcacatgccagtagtcccagctactcgggaggctgaggcaggaggatcgcttgagcccaggagattgaggctgcagtgagctatgactgagtcattgcaatccatccctccagcctaggcaacagagcaagactctgtctcaaaaaaacaaaaaaacccagaaataggtaccacttcaaattttacgctgttatttcttacatgaaaaattgtctccaatccgctttatgtatactcatgttatcttcaattaaattgttaaaatttttaaaagcagagctcagtcttaggttgtctttggatcttggacaacacatagcatcctgccagcgctgagcatataatatatacttaataattatattgattgatggagtcttagaaaacacggaaagaaaattatcatatcactttccagagattctgaaaattaagtttctttttttcaagtgagttaaaactaagtattcattataataatctgtggtttctcaagcactttgccttttgtaaagcacttcgtcgttttctctgtgttttaaagcagaaatccagccatctacagagatggtggaaagtcagtctacatgtccaagtagtctcctgattgttagattggatgaagctttgatttcaattgaaccttacaatgcttgcctgttaaaatggggaggaattacttcctttactctacagatacagtgtgaggttcactgagtttaggacttgcccaaaaggccagttagaacatctggccctggttcttccatccccttgctgaggagtgaggctctgttgagttgttctacacttttttttcatccgttcacgtcagttgtcttagtcaagcagtgtatcacacatgcattcatcactgggttagcaaacaatgttgacaactgagaagcaaatattagcattactttgatttcttaatttatttatttttattttattttatttttgagatggagtctcgctctgtcgcccaggctggagtgcagtggcacgatctcggctcactgcaacccccacctcccggattcacgccattctcctgcctcagcctcccgagtagctgggactacaggcacccaccaccacgcctggctaattttttgtatttttagtagaggcgggggtttcaccatgttagccaggatggtctcgatctcctgacctcatgatccgcccgcctcagcctcccaaagtgctgggattacaggcgtgagccaccgtgccgggcctgctttgatttactttaaagcagccatattttttaaaggccaatgacataaatatatttactttttaaaaaagattagtcaactgctctgtaataggtaccttgtaaccatataataagcagacgtgtatctttagttttcatcttaaataattattttgcatagcaggctatttacatctggcccacatgcctctttcagacaactcaattatacatctgcttttgaccacgatgtgggggagcataaacaggatggcattgttaggggaaaaagaaaggaagaacccaaatcgggcatgaagaaatgactcagaaagtgcagtgagggcaggtgttacatcttatgaagcctcgctgggagacaggatcaaatcacgaaagcaactctcagctggttgcttactgattcagcttttccaagtcctgatttcttggcacttcctcttgcagaaggaatgatgactttttctagaaattggtagtgattttttttaaacagctttattgatgtacaattcacataccataaaatttactcatcttaagtggacagtttgagttttagtaaatttatacatttgtgctaccatcatccatgatttgcttttagaacacttccaccacccccaaaacctctctctgcttccttgcctgctcccgtccctggcctcaggcaaacacttgaattgattgtggaatttttttacttttgccagcatgtcaccccagctacagccaactgatctatgggtcaattgtcttgtctcagaggggttggtctcagtctagcttatggagatggcatagctttgtaagtgtgacaactattggtttccaagttgacgtttggcccccatgagaaatgccttggcgagaactgagatatccttactcatgtcattcagaaatcacagatgtgtctcatattttctatcagtaaggctctctcagaattgcctgtttgtattcttaattcgatagaaggtttggttaaatttttaaaaaaggaaaacaccataagggttaagacagtagcatctagctattgtattttcgttttaatttcatgatgtttgatgtcctgcaactcaagcatgcacaaatgatcacgtggtctcttgtttcccatagaaaagccctggtctcatccttgcaggggtttcctttagcctctggccaaactgccatatctgaaaaatcagaaataaaaggcacatgtaatgcggactcattagttttcctcttattattcaaaggagcacatggaatatggggtagacttgagtatccttttaaagatagctttgttaaaaagctaattgatagccccctcggcatagctttaaaaaaagaatccgatagaaaaagcaggatacaaaattttgcatgcaatatgctcaaattattatgctttatatgagaagggaagagctagagaaaatttaacagaacaaaattcccccggtggttgtctttggatgatacaaacggtatggttcttctctccttctccctacactgcctcctttctactttctgtgttttcctaatacaggagagggcttttgtgcttgtaaaaactaaaaataatgtactgaatcatatttcctttaatgagtctcagtattcttaactctaacaataaatattagcattccttctagctgagtagtcaatttgcccagttgccttacaggttaatcaatgcctccagcacttctactctgaacaagtgagtttgaagattcacacctggcagatgttgaaaggaggtcggccactggcctgacaaccaggattcttactttaatatatatatctagccttacctgtctcgtagtgaaattgctgaaatttgaagagaggcttgctaactcaagctaatcaaacacacatgaaaacatgagccagaatgccagttcataaaaatatagggagaagtagaaccatcacctagactggacattccaaacatttccccgtcacttttactacttctactggtggcactaccatgagctgcactttagggcctgctgcatgggcctgccacatgacagatgtccttcatcacccatcttccaaacagccctccaagattgattcctgtcctttattcttaagagacaggttatctccaagttctccaaggaggtgcaaattcttcccccaaactgcaatcatattccaccctttatttctggtccaatcagagcctgagacctgatgggtgaggggaaatcccttgttctctttttatctgcttcagcccccttctatcttcagattcagtgttcttgtccaaaaaccgcctgctgatttgatgagctaccttctaatttaaacagacaccaggtgtttgggtcaggtggtcgctcatagcatccaccaaagtccagtgtacctgtatcacagcattcatacaagaacatgtaaaatcttatacttattataatttcaaaagaccctgatatatgtttaattggaacttaacactgcatagtcagagaaaaggcagtgattttcattgtatgaagaaactgggacgagaaacagctgtggctttcagggttctgtgcctagaggctcagctcagaatggcaggatttgttcaactcttagtcaaggtgcttgggattccttccagaaagaccctgttgtgttgttcccattggttataggagtggcagggcacgggtggcaacctggtatgacagccagggcctcctgcaacaaagtcaagtgaagagcaaaccatagcagccacactgtttgcctaggatttgagtcctttctgggatttaacacacaaaaatgaatattagttatgctggaattttccaaaagaccaggtgagacgtcaataacttagagactggaaacatttttcaaagccccagccacccaggctggagtacaatggcgtgatctcggctcactgcaacctctgcctcccgggttcaagcaatgctcctgcctcagcctcccgagtagctgggattacaggcacccgccaccacgcccagctaattttttttgtatttttagtagagacagggtttcactatgtggccaagctggtctcaaactcctgacctcgtgatccacccgcctcggcctcccaaagtgctgggattacaggcgtgagccactgcacctggcctgagtttgttgttttatgtgggatttcttgcttaatagatatggcatctggtgaactggtgaacctagagtatatatcgggtatatatgagtatatatcaggtatagtgcatgttaccaggagtacaatcccagctctaaatgttttgcagacaaaaataatgaacttgttacatagctcagaactcataataaggacttcatcaggaaatctaaatagttctgatgtaatcagaatttataaagcctaatacaatatttcttggcaatcatatttctcctctgcaaggctgataaatataaacaattttataaatacagttattactcaacagagttatatgatcttgtttatgagctgtctccttttcacttccatttctaggcaactccaaatgtctgcaatttcaaaacagaattttacattatatgaaaaatacacaaataccttttctgtataaaaatataatacagaaaagattaaaatgtttctgactaccactcaatcccacctctccatagactgtgtgtagtttcagaacttttctatttgtgttcgtggttttatatagttttgtttttggcattcctactatcatactctgtttcattctgtagtttatcctggggatctttccatgtggccatgttgtttttaactgccacataatgttattgtcaaaattataacataattttgagtgttaaccattcctgtaatgactaacatttatatcatttcccatttttccattactattaacattgcctgtgatgaatatccctgtatatgcctcttcatgcatttgggtatttccctagaggagctatcaaagaagtgccctgttaaaggattagtatgttttgcagcttaaacagatactgccaaattgttctccaaaattttaattccattttacatccctaccagcagtaatactgcaattctactgtagtcctttctttaggttaaggcttttggttcaatggagcacctgctattaaaatgcagattactctggcagaggcaattaagcctttaaaacccaaaaattttagaggtagtttttctgaaagctggggacagaccaggtctttgggacttctaggaagccagggaacaatctaaagatataaggtgctaagaggtaggagtggagtggtcaatagaatgacagttgataacgaagaggtgcaagatcagttacaactggagaagagctggggaagctggaagaatagtagcgaagaactaccacccctccatcagacttgggagctatggggaagggagtgttttgtatacttttgtccctaatacctctacactaccctgccccaacctcctccttttatttcttccagagccagactttgtgtgtgtgcgtgcttgttttatgactctccttaggccatgtgtcaccttttaggggaaatgatggcaagatagagagatctcagcctaaatcagctctggccaaattctttcttgatagataatgatcatttctaagactacaaaagcaaaacaaaacaaaactgctcactctagtcacattcctagtggccatcagttccatatgtaaatttagtgaaaagtttctcggttcttttttttgagacagagtcccccactctcgccaggctggagtacagtggcgcgatctcctctcacggcagccgccacctcccaggttcaagcgattctgctgcctcagcctctgtaatcccagtagctgggattacaggcgccagccaccatgcctggctaatttttgtattttcagtagagatggggtttcaccatgttggccaggctggtctcaaactcctgatctcaggtgatccacctgcctcggcctcccaaagtgctgggattacaggcatgagccactgcacccaaccatacatttaatgaaaagtttctgagcattattccccctcccaaagtatttgacaatcttaggatcctggacagacatttgttctgattttgagaaccttgtttacctgttacagaaaatgaggaagaaggaaaattattttacaatctggtacatatgttttactctccagcgtttaattcatttaatgaaagagttggagttaattaattgtagcagattattttaacagaagtcttaaatttgcaatgaacttggtatcttttctttttttttctgcctatcactagtgcaactgattgttcaatcaaaactcctaagtcagtggctctcaaacattggtgaacatcagaatcacctggggactttacaaccctccccatacccaggtgatatcccatattaattaaacagtgcctggggataggagccaggcatcagtagtttaaactaccgtgatccaatggataaggggggaaaattggcttgaaaaatataatttctaagaggtatgagataatgatatagttaaatatttcgaatactctaagttttttcctttgatcaaagagtgtctgtgatacaatagatataatgaataataatttacaaaataagatagaatactaaaatttgccaaattgagacattaaggtgggtgcttggttgtcaaattgagtacagaaagaacagaaatattaagaaagcatgatagtttattacaagtttgcatggcatacagtgataccacaggcatgctttatgaacctaagaaagatccccttaaagaaatgtagacagatttctcagtaaccagcagagagcacagaggagaacctcattaaggattaaaggaattgttaaatatagtgaaccccaagtttctcttcaaagaatcagtatgtcagtacgttcaggtctcctattctttgattctccattttaaagtttaactttctggttctcttcgtctccttgctcctagtttcagtaaacagcattcccaccagtcctaatcagtagttcacatttgttcccctggtcacctgcttcatcctgactcatcccggtcacctgttggacctgagtcacccctggtcacctgctctgacctaagtcacctttagttacctgttcctaaccgtccttcctgccaaactacccaccccaccactgtggctcatacccctactctctttaaaatagccaatcagaattagcttagactgtgcggtccaaccctagccaataggggaacgacacagcagtagggccatgcttcaggaataagaactcctgcccctcccctgtccaagtgtggtctcaccattactccattcataagttgcacccttatatagaagtaaaaattgccttgctgagaaaattaaatttatgtttgagtgctatttccttgtggcatcaaaaatttatttataacagaattaggagttttttgagccttgaggctggggagaagtaaccagagagaaccttatctgcacttgcattttgtctaaccatttgtgccctacatattacttttactgctcatacgtacttcttcattacttctaaaattctggagaatgccctaaaatgtaagctgctcctccccagctagtgtgggatttgcatctcacccagatgaaagagcaagccgattgccatacctgtagccaagtgagtcagcacctgtacctcgcaagaatgcatacaaactccagggctgctctctcctggagagggagggaggggatttaaaaacctgcagcaacatgggggaggaggctgtttgtccttctctctctggggaagtaactcgctcaaactgccttccttgctgagctgcttcgcgtagctttgaggaaggtctagtgaaattggtctttccattacatctggatgtactaccagagagttctgctgctgttgttttttttagcttttctttctttgagtctttaaagggcaattgtcgacactctgcaaacataccgatttgttgtctgcccactttggagtcttcaatctgggcagtaactatttaccctttttcctgctagcctgtccccctctctggattgaagtcacctgctaagacaatggtatgtgctttgactcctcctgatctaaaaggaatagaattacctaacagttgcagggtcatcctttgggggaactagccctgggcttctgctcagctgaagttgtgttttgacaatgcttcttggtctgttgtggtaagtccttacaaaagccaagcaaaagactgaaatacaagttgtgcgctttctgctgtattttcctcttaccttccccccgaccgcccttgtgttcttatctaacctagattatcacatcttttgtgagcactccctttacccttcttattttgcactgtcacagtagtggcacaatcttagctttcagaatattcttaaagatagaaagggagaactagttcaagtaagttcatctctaaagtaacctagtgttttagctttatgacccctaggtgtagaattccgccttaagacttgactgtgttttcagtttgacgcatgacttatctgaagctttgacttggcctatttgtgtgtttttattgttgttgaatggagataaatgttacaacagttttcatgtttttgagggtgtggttgaaccttgttttaaaaaaaaaaattcttgaaggaaacctaaagtgatggacaattttgtgtaatttatatttattttcttttctttcttcttttctttttttttagacagagttttgctcttattgcccaggctggagtgtagtggggcgatctcggctcactgcaaccttcgccttctgggttcaagcaattctcctgcctcagcctcccgagtggttaggattacagacatgcgccaccacgcccagctaattttgtatttttagtagagatggggtttcaccaggttgcccaggctggtcttgaactcctgacttcaggtgatccacctgcctcggcctcccaaagtgctgggattacaggtgtgagccaccgcacctggccatagatgggtatcttttttattcttttgagagttgaacccttcgtcttcaggacactccataataaagaacctcacaagcacttaacagtctcatggcttactttacatcctttatcattgttgacaagcttagtgcatcttctgtctgaacctgcctataaattgtcatgatctttccactgtcttctaggactaccgaccagactcccggaaatcatgttggtaggatcccagtctttttcgcctggagggcccaatgggatcattagaagccagtcctttgcgggtttcagcggcctccaggaaaggcgatccaggcaagtactgtgtggttctctcccgggatgcagcttgccaaggaagtgaactttgatgttgtgaagagggtctgtgtgcattcagcctcgtcaaaccgccccccccgcctcctccccattttaatctttttcatggaaaggatgtactaaaaattaagtgctatagtttattttctatcatttagaattcctcctgcaaggatgatggctgaggatttaggacaaactagtgatatatgcatagacctctcactacccctccttccacccctttttgaagcacattttccattgcattcagactttggagactatgtttgctatgaaatcatgcagtggataatgattctgcctctgcagattgactctggggagcagatgtaattcagacagaggttgccaaagttagtttttctagtttcctgaatctcctctcatctgaaacaggacttaggggaacttaagaaagaaagaacagacagtgaataagcaacatgtaaccaagtttatcttcagtttttctgttatcataaaggtctttgccctctgaggggccctatgtgctttaacctgtattgtcccatttgtgcacacggtgatggcagagagtataacgaataactaacctgggaggggtgcagtaggcaccttccggcctcggaggtctcggctttcctactgatagctgggtcagtgagtggcctagcctctgcatctcctaattagatcagtactctggttttaagttatcagatatccatcttaccgctgcaagctgtatccctggcactactagagatgttgaaattttataagttatacctaatcagtaatttgcttcctaaaaataaagcttttaaaaaagctacgtgtattttaatgtcatatagaattagctatttgtcatgcttatggtcccttatcgaaaagaatttattcacatcctcgttgaatttcatagacacttgtacctaaaattgcatagtgcatgtatctttttagttggattatatccttctgcctgtttattatgtccacctggaactctttgcccttagcttcctatgatgttttagaaaagcaatacatttccactcagaatacacattccctgaagccagactttgactctaggtagcctctgcccaacagagctttcaggtttcagcagttaacaaatctaatactaagaaactaaatgcaggatggctcagatctgggaacattaccttctgcaaaggacactagtgtgaacacaagatgattacaaagacatttcttggtcaggcacagtggctcatgcctgtaatcccagcactttgagagtctaaggctggaggattgcttgaagccaagagatcaagaccagcctgggcaacatagcaagaccccatctctacaaaaaatgttttaaaaaattatcccagcactttgagaggccacagcaggaggattgcctgaagctagaccctatctctacaaagaaaaaaaaaattagccaggtgtggtggtgcatgcctgtggtcccagtacctcgggaggctgaggcaggaggaccacttgagcccaggagttcaaggctgcagtgagctatgattggaccactgcactttgccctgggcaccaaactgagaccccctctctttaaacaacaacaaactatttagctgggtgtggtggcacatgctacttgggaggctgaggatcacttgagctcatgagtccaggagttcaaggctgcagtgagctatgatcacaccaccatactccagcctggatgacagaagaagactttgtctctaaaacaaacaagtaaataatagaagacatttttctttggtcaaatccttttggatgcccaatcctcacaatttcttctgttctttccataggtgtaactccttcattgaaaattcctccgctctcaagaagcctcaggccaaactgaagaaaatgcacaatttaggccacaaaaacaacaatccccccaaagagcctcagcctaaaagggtggaagaagtctacagggccttgaaaaatggacttgagtaagaacttgaacctgataatgtactttaaggaaagacccaaggggtcagagaaaagctggtcttatgagatcatttttcagatgtctatttctgtaggaggtattttattcttgtaccacaattagggaagcctgacataagtcccagagatgggaaatatattggtattccacatcatattcataacattgatggagacctggaaccctgtgcagtattgagtttcacttaaacaatgatggacagacatatccattctagacattgctgaaggagggttctgaaacctccctgatatcttacagggattgtgaacccagaataagactttcctagtgtgcaatgggacattcactatttgttctatttgactagatagaattctgtcaggccagagccagggctgactctacagacctcttgccccttgcctccccactggtttttcttttctcgactttcagcttttttctccttttctactttcccagctggatagtatccagtgccactgctagacctttcaaaatgttgaaagactgggaaaatacaaagcctcctgcccaactacagagcaaggttcaattcttaatcccctttgagaaggaaaagtcagcaacagcaccagattccacttaacaggcgcagagattacgattacatcttgtcttatctttgcagtgaatatctggaggttcaccagacggagctggacaagttgacagctcagttaaaagatatgaaaagaaactctcgcctggtaggtactatgcagtcattatgatgttaacactgttctttttagccaaatagcttcttttactggatggggctggggaggaatgtttgagaaaagcagatccaaggggcagagtactatctgcatcccccagtatgtcttagaaggaaaaagaagggtatgttttcttcttaatgcattctagttaatacttttcaatattttccaagcatgtttatgagatcattttttaaatgtatatcttcatgaaactttataatcaggaaaaaaatttttaatgtcctctaccaccctcctaaataatacaaggaaatgaaaagttgaagttttcctagcatattgttagtacatacagaatttgggtccaggcacggtagctcatgcttgttatcccaacactttgggaagccaaggcgggaggaacgcttgaggccaggagttcgagaccagcctgagcaacaaagtgagacccaccccccgtctgtgtttttaaaaaatataaaaaattaatataaataatttggaatctagaacttttactccaatttttaaaaaatataatcagtaaaatcagggagggaaaagaggctcaaaggagtaaccaccatgagaagttaagagttcttagaccagatcaagtacatattatgttgcaaatttcttctattctcatgaatctgtgaggacttgtgtgattgaagaggtggttctaatgtctacactattttaaatgattttgttcaactctacatattatacctcactgtttcaagaaatcagcccaagaaaactcaacatagtcctaggaggtgcagctagacattcatagctgctgtctttttcttttgtaggaaatgtgctcaaatgtatactgttgtccttttcaaaggcttagagattcaaggctttatcaatgttaaaaatttttatgttctactgatgttaggatataaattgcctgcatctatgtggaacccctgtgtcagggctttcagagctggtgaatgcgcttgaccatcctcagtggctgcaaatatctctcctggaaaacaacagtgaacaaatgcaggggcttctgccaagacctcatgttccgtaaaaatccttcaattagaggatatgaggatagtgcactgattatactatgatactatgagcacacaggaaatgagctggctttaaaaacaatttgagaaaagcttatcacagcctcaagaactcttcttaaggccgggcgtggtggctcacacctgtaatccccagcactttgggaggctgaggcgggtggatcacccaaggtcaggagttcaagaccagcttggccaacgtggcgagaccctgtctctactaaaaatacaaaaattagctgggcgtggtggtgggtgcctgtaatcccagctactcaggaggctgaggcaggagaatcgcttgaaccagggaggaggaagttgcggtgagccgagatcgtgccactgcactccagcctgggcaaaagagcgaaactctgtctcaaaaacaaaacaaaactcttcttaaatatcaattttatttgtttagacagcgaggcaggtattttttaacacatatgccactgctatgttttatattcgtaccatttattttaaattttttttaatgaccatgaatttacatgcccttcaataggtaggacgggagagctcaaagcaagtgaaaactttagagatcccaaggggcagggaggactgcatgcaatgctagaaacagactgtaaataaatgtcagctcttaaatgtactcttactggtatttaaaataacccaagtttttattcttttaaagcaaaataacccaagtttttattcttttaaagtaaaacatccagtagaattttgtagggatgatcattatttccacagataatgtgcaaatgtgggctaaatcattctgttaagatgggtaaccttttgaaggataatgtttaaatgcagatattcctttttttattgtagggtgtactgtatgacctagacaaggtaagttgccattccgtgttggggtgctaataagaaaaaaattctgcatccttgctgggcacggtggctcacgcctgtcatcccagcactttgggaggccgaggtgggtggatcacttgagcttaggagtttgagacctgcctgggcaatgtggcaaaatcccatctctaccaaaaaatgaaatacaaaacattatccaggcatggtagtgtgtgcctgtggtcccagctacccaggaggctgaggtgggaggatcacctgaagccaggaggtcgaggcagcagtgagccgtgattgcacccactgcactccagcctgggttgagagagcaaaaccctgtctcaaaaaataaaacaaaactctgcatctttgagaagtcaatgggagaccctcttagagacagtaaaatcctagagaactaatagttttttgaatcctggaaaaatgcatacttttgtctgatgaggataatgaacaagtactgtgatctatagattaaataaagtgtttaaggtcacttccattaaaatgccactgggttgtagtgtttttataagtttaagaacttcccaggcgtttggaggcctttacctgtgttgtctctgaatataaattactatacttcatcaaatctgagtcattgttgattagaaaatgcaccattatttcatgtgccatgaagagaaaaaaaggattccagttaaaatctgacagttgtttcattttacctaaaatttgcattttatagttatcaagaaaactgttaggtctgtttagacacagattttttttctctttctttttaaaaaaatttatatacggtgctgctccatgcctttctatgtgcacaataattttatttcaatgctgaatcatagtgtgttctttttgaagacattttaaaaggcaaataaatgcatataataataattacaactcaaagagatgacacatgaacaactatgattatctttgagcttgtacaggcagctgtctgccggtagcaattgtaaaatgcaccccaatttcaaagacactaaaatgtgaatgggaaaaaaaaccaatcttagaagacaaaatatattattatggagaaatttaaatatactccaatatgatactgttctgtcagaatctaatgacttccattggattggcctttcttcatgttaaacacaaggattccgataactaattcaagttcacatctcaaaatatttattcaatattaaaaaaataaatttccagggccgggcatggtggctcatatctgtaatcccagcactttgggaggccaaggcaggtggatcacctgagctcagaagttcaagaccagcctggtcaacatggagaaaccccatctctactaaatatacaaaaattagccaggcatggtggcgggcacctgtaatcccagctacttgggaggctgaggcaggagaatcgcttgaacccaggaggcaaaggttgcagtgagctcagattgtgccattgtgctctagcctgggcaacaagagcgaaacttcatctcaaaaaaaaaaaaaaaaatccaaattggtattagagaatctctaaaatagcttcaaagatagaaggaaaggggaaatatattggattttctaatacttttgagtatgatataatcaagatattctcacaagcctaagtcaattgaactataaatgactgtactttttcaaacttcttttaattccagcaaattaaaacaattgaaagatacatgagacgcctggagtttcatataagtaaggtaactgaaattcctgttctcattgcctgtttttcagttctgttgctaatcaaatacacctttgggctgagcgtagtatctagtgcgtggagaacttcctatccaattgactcctaagctgactagcaattacgtcatcaagtgggcactaaagatggaggaacaataagaatggaaggcctgatggcccagcacagttttgactctacctcagttccacaaacatttattaagtgctaagtaacaggcacagttacttccagcctcagtgtagagtgcttagagataaactatcaatcaaactagccctacaaaaaacttcatgtttgtctaactttacactctggttccacataacacttggtgccccgtaaacttcttcatgaaggccttataactaccaaaagaccgctgtctcagcgcctccctcaatctctctcaagcccttggctctttccactctccctcatatggcatggttttcaggtgccattttatcctctctcccctagatgtgcactactttgtcagtgtccctgacacccagccctgaaccccatagttcactggtggtccaatgaggctgactatcacccccttgttctgggcactatcaggagttattggtgccacctagaaaatatttacctttagaggcagctaaatcacaccattatcaattcctgtttgtctatatctatcagcctctcttccaagtggggagcctgggagttttagcagatctctctaagagtcagaagccctaggttctattcccagctctgccacctactcacttgctatgtcatctatgtgaatcttggctttctactctgtgaagtggagctggggaggtacacagatttgatctacatgatcctaagaatcctttctggtttaaaattctaggatgatttgtatgtatggatatacatgtatatgctactgccttcgtacattcttgctttgaaagatatttactacctaggcaaatctgaaattgctcctatttctgctaaactcaataaataaaacaatgacatccatcagaagttatttatgtggcaggcaagctttgacatattattgtttaattcaaaaaacagcaagaaaacaatcagtattaggtaagggtatatttatcaatcttgcatccatggttgttagatacaacaatcccaatggttttcaaaggtcagtggtactctttctgtttgcaatatcttatattcagatgcctaccaaattatatgtaattgaatgattcaattaatcagtttatttaatgagccactgctgactgataggtaagataaatgcttgcctacaaatggccttctgctaaggtgactacctaggtatactttatccaaaagtttaattccatttggctaggataggttgatatttaagcaaaaacaaagaataaactttctcactacacaaagtaatagattaagtcattatggctataccgatggtcctgtgggcactgtctccttattgaaaggataacaagctcagaaactttggcgtacccactagtaggggaaagggttgcaagggcagttccccagaagaccacatgggtgacatagcctgacctgcattggaagagatattagcacttgggtttctaaaagttttgtggggatctcccacatcagaacaatttgcaatgtttatttaaaatttcagattcctggcccagccctaacctactgaatcagcatctcagagtggggcctgggcatcagcattttaccaagctcaccagatgaggcttagctttaaagcacggaaaccacactctatgccaaccatcaaccaaaagatgtcatcagcagataggacactccttgagtcttatatctccctcttaatcaaagataaatccactgaccctgaagattaaagatgattcttttcagtttgggcattcttctcagcagagttgagtgcattgttgaagtaaatagcaacaaagaatcctttaatcaagagaataatttttagtctcttcatgtttgcattctaaactaagtgtcattgatatctgtgtagagaatgcaattatggaaaattgtaatcctcaaacaggttatagtaatgctttttagtgagcagccaaaagtttgccttcagaacaaaacgggactcttaaactctgaaatctagtatatgcatctccaccttcttctggatctatagttaagcttcctttttgaagaaacaaagttcatactgaaatgaaaattcaaatagtgctaggtaagtatgcctccccaaagcaacaggttttatttgcttttgacaatgcctgatggtattgttgtttgttatccgcctgaaaattcttgtagttaactgcagtcagttaaagatagtaccagacttatagagataaatatcattaggaataactttagaacaggttttttttttagctaagcacaatgatgtgcacctgtagtctcagctacttgggaggttaagaggatcacttgagcccagcagttagagaccagcctgagcaacatagcaagacctcatctcaaaaaaaaaaaaaaaaattttcaaccctagcactactggcatttggggataattctctattgcaggaagctgtcctctgcattataggatgtttagcagcatgcctggcctctacccactagatgccagtagacccctgggggtcaaaattgccttgggttgattgagaatcactgccttagaagaattagctgattatcaggcttatatgagtataaaatcaatagtcatttgaaaagggtatattgttattatttagaagcataagtgtagatgtgtagcaaaagaaaagttcatttatattgcttcaatttatttttttgtaattgtcacataatttacacgaaaaagagttgagttacttaagtgttcagtttgatatatttagcataattgtgttttaccctaatttaagannnnnnnnnnnnnnnnnnnnnnnnnnnnnnnnnnnnnnnnnnnnnnnnnnnnnnnnnnnnnnnnnnnnnnnnnnnnnnnnnnnnnnnnnnnnnnnnnnnnnnnnnnnnatattagcctaggatactacaaagttttcaccttggtatgaaattgtacaaaccctttcagtgtttgttctatatacagaaggctctcatcttccttatttaatagttacagtcttatttaatacttaattatttttattatttaatacttatttgtttaatacttatttaatacttacagaaagctctcatctttcttatttaatacttacagtccacccatgaacccacaaagtcacctgggagtcattttaaacaattccaatgatagcctcaaacaatgcaagagaggcacttcccttttgcataatttgaaaacaggattagagcaaaatctgttttgagacaaaatgtatcacagtggctacaataaaaacgattggtccctatctaaaaggataatacttctacaggattctctttgtagaggtcagaaatataaagtaaattaagcatgtaacaatgatctatgtattttctttcaagcctgacatttatttctgtttcctgttttgattctggcaggtagatgaactctatgaagcttattgtatccagcgacgcctccaggatggtgccagcaaaatgaagcaagccttcgcaacatcccctgccagcaaagctgcccgggagagtctgacagagatcaatcggagcttcaaggagtacacagaggtataactccctaacctgcttaagttgccgaatcccatctggcctggtgtgaattgttggtaattgccaagaacaaggcaaacagcaacccacaacctcattccaccctctagaaagataggttttactgttagcctaaaaagtatgcaagaaaggcaatcggtagaattgcttaaaatgaatgaataagctgggagtggtggcacgtgcctgtagtcctagttattcaagaggctgaggcaagagcattgcttgagcccaggagttcaaggctgcggtgagctacgatcgcgccactgcactccagcctgggtgacagagcgaggccacatctctaaaataaaataaaatgaatgcgtaaaccacattgccctgatttgtgtcatttaaacacacttctaaatattctagtgtaaatcgagcctagttttatccctggaagtggagcagaccctatggttcagatagctacactggatgtcagtgttggatcagtaaccctctgcctacaatgttttttttaattgtgagaaatttttatcataaaggagccaagattaagaaccatgaacagaagtgtgctttcctggtttccaactctctggggcccaagcatctgacatagagaggtcttcactcctcctggggtcacctaataccaatgtctttgatgaaatgactaaattattaaagcagcactcctcactatcccatgagtctttgttcagagatcagatttcatgaatgaagtcatcagcctgtagagggtctgttggacaattcccagagctgagcatctggttcagccctgggatcagaaggacagcttggatgactgtcagtaggatccctttgtgtgtacactcccgtgttgcctcttgtctaaaccaagtttctctctttatttgacttaaagcagggcttctttacctaagttcctcctttagaataatttttttattattttttgagagatagagtcttgctctgtcacacagggctggagtgcagtggcgcgatcttggctcactgcaatctctgcctcccgggttcaagtgattctcctgcctcagcttcccaagtacctctcctgcctcagcttcccaagtagctgggactacaggtgtgtgccaccacacccggctaatttttgtatttttagtagagacggagttttactatacgttggccaggctggtctcgaactcctgatctcaggtgatccactcgcctctgcctcccaaagtgctgggattacaggcatgagccactgagcccggcctagaataatgttttttaaatgcataaaataaaatacataggaattgaaaagaagaaaatatattgaaatacagttatttcaaaatcatcagtatagttttcaaaatatttcaaaagtcaaatatgtgacatagttctatgctgctgctttattaacacatcaaattataagatctagtagtggctctaataactactgaaacatcaaagtaatgaaaagtataaatgattttttaaaaagttatctgcaataaataatgtgacatgaacatatatgtgatttctatcagtgtcaaagtcacaggtatggctaatactgctgtggcttgttttctaccttcatcatacctaaacatgtttaatttcagttaaatgatagtgaaaataaagatctgactcttcccaccctcccccatcctactttgtagagctgcagattgaaaattcctggcctagaagcagtcctagttcacgagaccccatttctacagatctctgaaatgaggagagccgtttccaattataaaggatgtttataggacaaatgcagataactgaccagcagaatgcaggggctgcctttgttggcatatttgcaggtcatttcagacacagccacccttgatcaagtgccagggcatggcatcatgaccttgctcacaaattcaaagacatagagtgcaatttaaactgccttagagaagaaagaagtccaggacttctgtagcctcatacctcatttggtatcaggtggttttatatcctcatggccgggtgcagcggcttatacctgtaatcccagcactttgggaggccaagttgggaggttcacttgaggtcaggagttcaagactagcccagccaacatagcaaaaccccgtctctactaaaaatacaaaaattagccgggcgtggtggcgggcacctgtaatcccagctactcgtgaggctgaggcaggagaatcgcttgaacctgggaggcagaggttgcagtgagctgagacggcgccactacactccagcctgggtgacagatagagactctatctcaaaaaaacaaaaaagcaagaaagaaatacatcctcacataaccacaaaagccagcatgttattatgatgatggtttaaaatgaggatttaacaatgaggtcaaggtaggctcaggtgctttttcgtgtgcagcaatgttcatcagtggctgtgggtggtgggggggtgccagtggtcgggggaggaaaattttgaccatggatgtcctcaagtcttaacctagctgctctcacgtttttcagagatactggtagcaatcctgacatgcatgatagcatagttgatatgtctggaaactgtttcttcacagaagtgcccaatactctgaggaaataaattggtttataatactgaggctttgttttcaaggctttcaagctacgcagagctcagacttcaggaagttttccccagccttgctagctagttcaggtagtgagaatttacaagggaaaaagcaatgccattctctttgcatcccatgagagtgatcatttggagcagaacaacgaaacatagaagaatcagaacctctaggctgaggtcctcagcatacagaattcaaatggaagcaataccagcctgcactaatcaagctggccatgcttttgtcagtgaggccaccctcgaacccctagccttgtgggaggctggcaactgagggagaagcctgcagacatcaccctgcatcaagcttcaatggagactgctgcttagcatagcagaggcagcatccagattgtaagctggtcaagcagcagaagggcctccctggggatggcccatggccgcagcactttcccttttcatttctaactgcaattgttctatttaggtcctcaggtattgaggaagtagggtgaggctagttatgtatctaaccacatgcacagatggtgttactccttctctctatccttttccttcaacatcaaagagaagacccttgtcagacccaaaaataatttttggggcgctgtaggtttgcagtaggaagtctgccttactcacttgagcagaattcagcccttgtgctcttttggccccaaatttttaagaaaaatttcaaacctatagaaaaattgaaagacttgtacattgaacaccatatgcctttatctagatttaccaattggtaatatttggccatatttgctttccctctctctcatatgatcaaatccccctcaagtcatttgacagtaagtgatagacatcatgacatttcaccctatatgtattttaacctggatctctttttaaaatttatttgtaattggcaaataaaaactacatatttatggtatacaacatgatgttttgaagtgtgtatgcacagaaatatgtaatacaatggctaaatcaagccagggatctcttaatagtaacctatggaatatctacatttcctacataaccacataccattactacaaccaagaaaattgacaatcatcccatagaattatataacatattgtccattttcaagttttccctatttggatcaataatgtcttttataaatgttttgatttatttactttcaaatcaggatattatcaaggttaagttgttacatttggtgattatgtttgtctagtctctttatgtagaaattttttcccctatgatactgcctttttgtagaattcatgctaattcctatagactaccccacattctgaatgtgtctatttttgatataatctgacttgctcatctatgccctaaatttcctgtacactaaaaggtgggcttagactcagatcaaacattttgtcaagaatgtttcttaggctgtgctgtgtggagcaaacaggtaaatgcttctcgttgttcacgcagtggttgtgctgctgttcgaacgtcgtgtgctttgagctgttgggtgaaaggctagctctcatgatcgtctcctgtcctctttgcagaatatgtgcaccattgaagtggagctagagaatctgctgggagaattctccatcaagatgaaaggtattattttccttgtttagagagaataaggagccatctctgcagagtgcagagctccttgaagtttgagagcccatgctatttttattttccttgcaaagacgcagcgccacccactctcaacccaccccacttttgatagtttactgatgcttctcatcctgaggcttacctacacacacaaaaatattatgacagaatctcaaacatacacagaagtggagagaacattataatgagcccccataaacccatcacctagatgtaataattagcaagattttgccacatttgctccatctctttgcttttgtttttcctttgataaaagagaagtcctttgatgaaataaaacccagatatgtcagtctgctgctatacacttcagtatgcatctcttaaagcatggggctgtcatcttacataaccacgatgccaagtactgtcacgttttcacagctaacaaaaataataaaccctggttattaacccattccattatcagatttcccccgttgtctcaaaaatgccttgtacatttgattagttcaaattaggatcccaacaaggtccatgcattacaattggttgttaggtatatcttttagatttcctttaatctaaaacaaacctctccctccctttttttctacccttgacttgctgtagaaaccattgttgtacagaatgtcccacattctagcttgtctgttggcttctttggggtgatctttaaattcttcctttagctcctcatgtttctagcaaactaactatgaaattttgtaaatcttggtgttaaacccacagagaatttttcccctcccagtgcctttctggtatttattccagaaagttccaaactagacacattattgagttaaaccacagcatcttcagaacaaaaacgaagtctggttttagaaaatagagcattgctcaggtgttgtcagatttacggctcagtggccaggcatggctgtcaaatgagcggccatcacagcaagtcaatttctcttccaagttttggcccatctgactgcagtgaagagggctggtgcttatgcaattctgaggtttcttagcagcttgatccctgggttgctaatggggatttaatcaccttctttctactttctgcaattaagggagtaaagaaaggagacttttttttgaaagggctcgacaggagggcttcattttccaatgaatcatctaactcaggagggaaattattctgtcaagcactaggcactgacatgtaagagcctgtctgagaatacctggaatataaatgaccttgaccctcagcttcccaaatggctgcatgcttctcttccggcagatccggtagggaatcagtttagtattcagtgttaagtttcaacacttgctttgctactgagtctggcatctgtgcttttttccattttttaggtccattctctacatttttgggtcctcacttgagtcagtggttccaaaatcacgcaggtccatagtcccacgtgggccctggaatttttattttaactttgaggatgattctatcagcagcctgatcaattctggaaaataactgccctgaatcagtgtttagcagaaaaccttccctctacttcccccaactctcagacgccacccacacagactagcacagtcgcagagtctcgcagcctaacggtaattcaaatcatgcacatcacctatcactgctaatataaaaaagtactatatttctcctatttctgatgctcagtattatcaagtgcatctatttttggtgggatggtaatttcctgattttacagatgggaaataggggcctagagaggctaaatgacttgtcccaggagtcacacttaaattggagtcagacaagaaactgaattccagggttctttgttcctaatgcattcccacctctaactccatgttatgagggaagttcagagctgagcagacaatataaaccattgctcaaagaatggtctccctcacgggcagatcctctccaacctagcacagagacaccctaggagtgggatggggaggaaagggaccaccctcggaccagatctggagcttcaggcttggtgttcagggaggagatgatgctggagtccctgccacctactgggggacctggccaccccgctacatcgcagccctgatggactgatgaacttgctgttgctcctgctcctccatctcctcctctctctgttgttcttgctctcctgcctgatgttcctgagagtccacctgaacgcttggtttcttccatggggtttctcaggcctgagactaaatctccttcctcattgatagactcctgtctcctccactttcctcatctaacaggcaaactcagaaactacatctgtgaaggctttcaatggtaaacacccccatggaaatctttctcttcctccataaagagaaagggaaacctcatgctgccaagaaatcctattgtctttgcaattagctgctttctcatctgttactcattctggtaaaaactacttccaacatacatattgacaaacagactatttcacaatactctcagacctggcaaccactaacttcctcgtgccacacccttcctcacttccctttttgccccaaccccaacactagaaaacaaccttttggggtagtgacattaaagataatagagcaagtacttactgagtgcctgctattggccaggcacttgactgcattctgatgactgctccctggccttgagttccacatggtctaccagagaaaacagacatatgaggctgtgcattctcattcaatggaacaaatgaccacctgaacaacagtgtgacccagtttgctgcaaaagcaggaggggagaggaggaaaaggttgccactcacctctctagttggggagaggagcaggaaagaggaaggcatcccagtgtaatgtatggtgaacagcaccagaatagcattcaccaaacagaggaaagcctgttcagaggtgacaagtagaccggtgtggctgacgtgattgttcggagaagagctatggagaattagttgggtcctgactataaaaatccatgaatgccaggctaaacggagagcacttaatctgcaaactatcaaacaggatggaggtaaagggatgtagttccttagagcaaactagttctccaaattattactttgttcaaattaagttccaggcagtgcatatatcctggtccttacagtttccagggcaggtcaaccttcctcagaaggaagaaccaccattgagctagtaaacttgcattatttatgcctggtcaatagatcagtaacacctgtaataggagctcctgactgtatagctacttggttgtcttaaagtaggaagtgtgactcttggaaggaaagatcatcatagaactgggaaaaatgatgtagagcgttcttctggcagaatggtgtctgagcaaaggaaggcaggcaagagtaggcagctgctgtaacaccctccaaacgaggctgtggaggaggtgttagatcagtaatatgtgagcgccgtgaaacatccaaaggtatgacccctgcaagcccccagtgcgcatcctcagaggtaacccccatgatggttttttgagtgaaagctagaaagctttcattaagctttctagatcatgcactggtaatcacaaactgtcaagaacacttgcagctttctccaactgtgaaaatgccagcaggcccccagacaagagcctgtaagaaacctggccaggcctcaaagacagactgtaactgtcattgccccactgttagtgctaattccgtggccagtaccaccagtggcttacacagcagatagaactttaagaagcacggcacaaaagctgtttgtgcctggatagtgccattgtgctacattattgctacaatcagaggatcagtgatgccactacagcagttccaagaaattttgacttagtaacatgggctgagaagtgaaaaaaacatcactaccaagtacctttctcacattgttttcttcagatataaaatttctggtaattttaaaggggggggaaaaacaccttcaaaggatttcccctttattcacctttatctagtaacaatgtcagatcagtttcttttcaaccagtcttccattgtaattacataaacaggcaatagattaatcctgaactaatttgcagaggttttgttttgtttttgagacagagtctcgctgtgtcacccaggctgcagtgcagtggcactatctctgttcactgcaacctccgcctcctgggttcaagcgattctcatgcctcagcctccggagtagctgggattacagatgcccaccatcgcacccggctaatttttgtatttttagtagagacagagtttctccatgttagccaggctggtcacgaactcctgacctcaggtgatccgcccacctcggcctcccaaagtactgggattacaggtgtgagccaccgtgcctgaccaatttgcagaggtttttaaagagcactttggattttattagaattagcatgtccagtttaggatttacaaaaacaagtcgattatactttctttcagaagtattttttttaaagactaactaaatgctgcagaaaattattagtagaatgcaggcttctttaattctgctcttatttcagtaagtctttttaagtgggttgttgtgttctaattattattgaaagctgtttttaaatgtgctggctccacgggcaggaaggcacggacgagctggtgagtttctgccacctactgacaagtgatggtaacagcacatgcttctttttttaagcatccggggaccttttttgctgtcagcttacccacgcaacgtttatcagtcaggtgaaagtagaagcgttcatttaagactctcaacttactgggttttttgctttgttttgttttttgagtcgagggtctcgctctgtcacacaggctggagttcagtggctcacggccgcctgaaactcctaacctcaagcaatcctcctgcctcaacctcctgagtaactgggaccacgggcgcacgccaccatgactggctaatttttaaatttttcgtagagatagggtctcactgtgttgcccaggttggtctcaaactcctgggctcaagtgatcctactgccttggcctcccagagcacaggatcacaggtgtgagccaccatgcctggccaagagtctccagcgtactaacagggctatttgtagaaggcaaaacacattgtgtgataccatccacagcatctttatatgggtaaaatcacgttggaaataaatataaaagcaacccagagcacaaaggttataaatagcaactcaaggaggctgaagtaccaagggaacccatttgtcatatggatgtctttgtgtgggaacagcctaggactaacagctgtttctggaccagctcatcaaaattatttcctcggcagtgcctctaaaaaattactgggtaaacaggggaggaattgttcgtgtcttcttcaatctctatttaaacactttgaaagtagtaacttctttttttaaaacattgagaaatataacaaaaaaaaaataaagtcatatataatcattccacccagtgctaagttttgttaaaattattaaaatatccaaccaacttttctgtgtatacacactccctgccaaggtatgtgatcttttttacatcttttttctgtattacaaaataagtatatcatctttttataaatcaaataaaaattaccacttattgacaaaaatttaattttctccttaattctaccctaccagagataattatttttaacagtttggtatggttttctagacttttttccctggggatccatttatatatggctgaggttatactctatgtaaggttttgtgtccttccttttttttttttttttttttttgagacggagtttcaccgttgccaggctgaagtgcagtggcatgatctcggctcactgcaacccccgcctcccaggttcaagcgattctcctgcctcagcctcccgagtagctgggattacaggtacccgacaccacacccggctaattttgtatttttagtagagatagggtttcaccatgttggccaggatggcctggaactcctgacctcaggtgatctgcccacctcagcctcctaaagtgctgggattacaggtgtgagccaccacgtccagcctgtactgaattcttaactggaaatctcataaaactttattttttttccttcaaaaaatttttaaaggatgaagatttttacctatttttatgaaattattttggttccttcaataaaacttttagtctttaggccccaaggaatgtaaagtgctttgctttgtgattggcaggaaaacaacagctgactaaagccagaaacaactgattaaagtaaagctgggtcactgacaagcctctgttgatgagattagtttcctcatttgctatgcacatgtgactagcatgccttcgtccccacacgtttattcatgcttgacacagtagacatccaagaaacattgtcgaatgcacacatgccattcactcagcctggaagtatctgtacacccatgtcttcattttactgtggtgaaactctgttattcaaatgctactttcctccatgaaactattctacattaaataagatagtctctcttttttcattttaattatatagtaatacattctcataaaaatacagaaaaaagcaaagatctccttctgtctctccactgctgtttgcctccctgatgcatatcaatttactgtgtgttttctttcttttttttttttttttctttttcagacatagtctcactctgttacccaggctggagtgcagtggtgtaatcacggttcactatagcctagacctcctgggctcaagcgatcctcccacctcagcctctgagcagctgggactacaggcatgcaccaccacacttggctaatttttttttttctttttagtagagatgaggtctcactatgttgcccaggcttgtcttgaactcctgagctcaagtcatcctcctgccttggcctcccaaagtgctaggattataggcgtgagccaccatgccagccttgtgtcttttcatatagattacgtctttcattaaatagtggatggcatgtactcaataaatagtattatcccactcttggatatattgtcattaccatgtattaacgacctactatgtgttagatgccgtccattgtccttacaaacaattctatgaagtggacactgttaccctattttaaaggtgaagaaacttgggttaagtaaattttctagagtaggatagccagtagacaaacaaattaacctcaggtgtaactccatcttactgccttcaagtccttgtctgtttcatttctgtgggctttaactgtattttgttctatatcatgggtatccataaaatctttaatttccaaattattaccccgatgcctagcatagacccttacatatagctggctctcagtaaatatctacaaaaagaaagaaaaagactggacaaacccagagttcctgagatggcctcggatggtggccatctagtctgataagatttgtttttgctgctgcaccagagagagatctcgaatcgagcagatccagttagacatgacttgctggatggcacagtagaagaaaagtccagtctttcttttgggggtgtatcatttggttggttggattgattttgttttcttaatcactagctttatgtaagtaataatccattttcagggattttataacagcaaattgtatcattacaccagataaaaaggataaagaaaacatcagaatgagtaaattggggggcagcaagggaaataactgcatggaatcttaactcaaatgggaggcacttaaaaatcacacattttaggacagaaagaaaaataggagaccagattatcttcatgggaatatgttggataaataaataaatctatctttctggccctaataccctaaccctagaatccacttggatcttaaatcagcccaagatattctgagctctagctcccctccttgcccagcctcccctgccttggagaccacctcttccatcacttcatccaggaatgtcttctttacctgtgatagaaggaactcccccaaaaacagctgttccccaggaatggccccaaaaagtgttatgtgagtttgcacaaagttctgacacttcacttgaattctttttaacgtgccagtatgtgtctatagagaggggaaatatgttctacacctcaccttccaatttcttggttacaggtctggctggctttgcacgcctctgtcctggagatcaatatgaagtaagtattgtcttggtctaggtgctggaattatggacctgaagggtaggggccagttgtcatgtcattattttgcttttcaagttgtcttttttttttttaatttttaattttgaaaaacattttaagccaatgagaaagtctggaaactggtacaggattcccataaacctttcatctagattcaccactttgtaacattatgccacatttgctctgtcatcatcatcattattgctgtcattgttactattattttgctgaaccattttatttatttatttatttacttacttatttattttttattttgagatggagtctcgctctgttgcccaggctggagtgcagtggcatgatctcagctcactgcaacctctgccacctggattcaagcgattctcctgcctcggcctctggagtagctgggactacaggtgtgcaccaccacagccggctaatttttttgtgtttttagtagagatggggtttcaccatgttggccaggctggtcttgaactcctgacctcaagtgattcccccccgcccacccttcggcctcccaaagtgctgggattacaggtgtgagccaccacatccagcccctgaaccattttagagcaagatgcaaacaccaggactcttcatccctaaattcttctaagaatggaaagacattctgtcacataggcattactaagccctcaacaccagtgagtttataacactggctcttcagctaacgtcacctggaattagtctatgttcatattttgccaggtgtcccaatattgtactaggtaagcaggtttttttttttttttcctgatccaagggccaatccaggatcatggctgatcataagtaccatgactgaagaaaaataacatccagatctttctttgtaaaaatgtgctccaaaaagtaaaaatagcctttgttattttccctcttcaaaaggaaacttatataaccatttcatctaacatctcctccaaaaccctctatactcatacctcttagcagggggtgagggtgtatcttcccttaaacattaaagcagtctgaccaaggagatattgcacaccttcccccaagagtatgttggatttcaaagtccttgccagctccatctctctatccagagtaaggatgtctttatttcttgcttctgactgctaagggggttttagctgatacttcctcatctcactaaaggagctgggttgtgtggctgctctattgaagtagaactaacaagagagagaactgcttggcatgagtgagcagaagggcacagtgcaatgaccttttactacagaaaacctgtaccctccctgtctcaggcaggcagaacttactgtgctttaaaagtctcgggccaggcacagtggcttatgtctgtaatcctagcactttgggaggctgaggcgggcagatgacctgaggtcaggagtttgagaccagcctagccaacatggtgaaaccccgtcttactaaaaatacagaaattagccgggcatggtggcacatgcctgtagtcccagctacttgggaggctgaggcaggggaatcgcttgaaccctggaggcggaggttgcagcgagccaagatcacaccattgcactccagcctgagtgacagagcgagactccaactcaaaaaaaaaaaaaaagtctcctccccactcatccccagctccattcacacccaagagtaagggggtggagggagagtaagggagaagcggagggcagcagtggctttaggtctttctccttttgatcttggtgttctggtggagaagagggggtggcaagacatgaaggcccttggatgtctcctctccagattttcatgaagtatggccggcagcggtggaaactgaaaggcaaaatagaagtaaatggcaagcagagctgggatggagaagaaacagtttttctgcccctgatagttgggttcatctccatcaaggtacagtattgtcattgcctgttgtctttcctggtgccacggctggatgatccattggtggggcccttacccgtgacccctgcctgttgcccctccatcccacagacttctctgcacaagtctattacaaagacagctgccctctcatcagagtaagtaaagtcaatctaagatacacttttgaaatatccacctctggccaggcgtagtgtagtggctcacgcctgtaatcccagcactttgggaggctgaggtgggtggatcacttgagcccaggaggtcgagaccagcctggccaacatggcaaaacgccgtctctacaaaagtacaaaaattagccagacgtggtccgtgtgcctgtagtcccagctacttgggagtctgaggtgggaggatcacttgagcccaggaggtcaaggctgcaattagccatgatcacactactgcactatagcctgggtgacagagagagaccctgtctccaaaaaaaaaaaaaaaaagaaaaagaaaaatgaaaatccgcttctgatttcagatatgattctgaaagaaatgaccaacctagctcagtaaaaaaaatgacacattattctacctttctcctctgctgtgatgtaaggcctattctctcccactctctctgctaggtcacggagctcaaagggctagcaactcacatcctggtaggtagcgtgacctgtgagaccaaagagctgtttgcagcccgacctcaggtagtggctgtcgacatcaatgaccttggtaccatcaaactgaacctggaaatcacctggtagtaagtgcctcttcctttatttcatcatatagaaatatctgataccggctagtgctactcaaagctggtgcatggaccatccgcatcaccagggagcttgttatgaaaagcagaatctcgggccccaccccaggactactgtgtcagaattgctcaggccccagaatctgtttaacaaactccccgggtaaggtgcacgcgtgttaaagttggagaagcctgggtcatgtcaccaatctcctcttctacttcctattttaaaatattttttctgtcaccttccttccctctctacctttaaatatataagggcatatgtcctctcaagtaaactaatttgaaagaaaatatctgtccaataggaggtactttgacctcagaaaaatcctgattctcacggatgcttattcctctttatcgcataacttcacactgctctggaaaattatgagtatccttagttcctctgcactgtatttactgaaatagaatatccccaaagggcaagagatatcttttttcaaagcaatgaacttagaaatcgttttccaaattcacccggtgagaaaggtcatgataagttattaacactagcagctccaggtgcggtggctcacacctgtaatcccagcactttgggaggccaaggcaggtggatcagctgaggtcaggagtttgagaccagcctggccaacatggtgaaaccccatctttactaaaaatacaaaaattagctgggcattgtggcaggcacctgtaatgccagctactcgggaggctaaggcaagagaatcacttgaatccgggaggcagaggttgcagtgagctgagatcgtgccattgcactccagcctgggcaacaagagcaaaactccatctccaaaaaaacaaaaaccactagtagttcacaacatttaatgtaatgcccccggtatattgccaagtaaatatgacatgttgagtattcatgctcagggtctcatttacaatatggaaagccaggtgtagaagcagcaaagacactcttgctttgtcatcatcagcatgctttgctcagcccttccctccccacaatctgcagtcattgatgtctcacatgcaagatcattcttcttgctggatgaatcgggtgccatgatgttaagtggcatcattgtgaacagactgttattctcttcccacacaagaggctctgtgtcaactgaaatgaatgggattctatttttgagtgttttctttagaatggaacaatagtctgtcgatgtcttataccattaaggtatctagccccgcaaagttcagataatttttatagacttttcaacatcttgttttgtcgaagcaagcattcataaatttgtgtttctaatgttaatgaggaacgggtgtatctaagtgtatagctaaattgtgcttagagctgtgataatattctggggtcccttgggtgagtctagactcagttttctgctccacttttcttttatccaggtttattttctgcaaagcagtttagctaaaaccagcccagttctgaacctctggttgagtttacctttatataatgaggtactctcttagcctgtggtctgttgatgataggtgattttgccaaatgtgcatacctggggacctgttgttttgcagtccatttgacgtggaggacatgaccgcatcctcaggcgctgggaacaaggcagcagcccttcagaggagaatgtccatgtacagccagggtaccccggaaacgcccaccttcaaagaccactccttctttgtaagttcagtgtaatttcccgagtagaatcaatgcacctgagccagtgcttgcacccagcatttgaaatgcttaagagacagtgctgggagttagtaattctatcagaggtggtgagcctcctctgtttttcctctctccttgcccaccttacctattgctgtgatggtaacatgtagatttttctgaacattctctaagatcagccttttaaagaagtgcatataaataatagcctccttgttttaatcaaaaatgcttgctaaaaagctaacaaaatgtagtaacctgattcttcccactaactcccccatcttgctttcacttctgaagaggtggctgcatccttccccagacaagcccaggcggctgtctgtcttgagtgccttgcaagacactttctttgccaagctgcaccgcagccgctccttcagtgacctgccctccctcaggccgagtcccaaggccgtgctagagctctatgtgagtgtggcctgcccgggtatggagtgcttgacttctggggcttgtggcatgtgtgacttagcatgtctcttgttttatcttctctgtcttgctcactgggtatggttacagctgtactgtccttggggcgggacacttggtcgtgcatgtaactttgatagagacgcagtttgtccttctcttctaatgatccctgtttttgtgctgtgatttttctccattgtggcaaagatatccatggtaacaagattttaaacaagtttaagcctttcaaaaactggcattcggcccagcatggtggctcacgcctgtaatcccagcactttgggaggctgaggtgggtggatcgcttgagctcaggcattcaagaccagcctggccaacatggtcaaaccctgcctctactaaaaaatacaaaaattagccaggaatggaggcatgtgcatgtagtcccagctacttgggaggctgaggtgagaggatcacttgaacccaggaggcagaggttgcagttagccaagatggtgccattgcactccagcctgggcagcagcaaactccatctcaaaaacaaacaaacaaaaaattggcatcaaggaactcannnnnnnnnnnnnnnnnnnnnnnnnnnnnnnnnnnnnnnnnnnnnnnnnnnnnnnnnnnnnnnnnnnnnnnnnnnnnnnnnnnnnnnnnnnnnnnnnnnnnnnnnnnnnnnnnnnnnnnnnnnnnnnnnnnnnnnnnnnnnnnnnnnnnnnnnnnnnnnnnnnnnnnnnnnnnnnnnnnnnnnnnnnnnnnnnnnnnnnnnnnnnnnnnnnnnnnnnnnnnnnnnnnnnnnnnnnnnnnnnnnnnnnnnnnnnnnnnnnnnnnnnnnnnnnnnnnnnnnnnnnnnnnnnnnnnnnnnnnnnnnnnnnnnnnnnnnnnnnnnnnnnnnnnnnnnnnnnnnnnnnnnnnnnnnnnnnnnnnnnnnnnnnnnnnnnnnnnnnnnnnnnnnnnnnnnnnnnnnnnnnnnnnnnnnnnnnnnnnnnnnnnnnnnnnnnnnnnnnnnnnnnnnnnnnnnnnnnnnnnnnnnnnnnnnnnnnnnnnnnnnnnnnnnnnnnnnnnnnnnnnnnnnnnnnnnnnnnnnnnnnnnnnnnnnnnnnnnnnnnnnnnnnnnnnnnnnnnnnnnnnnnnnnnnnnnnnnnnnnnnnnnnnnnnnnnnnnnnnnnnnnnnnnnnnnnnnnnnnnnnnnnnnnnnnnnnnnnnnnnnnnnnnnnnnnnnnnnnnnnnnnnnnnnnnnnnnnnnnnnnnnnnnnnnnnnnnnnnnnnnnnnnnnnnnnnnnnnnnnnnnnnnnnnnnnnnnnnnnnnnnnnnnnnnnnnnnnnnnnnnnnnnnnnnnnnnnnnnnnnnnnnnnnnnnnnnnnnnnnnnnnnnnnnnnnnnnnnnnnnnnnnnnnnnnnnnnnnnnnnnnnnnnnnnnnnnnnnnnnnnnnnnnnnnnnnnnnnnnnnnnnnnnnnnnnnnnnnnnnnnnnnnnnnnnnnnnnnnnnnnnnnnnnnnnnnnnnnnnnnnnnnnnnnnnnnnnnnnnnnnnnnnnnnnnnnnnnnnnnnnnnnnnnnnnnnnnnnnnnnnnnnnnnnnnnnnnnnnnnnnnnnnnnnnnnnnnnnnnnnnnnnnnnnnnnnnnnnnnnnnnnnntccctcattggggcccttccctcatgatgtcatccctcagttatagcgtgtacaccattgtactgttgtgtgcttgttgttagacttgtccccttggtagactgcaagtccccttgggcagggcatctcaatttattctcactcaatatttgccacttaagtaggtggaaattgagcttgagtcttggagtctcaagacaaatggctgggaaggactttggaatttgaataagaatcctgactacccaatctccctgccatacccagtgtctcccacctccctctgtgctgccatgagatgtgtgcacagatcagacaaagctgagtggaaccacatggagggcccatgggttctagaagcctaaggaacccccatggatgaggtctagggagaaggctccaggcatccttcatccctcccctaaaagattccttttatctttcctagagacataaggtgtatatgaggtggggggtgcaaatacgggagggaagaaactgaaatacacaagcttggaggggaggaagaggagcaccagagcccaccacaccaacaacattgtggaccacagttcaataatcactaatagagtaaaacatcctcagtttgggaggtaaagagacagagcttgtagaggttactcaagtgtccagtgacacatcatttcactcgtcctgtggttaaagtaagtcaccttccaaccatgctacaacggacagtttgggtgcaacgaactgcatgtgtcgggatctagtggcctcagatacagcagcaatgggaccagggacccagctggaggaggaaggggagcctttgtcttcccttctgctcttcactgcatttgctgtaatgtttttatttgccgggcttattcccagcaaattttgagaatttgtcagtttctatataattaaaacaattattagcatgatacttaccatttatttactttaaaaactgaatctgggatctaagaaaaattaaccattttgggccaggcgcggtggctcacgcctgtaatcccagcactttgggaggctgaggcaggcggatcacctgaggtcaggagtttgagaccaccctgaccaacatggcgaaatcctgtctcactacaaagaaaatacaaaaattagctgggggcgtggtggcgcatgcctgtaatcctagctacttgggaggctgaggcaggagaatcacttgaactcaggaggccgaggttgcagtgagctgagatcgcaccattgccctccagcctgggcaacaaaagggaaactctgtctcaaaaaaaaaaaaaagaaaaattaaccattttgaaggggttaatctcagtaactcaaaagccctttccacagagcagcatttggcatttaggcattatacacagaccacagcacaagagagctgacttcaaaatagaaatgcctgaataaatgaatgatcttggttacctggatatttctggcctctctcttcagagttctgcttcatgaagcacagggcgtacctgtgacaccacccaggtctgcttgacagatgacttggtgtttctaggcagcctgagagccctggggtttgcctcctgcaagattgatgttccatttattagtcttttccttttatttctagagaagctatgcaaatgtatggctggccttgaattatttatggtgtggttactaaattaataaaacattttccagagcttgggatttgtgggcagagattttcaaaaaaataatttttgagaattgaagcagaacaaaacatcacaactttggaactaaattgcatggatgttggaaagttttttaagatagatgcctaaatagaaaaagaaattggtaatgttattcataactatggctgccaaatattatgagctcttggaattcagaaaacaagccccctccccccatgcaaccttttcttttgaaaaatgtcaaaccttgaaactattgccatgaactttcacctagattcaacaatagaaacagtccttgatggtctgttttcttttgccagatacacacacacacacacacacacacacacacacacacacacacggcatcaacaaataaaatgctaacattctgaaagttctgggttttttcattgtaattgccttatattctgtctggaaataaaccatgccaagccaaatgcatcatttgtattgaaaataataatgaggtatcttttatctatagtcaaatctacctgatgacatctttgaaaatggaaaggcagccgaggagaaaatgccactgtcgctcagcttcagtgacctgcccaacggggactgcgccctcacctcccactcaacaggctccccttccaactcaacaaatccagaaattaccatcacccctgcggagtttaacctcagcagcttggcctcccagaatgagggtatggatgacaccagctcagcatcttccaggaactccctgggagaaggccaagagccaaagtcacacctgaaggaggaagacccagaggagcccagaaaacctgcctcggccccatctgaggcttgccgccgacagtcctcaggtgctggggctgagcacctgttccttgagaatgatgttgcagaagcacttctgcaagagtctgaggaggcctctgagctcaagcctgtggaactggacacttcggaaggaaacatcacaaagcagctggtcaagaggctcacatctgcagaggtgccaatggccacagacaggctgctctctgagggttctgttggtggagaatctgaaggctgcagatcctttctagatggaagcttagaggatgcttttaatgggcttttacttgcattagaaccacataaagagcagtataaagagtttcaggatctgaaccaagaagtcatgaatttggatgatattctaaaagtaagtaccttttcagagaaattggattaggtttggagagaggtgtcctaagccaacattctatttaagatgaggtatcatttaaaaaaaaaatcctgtccaatcacaggattaatagctcatcatcattttaaatggcactaatatgccagtagtgcatattaagttttattttccaaacaacagatcaacttatctaaattgattaggatttaaacaaagagctctagagaatgttgaaattcccccagtccccaagttaatcattttaatcccatatgtgaagtagaggcactttgatgattacagtctcacaggcgttactggataggatccctctcagggggtcgggaaagcagggagccctttgcctggttggagtcagagttatccgtcccattgtgagagccatgagccactgcctgctggaggagactacctgctctcacaattggtccaaataaccaagtcagaatctcagattaatcatcagcaaaataatcatccattctactctagagcgggagatctacagactctccagggataccctcaatccatagggatcagacagcccaggatggaggtgggagggtaagatgagaaggatgatttcctcgcaggcgggaggtcctgataatgagatcattattgctgcatcagaatgtatctgtctccacctgcatacagattaattttttaaaaaacactgcacaagaagacagatttgaattgttgtcccaaatctcactgctacttcttgtattctttgctgctctgatttatattgtcatataaaagaaaagagaactcagatcctttttcttaaaagagcagttctttggggacctggtctgtaaaaaggcttgaaagtaaggttgcaggggcaagccgagaaccaacccacagaaagctgttgcatccctttctaagactgttttcctggctgggcatggtggctcacacctgtaatcccagcatgttggaaggccaaggcgggcagatgacttgagcccaggagttagagaccagaccgggcaacatgatgaaatcccatctctacaaaaaatacaaaaattagctgggcatggtggcacacacctgtagtcccaactactagggaggctgaggtggaagaatcgcttgagccaaggaggcagaggttgtagtgagccgagatcacgtcactgcactccagcctgggtgaaaaagtgagaccctgtctcaaaaaaaaaaaaaaaaatatggtgattgtttttatatgtagcctgcccagtggcatctgaaactacatttccaaggctttttgaccatcttatccttctctactcagtcttgctgacctaactctgtaggagatttgtgccccaggcagatgataattcaggtcctgactctccaggtcctcaaatgctcatgacagatagttcagttgatggcatagcctccgagaaacagaagggcactctgaatctactttctgtaaaatatcagttcaaaaccatcagctcagggcttgtatatgcaggctgcttgtctggtattctactaaacacctatcttttctgcaaagttgaccagctttgctttgtgggcaaaaggtattcatttcaaagagctaagacacaaattgatgccatctaaagtgaattccttagagaaatccagtagtgatagcagctcccattccaggcatctagggtgatggtaagtagctcaatccacaggaaacactaagcattattaaaaactggtgatcagagacttctttccagagtattatttcagtctgctgttgttccaaaattgtcctgctactaaaatcctcaactgcccctttctttgtcatgaccaatatttaaacacatctgtactgtacaagataaaattgtgcagacaccttgcttaggaaaaaagaccctagaagtaggtgaagtcaagaccgactccctgtctccccctgagactgctgaaaacatcactagtgagtgtgtttaggtctggggcaaatggctttgtatccagccagaattaaagcatcagctggacaaagctttctcttttctccctccttcacattcctaggatgctaaacaccttgacgatcagaaactaaatggtgctgcctcttggacggagatcactgagggtgaatgagacaactgtgatttaaaagaccgaaagacgttttcccatgtgcttttgtgccatcttgagtgtcagagacagatccctgcaaggcccttcctaccttgcgctaagaaatcagcaaggagtgtcacctaactggatggaggacatttagtgcttctaacttgcagaatttgtcccattcgacccaccccagcatcctcttgaatatttggaaatacttctctccaactctgtgcccatagcaactggcattgttttgcttgtaatgtttctgcatgtggccagcattatagaatgctccaggccagagaatgggattgctcccatgatgccagggcctggtcagggaagtggtgggacttgttccctttgaggcagagctccagaggaagcagggctgcttcttgtcatgcccaaggcattcattctttcctcagtcctcagaggaaaaattatatgctgtgagcaggtgcggtggctcatgcctgtaatcccaacactttgggaagcccaggattgctggagcccaagagttcaagaccggtatggtcaacatagggagaccctgtctctgcaataaaagaaaaaaattagcctggtgtggtggcacatgcctgtggtctcagctacctgggaggctaaggtgagaggattgcttaagcccgggagattgaggctgcagtgagcctgtgatcacaccactgcactccagcctgagtgacagagcaagaccttgtttcaaaaaaaaaaaaaaaaaaaaaaaaaaaaaaaaaaaagatgcagggcttcttacctagggaacatgggctaggtgaatttgaaccacttcnnnnnnnnnnnnnnnnnnnnttgaggctgcagtgagctgtgatcacaccactgcactccagcctgagtgacagagcaagaccttgtctcaaaaaaaaaaaaaaaaaaaaaagatgcagggcttcttacctagggaacatgggctaggtgaatttgaaccacttcctgtttctgggatttgttttgttagtcctttagagcagatgccttagatagctagcgccttttgtaaaacaccgaagacattgccacttggaattagagattggtcagtattcagcattgactcactgacttaaaatttgtctgcttgtggtattttattttggggtgagcactaggcagagggatatagcagttctgtttcccaaggctttgtggttgacatggttttgttttttgttttttttgttttttttcaactttttgttataaaaatttcaaacagaagtagagaagatcctctaatggatcccagtgtgcccatccctcaacctcctcagtgatcaactcatggccaatcttgtttcctattcttcaacctgctgacttccctctggattcttctgcaaccagtcccagatattgtgccattttatccatggttgtacttcttttttggatataaagatttttaaatgcattttttaaatgctaacaaaaaataaaaacttgaaacaaaaaaaaaagtgtggcatctccaattgagcatcgtgtgtctggtttctctttccggatatgttgatgttctccctggtgccttctgcctttacagtgcaagccagcagtaagccgcagcaggtcttccagtttaagtctcacagttgaaagtgctttagaaagctttgatttcctgaacacctctgattttgacgaggaggaggatggtgatgaggtttgtaatgttggcggaggtgctgactcagtattttcagacactgagactgagaaacacaggtaagtctgaagttagtgtctccttatatttctcctgtcacagctgatacagtagttctttgttactgtcagaggggacctggtacacatttccaggaagataaaactctccacatgagtgaccagttggcttacagttcctttttattgtcaagtgcaataaaagggtcaatattattcacctcttttgggttgcttaagggaaaataaatatctttatatttcctctttataaatagagaggaaaattttgtatgagagtgttttatacaagtacatgtgtacacatttttttttaagacgtagtcttgctctgtcacccaggctggagtgcagtggtgcgatctcagctcaccacaacctccacctcccaggttcaagcgattctcctgcctcagcttccggagtagctgggactacaggcacccgccaccacacctggctaatttttgtatttttttagtagagacggggtttcaccatgttggccaagctggtcttgaactcctgacctcaggtgatccacccgcctcagcctcccaaagtgctgggattgcaggtgtgagccactatgcccagccctcacatgtgtcttatagggttcagtgtctacaacttgaccccatgtaattaattccaaattaactaggtatacacatttctgaagaactcttactggatgacaaatttgggcctggttctccctggcttgcactttacttccactgcctttgttttgttgtgcttccctttcccaacccttcatgtttccttcaacccagtgagtctttgccagagattgagttcatcaaggcacgcatccaagtcaagtttaagtcccatggtgcatatttcttgtagaatgtaagaggggatgaccaatgactgccactggtactgcatgtctctaggtggagaatgtgaccttctctggaagcaacagatgaaggtgaaacattgtcaccttcaccgtccggtgtcctcatgcagccaaatcatgttttgagaactagagcctggggtccaaatttataactacatataaagcaaaataagcacaatggaacatacccacctccatcaattgctgtgaaagaaaacacactttcccaaaatgggggtggattgcccgctcatctttaccttggcacaatatgacgtaaatgggttttcaagttacagcaagctatgatttcaaccttcacaaatctccctgaaagatgctagtttttgtttgttgttgtccctgaagggtttcctttttcaaaataaaaccaggaaaaaaaaaaacatgagaacttgaatttaccccataagcaatctggggacatggcaaagaaaatttattaaatgaatgtaatgtttaaattatcctacatttggccaggcatgatggctcatgcctataatcccagcactttgggaagccaaggccagaggactgcttgaactcagtagttcaagaccagcctgggaaacatggcaaaatgccatctctactaaaaatacaaaagttagttgggtgtggtggtgcacacctgtagtcccagctatgcgggaggctgaggtgggaggattgcttgaacccaggatgtcaaggtgagctgagattgtaccacagcactccagcctgggcaacagagcgagaccttctctcaaataaataaataaggccgggagtggtggctcactcctgtaatcccagcactttgggaagctggagggtgaatcacttgaggtcagagttcgagaccagcctgatcaacatggtgaaaccccgtctctactaaaaatacaaaaattagccaggcatggtggtgtacgcctgtagtcctagttactcaggaggctgaggtgggagaatggcttgaacctgggaggtggaggttgcagtgagttgagatcgagccactgcactcccaaacctgggtggcagtgcgagactccgtctcaaaaaaaataataaaaataaattgttctgccttaatattttttagcttgatagaatttgtgaaatacttcttatccaaaaatttttctgcatacttgttaccttaagctgttacaggatgtagcaaagtcaggcatcaatctaaactttttttcttcttgctataagaaacattttaacaaaaaaatatcacaagcacaggttttataaatgttatacatcattgatattaaatatgtctaatttgatcaatcttattatatgtcatcagaagtattagggaagagagagagacagagagagagagagtgtgtgtgtgtgtgtgtgtattttaaatatgtattggctgctatgtgtggactgcccagacacaaactgagtgttttccccttggagtcaaatgtgaatcagaatcagaataaagcattcaaagcctctaagctctggtgctaatctttttaaattgtggacaccagagagtgtgaggctagaagcccaaatcttccctgtcccgtctagctgtgtgaaccaggacactcaaaatctctgctaatcatgtgaaacaagaccactattgccaccctccctagtacgcaggtttagtttatgaataaaattagataatcaatgcaagagatttttttaaatgtaggtgcctaccatgatataacttcatacagttcaacaagggggtttaaacaaaacgtcagaggcagaactaagcgattcctctgaatattcaaacaccctttttaacttttgtccagagtagaacatcatgtctctcttcttggcagctttcctttttccttttattcaagtagcaattgatctgaggccaggaaaaaaccttggcagattatttcttaatggtattgcctttgggaaaccacaaatatagaggacaatttaattccagaaaatttggcagatcaccctgtcaacagagcaggaaagtgcaacacattcaaaatgagggcatgtttcaaagacttctgggtgaaactacttcataagtggttcattaggcttaaaaagtagagaaagaactttgaaagcaatttgtttgcatgtccttttaacactaggcaatttggtgaccaggctgaattaagtaattttttaaaggtgtctctatttttcaagataggcaagtgaaagactgttttcagtgggtgctgttggggcccgatgcaaaccatgttgacttgacctgtggtttgtgcacagaaaaagaatagctaatgttttgcccaccttcaatagttacaggtcggttcacccagaagccagggggcatctcagtgaagcgctcactgaagacacaggagttgggaccagtgtggcaggaagtcctctcccactgaccacaggcaacgagagcctggacatcaccatcgtcaggcacctccagtactgcacccaactcgtgcaggtaggatcagcgatgaatttgtgtttgagatgccaggtgatttacataccaggaagtgtgctttcattttttagtgttgccagggaaatgagaattcaggaataagagaacagtcttgctgtggtttgagccaagtcaaaaactctgatgggcctgcccatccctctacaaccttgggtttttcatcttcgaacctaactctccagaccttcacagtagtaggtggcatatggttagctctcacttttgactcatttggtagtacctgagaataatgtgattaagggggtggggggaagccatttgtattccaccatctgcaatggagtttgaaagccagtagtgctgaatatatattaacatgaatgtcaaatgaattagtttttcaccacctggatagctaaaagaaagtgttaaagaatctaaccacagtctcctggacctgaataagtannnnnnnnnnnnnnnnnnnnatcatcaccatttagctctcattctggggacaccacagtgctaattttccttctcatctcaagcctgtttaccacttaaggtttttcaacagtggagcaaaatgttcttaaattcttttgttgcaggaaagggtttcagctgtcttgaacaaagcatttttcctcaagcatctacttaagagctttctccttgcctggttgcttttcttctaatatcattcttctcccagcttgcttgggtgtatgtggaacaggaagagaatgcagaagctaataaaatggttccagaccaggcgcagtgactcaggcccatagtcccagcactttgggaggtcaaagcaggaagattgtttgagcccaggagtttgagaccagcctggtcaacagagtgaaacctcatctctacaaaagatacaaaaattagtcaggtgtggtggcacaggcctatggtcccagctactcaggaggcggaggtgggaggattgcttgagcctaggaggcagaggttgcagtgagctgtgatggcaccactgcgctccagcctgggtgacaatggttctactcctttctgtgtctctcagagacctgtctcgatcacctggtaggcatagatgcagaacgcagacctgtactaccatgctgaattgtctaaagtatttggactctaaaacaaataggattttcaaacccagcactttgggaggccaaggcctcattaaaaaaagaaaagaaaagaaaaagtgtcaaggggatcagccaagcaggaagggtgcagaaggaggaggaatggtaacccaagagcacagaacctgttggaagacaagagtcagggtgaggagctaggggtccctcgggagcccagcagaggggcagtgttgcctccttggtaacagacatgtgatgagatgtaggagaatatgcttctccaccatagatgaagagcatcagagaagcctcagacaactgtgtgctgtgggagactggttggcaattataactcctgccacttggttagccaacacttagttgaactcttctgttgagttttgaggtcaaaaaccacaaaggtctcacaaaccatgagactgataaccaatctggtagaatgtgcagttttttttttttctgatcaaaacagacagggatttttatttatgtatgactattttctactcaccaaccatttgaacgagacagctctttgtccttgctgagcctgatactatgccaagcaaaccacttgtttctcttttagagaataatagctattttgtgagacataagagaattcttatctttgaaggagtgactgttttctcgcaaagactaattggcatgcttttagtgcaagcagtcaatgcagtgtttctctcggtaataaggccatgattataacaattcatcctttctgtggggatgagcaatggtacaaaaacagaagaggtggatacaaagatgtagattgaaggaatgagatttagaaacttaccttctggcttgcgttgattcatgtgtgagcttacttattagttatataaccacagagagataaagatgtgcattttctaagaatcataatcactacaattattttcaaaataaagcagttcattgctattgtatttactcacaggaagggtgttagtacataattgctgcactagactttgttttgtttttttgttgttgttgtttttgtttttgttttttttgagacaatctcactctgtcacccaggatggagtgcagtggcacaatcttggctcactgcagcctccgcctccagggttcaagcgactctcctgcctcagcctcctgagtagcttagactacaggcctgcaccaccacgcctggctaatttttgtatatttagtagagatggggtttcgtcatgttggccaggatggtctcaatctcctgacctcgtgatctgcctgcctcagcctcccaaagtgctgggtttgaaaatcctatttgttttagagtcccaatactttaaacaattcagcatagtagtacaggtctgtgttctgcatctatggctaccaggtgattgagacaggtctctgagacacagaaaggagtagaaccattgggcagcaaatgacttatatcctttcttctcttaggtcttctcattcttgtgaactgcacacaaataaacccacttacaacttatgtgaccttgggcaggttacttaacctctctgtgcctcaattttctcatcagtaaaatggggatatcaataagacccgcctcattgggttgttttgagaaataacataagctaacacttatacagaactcagaccagtgcctggcacatagtgagcactcatttgttatcaagagacagctctgattgtaattctcattattatttaacctgctcttaactttcagcttgaacacacacacaaaaataaaaccatgctgtgaaaaattactgcatttgtaagacaaatctatttctgcttacacaccaagacacagcctaaactgcccctcacgtttcaaaggggaagatcagattcacaatacataaaagggaaagcagctttataataaccttgtagacctactactgagaaagttccagaatttatgcacacacgaagaaatgcaaagcaacaaaaacatgcctgatttcatcagatgttgtaactggcatggaatgaggatcattatcgagctggaagaaaaacatcgcatgagtttatttagtatcatcaccacattcaggaaggatgaggctgggtagagaaagctctactgaaaacaacataattgaaacaggagttttgtttgttttaccagcaaattgttttctcaagcaaaaccccatttgtggcaagaagtctcttagagaagctttctaggcagatccaagtgatggagaaactcgcagctgtcagtgatgagaacataggaaatatcagttctgttgtggaaggtaagtatctgccagttacaccgctattcacgtaaatgatgacaccactagcccagtccactccctatgcatgttcattgctttgttggaaaaacagaaaagcattcttaggtcacaggattgagaaaggtctccaaacaaattgggctcattaatgtcacatttcggctttctgagtcaaagcagcagacacacagttttttccagagggcctccacccccagaagtcagacccagaaacaaaaacagcatccacttcacaggcagagtttcacagactttctgctggtgcggttccctttagggacagatgactataggatgctcttgcaccctggaggtggctaagacaactcctgtagtgactgtcaattggaagatcctgccagaccctgctggggaaaggtacaaatacatggatgcaaacgcctccaggagagttcctgattctaagagttttaaatgaagaatttgacctgggaaagatgcctttgaatttgtgtgatctggctatggggcacttttgtagaaaccaaaatttatgtctgttttcatatcagatattcagcagaaacagggtcttccagataatctctgattaagcctaaaacttcctctatcttctccctgtgcatttctgcctcccacatccattcccactagaagtaggtgaccttggccggtctctgaggggcatgaagaggggcaggacattcaggctgtgagtgacttgtgtcctctcctctcccagccccctcctcatgatcatgacacattcaagtgaaacattgttcctgtcccacctggtaccatgctgttcagtcatttcagtcagggaaccacctgggcagggtaaaaatttcctccagccacctgctgctacctcccatccccttcaggaaactctcctccagtttgagtccttgatcctgtatgatttctgctgtggagttataggaaatcacaagtttggaatgctgcccaagggtagagctcctgtatttcctatcactcacagcaaacgaacttgtttttgctctattttctttgctccccaagcaggatgagttcctcgtcataacttctttacccttcgggccatctgctgaccacacaggaatctgctagttccatctgaaaactaaccacagtcttatggggagaaaaaaagtccctaaagaccccccacatacacaccctttccccaacacgtcttcatctgcttcatttaaaatgttatggccaggcgtggtggctcacgcttataatcccagcactttgggaggccgaagtgggtggtttgcttgaggacaggagttcgagaccagcctgaccaacatggtaatacctcatctctactaaaaatacaaaaattagccaggtgtggtggtgcatgcttgtaatccctgctacttgggaagctcaggcaagagaatcacttgaacccaggaggcggaagttccagtgagctgagatcatgccattgcactccagcctgggtaacaaagcaagactctgtctcaaaaaaataaaataaaataaaataaaatgtgttacgagatggggggttgctcttcttttccagccataccagaatttcacaaaaagctgtctttgctgtcattctggaccaagtgctgcagccctgttggtgtctaccacagcccagcggacagagtgatgaagcagctggaggccagctttgccagaactgtcaacaaagaatatccaggacttgcagacccaggtatgaggcagcagtagagagagaatttctgtccttcagtgtgagagtgggcattggggtgggggtcgggggagaggggtcctcctaccacttgcctgcagatgggaaacacacaaaaggccatccctgaaaaaagaagtgtactgtccagggaaaacatcatctactcagatttaagaaaagaaagtgttgaactgttttaattcagaatatcagcagtgacatttaaagctactacattttggccaggcgcagtggctcacgtcagttatcccagcactttgggagacggagacaggtggatcacctgaggtcaggagttcgagaccagcctggccaacatgacaaaactccatctctactaaaaatacaaaaattagccgggcgtggtagcccacacctgtaatcccagctacttgggagactgagggaggagaatcgcttgaacctgggaggcagaggttgcagtgagctgagatcacgccactgcattccagcccagctgacagactgagactccatctcaataataataaagctactacattcttatgtattgttatttctatgtgtatacttctttcattacaatttcaccagtacgagagtgtcaaatggtatgatcactttggaaaaactgtttggcagtttctactaaagctcaatataccccctaccgttggatccagcacattcattcctaaatatgtaaagacagataaagtgctatgttcacaagaaaggacatttatatgaaggttcctaccagctttactcacaagagccaaaaattggaaacaacctaaatgcccacaagagaatggataaattgtaatatactcatagcatagagtattacacagcaatttttaaaaacaaaatacagacaaggtctcaccctgtcatccagggggaacgcagtgatgttttaacagctcactgcagcctcaatctcctgggctcaggagattctcctgcctcttccccttttgtactgggactgtagatagatgccaacatgcctggccaatttttgtacttttagtagagacagggtttcagtctcttgcccaggctgttcttgaactcctgggctcaagcaatcctcccttggcctcccaaagtgccggaattacagttgtgagccactacactgggccagcaattttttttaattaattaatttatttattttgagatggagtctcgctctgttgcccaggccggagtgcaatggcgcgatctcagctcactgcaaccttcgcctcccaggttcaagcgatcctcctgcctcagccccacccagtagctgtgattacaggcacatgccaccatgaccagctaatttttatatttttagtagaaacagggttccgccatgttgccaggctggtcttgaactcctgacctcaggtgattcacctgcctcagcctcccaaagtgctgggattacaggtgtcagccactgtgtctggccctgggccagcaatttttaaaaagaacacattgttgctataatcaataatttgaatgattctcacagatactttgttgtgtaaaaggaaaaagacaccaaaagtacatactatataattccatttacatgaagttcaagaacaggtgaaactaatttatgttgatagaagtcagattgttagttgcctatttgtgcccttccctttctttctcttcccttcattcttccttccttctttccttccttccttctcttttcctctctcacttgtctcttcctcctcctttttatctctctcctacacacacatatataatatttattcattatatattttatatataagggaagggaagggtagctatagactgggaaggggcacaagaaaaccttatggaatgcaggccgtcttccatatcttgatctaaatggcagttacacaggtgtgcacatgtgcaaaaccatccagctgcttactttactacttcactctatcttcaaccacaataaaagataaacaacttattgagccaggtgtgatggctcatgcctgcaattccatctacttgggaaactgaggcaggaggactgcttgagcccaggagtttgagaccaacctgggcaacaaagtgagaccctgtctctaaaataaaaataaaaataaaaattattgaatgaatgaatgaatgaatggtcatctatctaaagctgctttgtgtctttcccttccgaatagtgtttcgaaccctggtgtcccaaattctggaccgggctgagcctctgctttcctccagcctgtcctcggaagtcgtcactgttttccagtattacagttacttcaccagccacggcgtcagtgacctggagagttacctgagccagctggccaggcaaggtgggacatgttcttttgtcacattgtagtggtggctcaatttggcgttatctctgctcttttaaatcatggcttttggcaatgatggccttttatttttcaagtccacagtagaggtgcaatttgccttttaagtgacttttggacttttaacattagtgagccccttgttaatgaaccagggattcactaggagcaactcaatcatctggcagagaggtaccatttacaggaagctggtaaatgatttaagctttcactgtaatttatttccttcagtaatgtatttgccattagtcggatcaatcctacaggcaatactattttatattgccctttttggtgaggctttcattaataataggaagaaatggggtttcaaagaaggcaggtaggtaacatggtgggaagggaaaggaggaaaaggtggaaaactaactccagggctccatgtccagggtacaagaacagctgccagtgcaggcatgcagcaatgaagctggttcttgccattccacacggcccttcagagactggaaataaaatagcaatctaaatcaagtgaaaactccactttgggagtggagccaggtagtgaggggctggtttctggttcccaggtttgtgctttataaatccacagagccttgaccaatgcaggttaaaagggacaagaggaatgaggtgtgttctttggagctaggtgagtgtggcacggcaccaggcagcagcaacatgtctggcgcaagcccaggcttaccccttctctctccagaacatcaaatcctgcaacaacacagtcagcacattgggtggcatcatagtgaaggaagaaaaatcttccttcacccagcactgtaccagcacggagcatgggagagagtctgtgcataaccccttacaaggcagacaccagcacagaggaccaggaagagaaagcatgggcagaaagaccttgttttaggaccacaaagtcttattttataatattatagtcttcatttattgatactaaatttgtcccaatctaaatccattttctgagaaaatgtttatattactcagtttgcatcagtggcagtttacatctctaggctcttattacacggtccccaagaaggcctactcatttactaacaacaatggggaatgacaatgaaaaaaacctttaacattttaagtgtcttttttctttcattataaaagggaaaagccttcattattaaaaaaaaaaatgtaaacagagaagtataaagaaagaaattccaatctctcctcttactttttaaattgaatgcatttttcagttgaatgtacatgggttttacattccaaatnnnnnnnnnnnnnnnnnnnnnnnnnnnnnnnnnnnnnnnnnnnnnnnnnnnnnnnnnnnnnnnnnnnnnnnnnnnnnnnnnnnnnnnnnnnnnnnnnnnnnnnnnnnnnnnnnnnnnnnnnnnnnnnnnnnnnnnnnnnnnnnnnnnnnnnnnnnnnnnnnnnnnnnnnnnnnnnnnnnnnnnnnnnnnnnnnnnnnnnnnnnnnnnnnnnnnnnnnnnnnnnnnnnnnnnnnnnnnnnnnnnnnnnnnnnnnnnnnnnnnnnnnnnnnnnnnnnnnnnnnnnnnnnnnnnnnnnnnnnnnnnnnnnnnnnnnnnnnnnnnnnnnnnnnnnnnnnnnnnnnnnnnnnnnnnnnnnnnnnnnnnnnnnnnnnnnnnnnnnnnnnnnnnnnnnnnnnnnnnnnnnnnnnnnnnnnnnnnnnnnnnnnnnnnnnnnnnnnnnnnnnnnnnnnnnnnnnnnnnnnnnnnnnnnnnnnnnnnnnnnnnnnnnnnnnnnnnnnnnnnnnnnnnnnnnnnnnnnnnnnnnnnnnnnnnnnnnnnnnnnnnnnnnnnnnnnnnnnnnnnnnnnnnnnnnnnnnnnnnnnnnnnnnnnnnnnnnnnnnnnnnnnnnnnnnnnnnnnnnnnnnnnnnnnnnnnnnnnnnnnnnnnnnnnnnnnnnnnnnnnnnnnnnnnnnnnnnnnnnnnnnnnnnnnnnnnnnnnnnnnnnnnnnnnnnnnnnnnnnnnnnnnnnnnnnnnnnnnnnnnnnnnnnnnnnnnnnnnnnnnnnnnnnnnnnnnnnnnnnnnnnnnnnnnnnnnnnnnnnnnnnnnnnnnnnnnnnnnnnnnnnnnnnnnnnnnnnnnnnnnnnnnnnnnnnnnnnnnnnnnnnnnnnnnnnnnnnnnnnnnnnnnnnnnnnnnnnnnnnnnnnnnnnnnnnnnnnnnnnnnnnnnnnnnnnnnnnnnnnnnnnnnnnnnnnnnnnnnnnnnnnnnnnnnnnnnnnnnnnnnnnnnnnnnnnnnnnnnnnnnnnnnnnnnnnnnnnnnnnnnnnnnnnnnnnnnnnnnnnnnnnnnnnnnnnnnnnnnnnnnnnnnnnnnnnnnnnnnnnnnnnnnnnnnnnnnnnnnnnnnnnnnnnnnnnnnnnnnnnnnnnnnnnnnnnnnnnnnnnnnnnnnnnnnnnnnnnnnnnnnnnnnnnnnnnnnnnnnnnnnnnnnnnnnnnnnnnnnnnnnnnnnnnnnnnnnnnnnnnnnnnnnnnnnnnnnnnnnnnnnnnnnnnnnnnnnnnnnnnnnnnnnnnnnnnnnnnnnnnnnnnnnnnnnnnnnnnnnnnnnnnnnnnnnnnnnnnnnnnnnnnnnnnnnnnnnnnnnnnnnnnnnnnnnnnnnnnnnnnnnnnnnnnnnnnnnnnnnnnnnnnnnnnnnnnnnnnnnnnnnnnnnnnnnnnnnnnnnnnnnnnnnnnnnnnnnnnnnnnnnnnnnnnnnnnnnnnnnnnnnnnnnnnnnnnnnnnnnnnnnnnnnnnnnnnnnnnnnnnnnnnnnnnnnnnnnnnnnnnnnnnnnnnnnnnnnnnnnnnnnnnnnnnnnnnnnnnnnnnnnnnnnnnnnnnnnnnnnnnnnnnnnnnnnnnnnnnnnnnnnnnnnnnnnnnnnnnnnnnnnnnnnnnnnnnnnnnnnnnnnnnnnnnnnnnnnnnnnnnnnnnnnnnnnnnnnnnnnnnnnnnnnnnnnnnnnnnnnnnnnnnnnnnnnnnnnnnnnnnnnnnnnnnnnnnnnnnnnnnnnnnnnnnnnnnnnnnnnnnnnnnnnnnnnnnnnnnnnnnnnnnnnnnnnnnnnnnnnnnnnnnnnnnnnnnnnnnnnnnnnnnnnnnnnnnnnnnnnnnnnnnnnnnnnnnnnnnnnnnnnnnnnnnnnnnnnnnnnnnnnnnnnnnnnnnnnnnnnnnnnnnnnnnnnnnnnnnnnnnnnnnnnnnnnnnnnnnnnnnnnnnnnnnnnnnnnnnnnnnnnnnnnnnnnnnnnnnnnnnnnnnnnnnnnnnnnnnnnnnnnnnnnnnnnnnnnnnnnnnnnnnnnnnnnnnnnnnnnnnnnnnnnnnnnnnnnnnnnnnnnnnnnnnnnnnnnnnnnnnnnnnnnnnnnnnnnnnnnnnnnnnnnnnnnnnnnnnnnnnnnnnnnnnnnnnnnnnnnnnnnnnnnnnnnnnnnnnnnnnnnnnnnnnnnnnnnnnnnnnnnnnnnnnnnnnnnnnnnnnnnnnnnnnnnnnnnnnnnnnnnnnnnnnnnnnnnnnnnnnnnnnnnnnnnnnnnnnnnnnnnnnnnnnnnnnnnnnnnnnnnnnnnnnnnnnnnnnnnnnnnnnnnnnnnnnnnnnnnnnnnnnnnnnnnnnnnnnnnnnnnnnnnnnnnnnnnnnnnnnnnnnnnnnnnnnnnnnnnnnnnnnnnnnnnnnnnnnnnnnnnnnnnnnnnnnnnnnnnnnnnnnnnnnnnnnnnnnnnnnnnnnnnnnnnnnnnnnnnnnnnnnnnnnnnnnnnnnnnnnnnnnnnnctcctaccaaaaagagagaaggaaaattaaagaatcgtgaacatgctggtagcaggatatatacgcatctgagtgtgcagtttatggggagcaggtctgtgatactctttagtcacactgaggggccagtgttcgaaatgtgcccttagaaatagcaacaggggcccaggcgcggtggctcacacctgtaatcccaacactttgggaggccgaggtgggtggatcacctgaggtcaggagtttgagaccagcctggccaacatggggaaaccctgtctctactaaaaatacaaaaattagccaggcctagtggcacatgcttgtaatcccagctactcaggaggctgaggcaggagaatgacttgaacccaggaggtggaggctgcagtgagccgagattgcgccactggactccagctgggtgacagagcgagactccatctcagaaaataaaaaagtaaaaaagaaataacaacaggtaagacatagccttcctttggctattctatatgcatcttttacttttagggcattagccacaggtgaaatattctcttgttattccaattcagctctcatgtttattccctcaaattcatatttcatgactaaaccttcattatgtgactactgtgtccctggtattatatggagggttttgtggacactgtagaaataaaggaaaagcagtccttacccttgaagagtttccagtagtcagaaaaacaagaaataatacctgtcaagtactgtgtacttcctaaacaccaggcaccgtgcagcatcacttagctgtcttatctctaacaaggtcgatgctatgatcccactttatggattaggaaactgagcctccaaggagttaaacttgactaagactagttaagtaacagaatttggattactacctagaaatgtttgactcccaaagcctgaaccctttccatattttcttatatggaatagcaaaagttattacattaagttcttaaaactagatgcaaagcactaaagcaacacaaaaatgcctctgtgagagctggtgtcactgtaaacccggaaccttgcttcaaggatcatagctattgagacaaaataaaagttgtgtgtgttggttcattattttatgcttttccccacacctagacaagtaggaaatatccactgtcctccaactatactgttgcattcagatgtggttgcttctttaattatccaggactggtcagaggagatgctggtggcctctgcatggtgacaggggcttctggctttataatgtgccttctgtttgcttcctggaattgttatgaatctaagcagccaccaattcttaggcaaccactcaaactaaagtgagcaaccttatgactcaacaggcatttaacaataaataaataggccgggcgcagtggctcacgcctgtaatcccaacactttgggaagccgaggcgggtggatcacctgaggccaggacttcgagaccagcctggccaatatagtgaaactccatctctactaaaaatacaaaaaattagctgggcgtggtggtgggcacctgtagtcccagctactcgggaggctgaggcaggagaattgcttgaactcaggaggcgaaggttgcagtgacctgagatcgcaccattgcactccagcctgggtgacaagagcaagaactctgtctcaaaaaataaataaataaataaaaataaataaatacgtaaagtgagcaacctattcagtaaccccaaaattaacagggtcagctatcatctctgaagttaacatagacaggtttgccctatcacctagcatgttagcttggcacctaacaagtacctagtcatctcttcatgggacaagtgaattgatattttcagatatatttacacacatggttacaatatttgtgttcctgaaatgagggagacaaatatttccaccaacataatcaaactaaatgaattatgactcagcattttgcacagacaccatcgattggtttctgacctccagggccagcccttgttaaaattataaagtagatgaacttcagcacaagactcctctctattttcccctgcccatttctctgtctctcaggtttgttttggattttaatggcgggatcctactttgttacccaagctgggacatgcaccacccaggtggtgcaatcatagctcactacagccttgaactcctgccatttccctcttttactcatatcaagggacttgaaggctaactatcaaaccataggtttaccccttaccaaaaccacatattccaagacttaaatgggtgatcacaacttaaattgtccttcctctcgggcatgtttgcattataacaatgcttcaatagggatgaaatgctaaagatgaccttggtgtatatccacctctggaaatggtagctttggagggggttgatggcaagtggcacttcagggacagtcaccttgttccttttgtactggaggctagtccctgtgtagctgcccacttgtggattgaggcttatttcctccccttttggctgctcaccctcaagtgagtagaggccaaaaggcaagccagagagaggttttcaaaagccaaagcccaggctctaactatttaggtctagtaaagagctagttactgttactgcttttgttcttgctgtaataacctatactgcatatctttgtttcctttaagagtgttaaaactttaagagtgttaagccacagagctgggcactgtggctcannnnnnnnnnnnnnnnnnnnccgagattgcaccattgcactccagcctgggcaacaagagcaacactccatttcaaaaaaaaaaaaaaaacagtgttaaactggctgggcgcggtggctcacgcctgtaatcccagaactttgggaggctgaggagggcagatcatttgaggtcaggagttcaagaccagcctggccaacatagtgaaaccccatccgtactaaaaatacaaaaattagccgggtgtggtggcaggcacctataatcccagctactcaggaggctaaggtgggcgtatggcttgaacccaggaggcggagtttgcagtgagctgagatggtgccactgtactccagcctgggttaccaagagagactctctcaaaaaaaaaaaaaaaaaaaaaaagagtgttaaaccatatgtccacacaaaaaaaccttgtacacagatgttcatagcagcattattcataataaccaaaaagtagaaacaatctgaaggttcatcaactggtgaataaataaaatgtggtctagccatataatggaatattttttggccataaaaagaaatgcaatcctaatacatccttcaacctagatgagccttgaagatactatgccaaatgaaagagcaagacataggaggctacatattgtgtgaattcatttatatgaaatgtccaaagtaggcaaatccatagtaatggagagtagattagtggttgccagtgactggagagaaagggtcttgggaatgactactaatgggtacaggatttctttttggggtaatgaaaatattctgaaatcagatgatggggatgatttgtgaatatactaaaaaccattgaattatacatgctgtagtctaaatattatggtatataaattatattttcaatttttttaaatggaattgtcctataaaactgagaaaacaggggccgtgtgcagtggctcacgcctgtaatcccagcactctgggaggccgaggcggacggatcacaaggtcaggagtttgagatcagcctggccaacgtggtgaaaccctgtctctactaaaaatacaaaaattagctgggcatcatagcatccgcctgtaatcccagctactagggaggctgaggcaggagaatcgcttgaacccgggaggcggaggttgcagtgagccaagtttgtgccattgcactccagcctgggcaataagagtgaaactccatctccaaaaataaataaataaataaaaatagaaaataaaagtaattcagacaaatagcaagaaatgcacaatatagcccaacaaaatcaaaagttagtcctctctttccaccctcaattctcttcaagagtaattaagtttcctatgaaccaatatgacatatagtgattcttattcatttgaattaatgttaagtactacacattttatcaaccatttaggaagaaattagcttggtaaaaataagacaattggccgggtgcagtagctcacgcctgtaatcccaacactttgggaggccgaggtgggcggatcacaaggtcaggaattcaagaccagcctggccaatatggtaaaatcctgtctccactaaaaaaaaaaaaaaaaaaattagctgggcgtggtggtgggcacctgtaatcgaggtaggagaatctcttgaacccgggagatggaggttacagtgagccgagatcacaccactgcactccagcctgggccacagagcgagattctgtctcaaaaaaaaaaaagataatgtacttttatgcagagattttttaaacagagcattcatttgccatgtatcaaactcagcaaatctcaaactgacattaccaccctcctcactggaatgtactgcctcctcctgtcttccttatttctgactgaatacctttttttcaatcaacttccctactgaaatctaagccatcatttccattccagttcaaacatttttgtgaaacttaccctggcactccgtaagatgtctcttctccaagtgactgacttaccttgtagatttcttatgggacctaatacatttcttctcttcagttccttctaaacagtcttagcatttctactacatctaagggctccttaaaagccagaatcataactctctcccaattttatttaataaattgatcccttatattctcctagagtcatggactctaggagaatatttcaaatcttggaatgacacatgagacaaggggcaggagcttgcaggcctttatgatgggacataaagaaagggattaacaccttaaaagaaaaagttaatgatctgggatcaaaaacagctctgagaaattttgccttcctcgttacttggtttaaaaaattacctttaggtggccaataaaagcccacggtcattatgttactcaataaattgatcccttatgttctcctagagtcatagtagatctaggagaacataagggatcaatttattgaataaacgactcttttaattaatatgaatttcaatggctttttttttcttgctctgaaggtagtgcaaaatgtgtaggttatatgctatagtttatctcagagagtaagaatgaggtatacctcttaaactacgaacaaaccaaaatgccttcatgaggtccctccttctctttcaggccttgctctattactgtgaagcactaacaaagacaaacctccagctccagaaagcagcttgcctggctctgaaaatccttgaggtaaagcccagccttggagctcccctggcagctcagcttggagccaggctaagctgagtgtatataacagcttttctttcatgtttgaaagtacttttttagcagtatttcttgtcttctttgcaccgtatgttagttttagtatttttctcccttaaacagtaattacatgtgactttgttttgttaaagtcaataagtggcagaaagcaatcatgttttgcactagcccaagggaaccagtttgcctttaggtcagtattagaaaagtacatcttattagccggcacagtggctcatgcctgtaatcccagcattttgggaggccgaggccggtggatcacctgaggtcaggagtttgagatcaacctggccaacatggtgaaacctcatctctacaaaaatgcaaaaactagctgggcatgatggcaggtgcctgtaatcccagctactcaggaggctgaggagggagaattgcttgaacccaggaagttgcagtgagccaagattgtgccattgtactccagcctgggtggcagagccagactctgtctcaaaaaaaaaaaaaaaaaaaaaaagagagagagagagaaaaggaaagtatatcttattttaaaagggagatgagatgtatggtgatttcactcatttttattgtgaacaacaaaaagcaaggacaaataagatttgaaaagaagtactaaattcagtatgccactgaattcccagatccttccccgcaagctctctttattaagcagagaaccagttttgattgtcataaggaggtgtcgtgagcagggagagagctagaatgtaaacaagtactaaacgaatgggaactcctgacatggatgtttccctttcaatggcaagatgtaatgtttgacctactttcatcacaaaaaaataagacaaatcagtcttgagaaaagaatgagagaaggccaggtgcagtggctcatgcctgtaatcccagcactttggaaggctgaggcaggcggatcacttgaggtcaggagatcgagagcagcctggtcaacatgatggaaccccgtctctctaaaaatacaaaaaaaattagccaggcatggtggcacacacctgtaatcccagctactggggaggctgaggcagaagaatcgcttgaatccaggagacagaggtttcagtgagccaagattgcaccactgcactccaacctgggcgacagagactccatctcaaaaaaaaaaaaaaaaaagaatgagagaaggccacaccttagaacttgccaaaatcttggaaaagagctgcaggcctgataaagaaaggaattaatacctcaaaagaaaaagttaatggcctgtgatcaaaaacagctctagggccaggcatggtggctcatgcctgtaatcccagcactttgggaggctgaggccggtggatcacctgaggtcaggagtttgagaccagcctggccaacatggtgaaacctcatccttactgaaaacacaaaaattagccaggcgtggtggcacacacctgtaatcccagctactcaggaggctgaggcaggagaatcactttaacccaggagacagaagttgcagtgagccaagatcacgccactgtactccagtctgggtgactgaatgagactctgtctcaaagaaaaaaaaagaaacagctgtaggaaattttgccttgttacttggttaaaaaaaaaaattaccttcaggtgcccaaatagaaagcccacagtgattgctatttgggtgctttcctgatatccagtgatatatcagtgacagatgtctgtgatacagacaaagtaaataaagacataaggatacagtgatctgcacgggttttcatactctgaatccactagactgtaaattcttgaggaccagaaccatgtctggtttactgtggaatctctcatgccttatgaatagtctggttcatggagtgctcaataaatatttgtggaacaaacaaatagaagaattgtcattaatggcctttacctcctcctctattttagcatataaactaaatagtaagaattttttaattagagccattttggaatcagtgagattcagtggaaagaaccagggaaaatggattctactctggaaaagcaagctcgtcacttcactcctctagaccaggagtgtgctgtggaatgaggaatttagctgatcatcagaattcctgaaagtaagaactctgggccccatcccaggaaattctgatatagtgcatccggagtggcacccaggaatattgggtttcagacactcagctaggtttgaccccataggtaaagtggtttttagcattcctaccagctggccgggcacagtggcttacacctgtaatcccaccacattaggaggccaaggcagaagaattcgactagcctgggcaacatagtgagacctcatctgtaccaaaggttaaaaattaaaaatcagtcctggctactcaggaggctgaggcaggagaattgcttgagcccaggaggtcaaggctgcagtgagctatgattgctccattgcactccagcctgggcaacaaagtgaggctaaagttcccaccagttgtgaaatgccaagtctcgtggtactctagacctaaatgtcaaaacacgatttaacctatttttcccccataggctactgaaagcattaaaatgctggtgacattgtgtcaatctgatactgaagaaatcagaaatgtggcctcagaaaccctcttgtctctgggtgagttttattgttgttgtttacatgattgtttgcttctggcactctctaacggatgttcccttttagatgttcccttctccagtaaggagaagtttcatgtaccctgtttagcagtttccccgctgtaggctgtcttctcacacacagagtacgaagaactgatcagtgtccatctcaccccaactccttgttctgtctggatgctgagagtgaactatattgtctggagactttctatatggattgatcagtctgtgtactatttagaatcaagaacacagaagtcaaaccataaagcaaaggcaataggaatccaggctgtgttgccaggtggggttgacactccctggaggacagaaattgggtgaggtaccagagatgcatcccagggaatgctgtaaatccccaggtatctcagcctcaccctgactcccagattaacctctgactgccctgtggcctctgcccatctgagccctgatacctaagaaaagaattggagtacttattttattctgaaatatccagataatccttcctcttcactttattttatgaaggttcatgcctagcaggcattatacatttattcttttttggggacttgggagggtggggaaagcccttcttaactctgtattaaaaagtataaatagctgggcttggtggctcacccctgtaaccccagcactttgggaggccaaggtgagtggatcacttgaggtcaagagttcgagaccagcctggccaacatgatgaaaccatgtatctactaaaaatacaaaaattagccaggtgtggtggggtgcacctgtagtcccagctacttgggaggctgaggtaggagaatcacttgaacccaggaaacggaggttgcagtgagctgagatcatgccactgtattccagcctgggtgacagagcaagactctgtctcaaaaaaaaaaaaaaaagaaaaaagtataaataattattataaataattttacttcaacaacacaatcttaaagtataaaaactatgctcctagaaatcctcagacataatccaatcaatactgcagcttagaaaaaagctacccttgtttagtgatactaacttaacaacatgaagaagaatctcatggcatttataatcactgtgaaaatcccatttattgttaggccctctttcttacaattatgggtttaacaaggcttcattctgctattgaatatatgatttcttccacagaaatcttagccagtatatatttgtttaaagaataaaagttactccttatggttgtattaggcatagaaattatttaattctctaaaaatgtaccaaggtattattagtttaaactcctttgtcccttcatattctaaaataaccatgaaggtaagccaggcgcttataaagcatagccaacgaagcttctatttccagtgtaacctaaggaagctgatcctacagaatgtgccccgggcctcactggagctgtgcaaacagcagcatctccagaagccatcaccatacctgcttcaccttagctcttcatgcacactgctcatatcagccctgggccctctcacaccaccagtgtgcagtgctcaacactggctgcacatttgccagggaagcttaaacaatctactcccaaagattctgctttcatcggtctaagtgttccttggcatcaggattttttaaggattttttgaagcctcccaggtgattctaatataaagtttgagacccccctgaagtcaatattatgaatcttctttgaccctaatacacaaatactggcacatttttctcttacacaaatgactgaattaatatagtgaggatagtattttcaataggaattgataaaatgccctatgacaaagggcagaaggtcattgcgggcacttaaaggactcagggctgcaactatttaccaactagtatggaatgatttcgacattttaacctagagctgtccaacagatccctccatggtgatgggattgttctatatgcgcactgtccagtatgacagcagccatcctaaatggctgttgggctgttcacctttgccaccatggaggaactgaagttttaagtttactcaattttgaggatagctgctccttgacttacaatggggttacatcccaataaacccgttgtaagttgaaaatactgttaagtcaaaaatgcacttaatacatcttacttgcagaacatcatagcttagcctagcctaccttaaacatggagtctctctctatcacccaggctggagtgcaatgatgcaatctcgtctcattgcaacctctgcccccgagttcaagcaattctcctgcctcagcctcccaagtagctgggactacaggtggattccaccacacccaactaactctttttttgtattttttggtagagatggggtttcactgtgttgatcaggctggtctcaaactcgtgacctcaagtgatccactcaccttggcttcccaaagttctggggttacaggtgtgagccaccacacccagctgaacttctgattaggcacaactatttccatctttgtctcacttgcattacatgtatgaaagcctgcttcttatcacttgtctttgcattttattttctcattttctaaatcattttttaaagtagaaaaatagaacaaaacattaaaattatttgcaattgcatcctaactgttcaaggtggcgttacggacaaaactgaactagctggtggctggtagaaggcatctctgtatgtttacatagtaaaaagtaatttttagctgaagtttgaaagcctaagattgattttaccacatatcatttagatgtatcgatatataatgtatacaagtaaaagttatgtaaaagttcagtgcattagccatattgaaatccctaatgtacttaaaatataatccatacaattgctctaaaataaatcgattatatgaaatcatcaacatcaaatggccataagacttctactctgtttcataccctggcattctgttggtctctggcattaattagctcaaaagttcttggttgttctaagcattacctggaaaacaatgacataattaggaataacaaaagataacttttccttaccaaaagttagcatagcatattatagcaacccatccctaaacaaatggcactatgttactttgagtaattaataaaaacgttaagtttgaattggtattcatgtttaatgttctgtatttaggagaagatgggcggctggcatatgaacaattggacaaatttcctcgagactgtgttaaagtcggaggtcgtcatggaactgaagttgccacagccttttaattacaggttaactgcctaacagctgtcttaatatctggcccttttcatcaggatggtgctgtggtttgggctggaaattgtttagagcctgagagacacgacaactgaaataaaaatgtaggccaggtgcagtggctcatgcctgtaatcccagtactttgggaggccaacgcaggagaattgcttaagcccaggaggttcaagaccaacctgggcaacatagcaaggccctgtctctagaaaaaaaatagtttaattagtcaggcgtggtggcatgcacctgtagtcccagctacttgggaggctaaggtgggaggattgcttgagcccagaagattcaggctgcagtgagccataattgccccactgcactccagactgggtgacagagcaaaaccctgtctcaaaaaacaaaacaacaacaacaactaaaaaaacatgttatagaaagaattcagagtctcgtttcacagtacctatctacttttcctttggccaatatagaatagggctatggtataattcaaatatattacatcgtcgattgtgtctaataatactcagtgaaagagtccatcttatcttaatatgtatgaaatttaaaaatagccatctttgtacttttttgcaagtttctctataagcttgaaatagtcatgtgatacttcgacaaacatcatatgccttgcagtttttctcggtcgtgttctcagggttgagtagtccccttagctacctaactttactttcaatacaaagcacaaaaaagaatatcttcaaataaaagtttgcctgcagaacctggcaaaatgacccattaggagagtttagatgttttaattttatgtgctcccagctactctggagtctgaggtgggaggatcacttgaggcagaggttgcagtaagctgagattacactactgcactccagcccatgtgacagaggaatgagagccagtctcaaaaaaaaaaacaaaaaactcccataatttattttgtttcttttccccatcctgaaaattcccaaatcatgtttccattatggaaaaatgataagtaaatgactaagaactacattaagattatgcctatacacttaaacaaaaaactcaaagcttatgcttttttttttttaattaatgagagctattttttatgatattcttaccataggggtgttttgctgctaagacaaatcaaaaccaaaagctgtagattcacaaacctgtgatgctctttgaggtggaggaacctagaagtcagagaaatcctaatggagtaggagtggaggaacatttaaagtggtccctccttctgtaaaaatgaccgtgggattagaaagaaggacatcctgaggggtggttactgcccccagggaaatcactcactggtaggattccctggccaaatagttcaaacatcaggtcccattattgcttcagtatcagagatgcaagttcattaagcaaagtacaagaccattcagtagctcttattaaaatatcttttcttcctctaaagagtgtacaaggtggggtatgccaaggtatcaaaacaatatatgtgagtgtaatttaaactgtggaatatcaactgtactatggacgtgtttgtatcatttagatgtcattttaaatatttacattttagcaagacttttaaaaaggactcatttcatttcaaagtgcaaattgtttgccaggcttctggcaaatggttctttcaactgtgaacttatcgtgtacatatctgtatatttataaatattatatatattcatacatccttcactttaaaggtacattgtacagtctgtagttaggaggtatagcctatagcttatgttaaatggttgaaatggttctttttatagaaagtcaaacacagatgttacaggattttgtgtttggtttgtcattttttttattttttattttgactattgcatgagtaattaattccagatcttttgtattcacttctgtattttatgtttggttgaggggtgcttttagttgtgtggcatttgtattcattgatctttcagtcatgtaagttaaaataaaaattatttttgaattactagcatcatgtgcagtctgatgttattttttttcacatgccctttctgagttggtatttacagaacacactgcacctcattttcacctttattttattttatttatttattttgagacgaagttttgctcttgttgccccggctggagtgcaatggtgcgatctcggctcaccgcaacctccgcctcccgagttcaagcgattctcccacctcagcccctcgagtagctgggattgcaggcatgcaccaccacaccctgctaattttgtatttttagtagagatggggtttctccatgttgatcagctggtctcgaactcccaacctcaggtgatctgcccgcctcgagctcccaaagtgctgggattacaggtgtgagccaccacagctcgtgcttttattttcaatttgaaattcctttatctctaaatagagataataaatctcagtttgttgtaaagctaattggagagaaaacagctaagtttcactgttgtatctatgagcagagactgtgagctccttgagggcaaacaggcatggtggcttaccccaagatcgtgccactgcactccagcctgggcaacagagtgagattctgtttcggggaaaaaaaaaataaaaagtgccttcactgatttgtgtatgttctgttcccactcagaccccaccagcatcatcacaaagaagcccttgactttcaactctgacagtatttaccaagtgactcattaaataccagtgattgcttttactgagtcagtggtacaaacattttcctctataaggtttgctactatactgtttaactaaattgccttagttactttacaaaattgtaaagtaaaattgtaaaccttagttcactgaaaaatgccagtacttctcgctgtatcagaaaaactcaaataaaatacttttatccctgacttttcctggagacagtacctcttagtaaacaaatattatcttttgattttgagacagtcctaagtacaccttgttcaaggaataataattgtttgctaaaaattagaactctaacttctcatgcattcaacaagtatttgttgcttacttactatgaacgaggtgtatgccaaggactgttcttggcactggaaatagagtagtagagaaaaataaaagacacaacaatccctgccctcccaggccttatatcctggcaaagcgaagacagcaaagcagagaaggggaaaaatgattgcacaaggtggggtgaagacagacacagggagaaagcaaagatcacaagtttaaagagagtagtcaggggccggcacagtggctcacacctgtaattccagcactttgggaggccaaggctgaggatcccttgaagccaggaaatcaagaccagtctgcatggcatactgaaactcccatctctacaaaaattttaaaaaccagctggacatggtggcgtgcaccagtggtcccaactgcttgggaggctgaagcaggaggattgcttgagcccaggagtttgaggctgcagtgagctacgatcgtgccactgcactctagcctgggtgacacagcaagaccctgtgtcaaaaaaaaaaaaaaaaaaaaaaaaaaggagtgcaaaggcctcacagaaaattacatttgaggaatgacccgaggagctattgggatgagtcacgtggattatctctgggaagaaccttccaggcagaggcaactggaggcaactaaaatattcctctctaaaatgctggagattatagtgaaaaggttaaaacagggacatattctgccactcctttctgccttggtcagctcataaccagagctcagagacagcactgccagaggacccaggaacagactttactcttcccatcaacttaccttcaggcattttctcacctttcggaagcctgaagatggtcttttctttgtcttgtcactagataggattcatggctcttagttaaaatgctatttaagcaaagcccctaagccactgcctagagagagaaatactttggaactgaagtctctcctgcacattgggtacaacacacattaataaacttccgtttatttttcttttgttaatctgacttttattttcaggacagtgtctcaactaaaaatgtaaaaaggggaaaaaaagaaatgatgttttctcccctgcacaacagtaagtacaaaagccttgaaaagaggccatgcttggtgttttggattttctagtacccacacttaagacaaagaaaaaagaacaggtgatattaattataataatatattttatttaacctaatgtaaaacatttcaaaatatgatcaatataaaaattattgaaatattttacagtttttcctactaagtcttcaaagtccagggtgcatgttgcactcacagcacatctcaactgagactagtcacatttcaaatagccatgtgtggctaccttattggacaaggaaggtctgtttttcccaattgtcccagtaataccctttatagcatacacaaacacacacacagagagacacatacacacgtgtttatgtacagaatccaagcagggattacatttttatttttatttatttatttatttttcaagatggagtttcgctcctgttgcccaggctggagtgcaatggcacgatctcggctcactgcaacctctgcctcctgggttcaagcaattctcctgcctcagcctcccgagtagctgggattacaggcatgcgccaccacgcccggctaattgtgtatttttagtagagacggggtttcgccatgttggtcaggctggtcttgaactcctgacctcaggtgatccgcccacctcggcctcccaaagtgctggcattacaaccatgagccaccaccgcgcctggccatttatttttttattttttattttttggggatggagcttcactcttgtcacccaggttggagtgcaatggcatgatctcagctcactgcaacctctacctcccaggttcaagtgattctcctgcctcagcctcctgagtagctgggattacaagcgtgcaccaccacgcctggctaatttttgtatttttagtagaaaaagggtttcactgtattgaccaggctggtcttgaactcctgacctcagatgatccacatgctttggcctcccaaagtgctgggattacaggtgagagccactgcacccggcctacatttttattttagttgtcatgtctctcaggctcttttaatctagcagagtaaccccaatttttttaagccttcacacattaaaatatttgaagagcatatgtaggtatattctgtagaatgtctcaaatttgggatatgttttaaagtagagccagtacattcattgataagttgaaaatgagatgtgagatagatagaagccaaggatgaatctagaattttttacctgaacaactagaaggatgtaataccatcttccaagatatagaaactgagaggcagccagtctagggaggaagacctggaactctgttttggacatgttaaaactgaaaagcgtcttggacattcaaatggggatatcaagcttgtgactgaatacgagtctggagttcaggtgagaaatccagttaaagatataaaattggagcaggcgtagtggctcatgcctataatcacagcactttgggaggcaaaggtgggaggattgcttgaagctaggagttcaaaacagcctggacaacatagtgagacccccatttcttaaaaaaaaaaaaattaaaaatttgctaggtgtggtggcctacagtccctgctactcaggaagttgaggcaggaggatcacttgagcccaggagatcaaggctgcaatgagctatgattgggccactgcactccagcctgggcaacaggggaacatgtctcaaaaaaaattatatatacatataattaatatatatataatatataatatatataactgggagtcttcagcatatgggtaatagttaaagccataaactgcttgatcttatctaggaagtatagataaagaaaaaaggaccgggcatggtggcttacgcctgtaatcccagcatttaggaagcctaggttggtggattgtttgagcccaggagttcaagaccagcctgggcaacatggcaaaacctcatccctacaaaaaatttagctgggcatggtagtgtgcacctgtggtcccagatactcagaaggctgaggtggggggatcacctgagtccaggaggtcgaggctacagtgggccaagatcatgccactgcactccagcctgggggacacagacagaccatgactcaaaaaaaaaaaaaaagaaaaagaaaaagaaaagaaaagaaaagaagaacacatacaaagactgatgagccttgggccctccaatatttagaggtcataagaagaggaaccagtaaaggaaaatgatgagtggccaggaggagaaaaattaggagtgtggtatcttagaagctgggtgaaaagtgtttcagagagaaaggagtgtcaaatgtcaaagactgacaattcaatgaccctgacaggcaatgtcagtggagtcatggggttgaaatcttgtttggaattcatccaagaaagaatgagaaagactggagatggtgagtatagcagctctttaaagagctgtactgtaaaggagagcagggaagtgaatgtgcagtcgctgtgggaagaaagcatatgaagtcaagagagttttctttctttaatgagaaaaaaagcacagcgtgtttgttgataatgcaaagggtccagttgagatggaaaaattaccaagataagagaagaaccgaagagcaacatccttgagtgaggtgagaggagctgattgacatctactgcacaaacagagagggtatccacagtaacaggaggaaagacagagtctatgggtaccgtagacgcagataggtgggtggatgcactggtaagagttatgcaagttctcttttcattgcttctattttctcagcaaaataagataaatctatgatgtagagaactctctttgggtagcaaacaagcaaaagaggtaacaatactacgaaagatcaatggaaagaagcaaagtacatgtgggaataatcagactagaacgggcaagttccaaatataccctgcctgagcaaaggttcaaagacagtagtgagattcatgcgcattacgggaaacaagtttaagttgaggttttgtacaccagagaaataaaagtaaaattgtttagtccaaatagtagaaggctttcaatgacaagctgaagaatttaggcatatattgctttcccctggtttgtatattccattccacagtgttgctaagtgatgcattccagagttcttgactgtgaactcctgtgactgccagtggtgtacctgaaggaccactggcctttttacacaatggctaacagccgattttcttgtacgcaaatttgggttaagatgtatgggtattttgcggggctgtgtcggcgtctccagaaattctggcgtgtcactgttaagggcttttttgttaagaagaaggaaaaaaaaatcccttcagctgagacttattttcatgaggaaaaaattgttgtacttggccaagtgttgatgaatgaatctctacccattgagaagagagctcaagctgcccagaaaattggactgctggccttcacaggtactgatctaaatggctgtgctaaaatgagtgtttcacgacactcattttataacactgtagtttagtaatttttcttagctgtaatcttaaaattctgataacatttcattggatgagggatatttgctaagcgaacacaaccaggttttattcaccttgaaatactcactctggccaggcacggggctcacgcnnnnnnnnnnnnnnnnnnnnnnnnnnnnnnnnnnnnnnnnnnnnnnnnnnnnnnnnnnnnnnnnnnnnnnnnnnnnnnnnnnnnnnnnnnnnnnnnnnnnnnnnnnnnnnnnnnnnnnnnnnnnnnnnnnnnnnnnnnnnnnnnnnnnnnnnnnnnnnnnnnnnnnnnnnnnnnnnnnnnnnnnnnnnnnnnnnnnnnnnnnnnnnnnnnnnnnnnnnnnnnnnnnnnnnnnnnnnnaggttgcagtgagctgagatcgtgccattgcactccagcctgggcaaaaagagcaaaactccgtctcaaaaaaaaaaggaaagaaagaaatactcactcctgggtgcttgcttaaaggaaccagggaggagaccagcaagcagagaccttcccaggtttttcatatcactgcttgcttatcaacacacactttctggtcttcatggcagcagcgtgggaggtgggggaaaacgacaggaaaattcaaagtatccaaagtatcctctacagggcaacaagaatatgaacatataagcattccaaagtgttactagctaatagatacaccaaatacttctggaaatgcaaatgcttgttttacaggaggaccacctgctgggaactttgcagctgagtacatggaagaagtggctcacttgttgcaagatgaggagttggcaccaaaaataaagatcctgctgctccagagtgtggcatgttggtgttacttaaaccctgtcagccagaaaagagccaaaagtctgcaatttattcctattctcattagtttttttgaaggcagattcgagtctactatcaaaagtgaaacaaacagctacctcctccttaaattttggacttgttacgttctctctgtcatgacatgcaataacttgtcttgcgtcaaggagcttaaagaccacagtgctctaaaatatcatttgcaaatgttggctgctgagaattggtctggatggacagagaattttgcagaggtgctgtatttcctaattggttttcataggaattagtttctctaaatccagttacatgttgcagctctctgtgtattaccctggaaaactgaaataaacaataaaaatcgatgttttcctttgtagttgaagagttctgtatagattttcatacagttaactgcaataatcaaacttcagaaaagaaatgctgtttaaaattacctcgtagagagagcccattgagcttgctcatgagtgtattctttcccattaggaaataaagatgttaaagcacgcagttagatacaatgcggaatatgaatgaaaccacctttgcaaaaatgatgacagtgagaaaaatctgacagcgaaagaaagctgacctcactgacgccatcttgcttctaacctctaagctgcccttgttcattcctgggcataggccaaactaactttgggaagaatttagttcatagtttaactatgaaacaaagatgattacctagactcttccctgaaacaaactccctccttgcttggggaccagactgcttttataaaactaacacattagccacagactggaaattatggctcaggagtcatacagccagaggccacaagattccaacctccccggttgcacctacagattagtattgaaaaacctaagattggtatttgaggtatttttcagatcctgcattctgatggatcagctggcaccacccagactgccaagctgggtcttctgatcttatggtcaccaaccagcaactgactcagcacaagaggacaagttccagccccctatgatttcatccccaatggaaccaatcagcattccccattccctagcctcttgcccatgaaactatccttaaaaaaccctagcctccaaattttcagagaggctgatttgagtaataacaaaactctggtctcccatttagccagctctatgtgtcttaaaatctttctctattgcagttcccctgtcttgataaatctgctctgtctgggcaaagagcaagaactcatggggcagttacatgaatacttgtaaaattacagaactggaattattattttttgccatctattatacgaaggctagagagaatgtctatccccaatgtctaccattaaatcatgaaactcttattttctaatatatctttttttgaagttgattaaaaatatgtattttacaactgatttcccattggaaaaaatatgctggtaattttttttaaccttgtgcttctgtgtagtaaaaaaaaaaaattattaaaagtgaaaaaaaaagacctcataaaaattaagttcataaaattctgaaattcatcagaagatgcatcatgtatataactgttaggagcaatggtgcactttgggagttactagatgatattaaaccaaggcactcagaaaggccaaatcctagccccacccacggctgcctccttcagcaggcactattgacccacctgaatcctttcagccctatttcagtacagaacctccggtggtggtgcttttgagatggttctccagctatcagagcatgatctggttgcacatggggctgactgggaattagcactagaattagcactcctcttgcctacctccacctgcagcagcccgcaactccactggcacaaacgtttggatggagatggagcgcgtgtgttccgacacctaaagttaggtaggctcttagattttcataaaaagatgttattctctctgttttgtctactagataatctgccacagaatacctgcactctatgtgtgttaaccaacctcatcaaaagttttattcgaaaaaataatattggcagaaaagtgcctaagggatatgtacctgattctctaactacacctgcctctagcttcagttgcaaccataacattgaattatgtactttcatctttcacagacttgctttgactgagctgtgctttagtgttaggcacagagggggctattttaaaaaatgtcgtgtagattcgtgatcctcacttgtatttgggataggaatgttgtggaggatgctaatcacatcatcagatggggtttccttaagaaggatctggaggggaattttctcagatcttagaccagaaaaagctatgttctgctgagcaactgtacatttccatactttgtggttttgtgaagtatggaatgtagagtttctcaactagaatctagttgataggaatacattaagggttggaaactggaagttccatttagatactgaattactgccaggaattactttttttcttttttctttctttctttcttttttgagatagcctcttactctttcacctgggctggagtgcagtggtgcaatcatagctcacaccactgagctatgaacattatcaagacaggggaattgcaatagaaaaagagtttaatacatgtagagctggctaaatgggagaccagagttttgttattactcaaattagcctttctgaaaatttggaggcatagatcatacataaccttgaactcctgggctcaagcaatcctcctgcctcagcctctcatggagctagagttacaggtggaagccactatgccttgctaatttctttttcatatatatatacacatatatgtttacacacacgtttttaaaatagagatggagtctcgctattttgcccaggctgatctcgaactcccaggctgaagcattccctcctgccttggcctcccaaagttttgggattacaggcatcagccgccagattcagccttttaatgcttttaaaattaagtttttatttcaaagtaatgcacgtacacagtttaaaaagtcaaataatgtaaggcctctagtgagaaacagcagtctctgagtcccttccccatttacactcccagagggaatcatctgaattgtttcagttgtttcttctggtatttatttaccttcatatttctaaataatttatatacattgttaattcttgtcttttttttttcaattttggggatttttgttcttccttctgaataggacagatggaatttggcattctaacactcatcttgcctaccttcacctgccctactcttcctctctcgatgtaattatgtcaca

SEQ ID NO: 369 - DNA, 5497 bp, Homo sapiens
agccccgcaacttcaccccgcgcgccgcagctgctgcgagcggacgcggcagggcagccggcgctggggacagctcgcgtccacccgacttcctcccggggtccccttcacccaagtgagccagctcaggctgtctgcaaagccggaggtgcgggcagctccgggcattgcattggtgcggaggcttttatatgccagagaaccctgagtgtgcccctgacatgacaaggagccgtcgtcgttagtgccttccttgctgagctgcttcgcgtagctttgaggaaggtctagtgaaattggtctttccattacatctggatgtactaccagagagttctgctgctgttgttttttttagcttttctttctttgagtctttaaagggcaattgtcgacactctgcaaacataccgatttgttgtctgcccactttggagtcttcaatctgggcagtaactatttaccctttttcctgctagcctgtccccctctctggattgaagtcacctgctaagacaatggactaccgaccagactcccggaaatcatgttggtaggatcccagtctttttcgcctggagggcccaatgggatcattagaagccagtcctttgcgggtttcagcggcctccaggaaaggcgatccaggcaagtgtaactccttcattgaaaattcctccgctctcaagaagcctcaggccaaactgaagaaaatgcacaatttaggccacaaaaacaacaatccccccaaagagcctcagcctaaaagggtggaagaagtctacagggccttgaaaaatggacttgatgaatatctggaggttcaccagacggagctggacaagttgacagctcagttaaaagatatgaaaagaaactctcgcctgggtgtactgtatgacctagacaagcaaattaaaacaattgaaagatacatgagacgcctggagtttcatataagtaaggtagatgaactctatgaagcttattgtatccagcgacgcctccaggatggtgccagcaaaatgaagcaagccttcgcaacatcccctgccagcaaagctgcccgggagagtctgacagagatcaatcggagcttcaaggagtacacagagaatatgtgcaccattgaagtggagctagagaatctgctgggagaattctccatcaagatgaaaggtctggctggctttgcacgcctctgtcctggagatcaatatgaaattttcatgaagtatggccggcagcggtggaaactgaaaggcaaaatagaagtaaatggcaagcagagctgggatggagaagaaacagtttttctgcccctgatagttgggttcatctccatcaaggtcacggagctcaaagggctagcaactcacatcctggtaggtagcgtgacctgtgagaccaaagagctgtttgcagcccgacctcaggtagtggctgtcgacatcaatgaccttggtaccatcaaactgaacctggaaatcacctggtatccatttgacgtggaggacatgaccgcatcctcaggcgctgggaacaaggcagcagcccttcagaggagaatgtccatgtacagccagggtaccccggaaacgcccaccttcaaagaccactccttcttttcaaatctacctgatgacatctttgaaaatggaaaggcagccgaggagaaaatgccactgtcgctcagcttcagtgacctgcccaacggggactgcgccctcacctcccactcaacaggctccccttccaactcaacaaatccagaaattaccatcacccctgcggagtttaacctcagcagcttggcctcccagaatgagggtatggatgacaccagctcagcatcttccaggaactccctgggagaaggccaagagccaaagtcacacctgaaggaggaagacccagaggagcccagaaaacctgcctcggccccatctgaggcttgccgccgacagtcctcaggtgctggggctgagcacctgttccttgagaatgatgttgcagaagcacttctgcaagagtctgaggaggcctctgagctcaagcctgtggaactggacacttcggaaggaaacatcacaaagcagctggtcaagaggctcacatctgcagaggtgccaatggccacagacaggctgctctctgagggttctgttggtggagaatctgaaggctgcagatcctttctagatggaagcttagaggatgcttttaatgggcttttacttgcattagaaccacataaagagcagtataaagagtttcaggatctgaaccaagaagtcatgaatttggatgatattctaaaatgcaagccagcagtaagccgcagcaggtcttccagtttaagtctcacagttgaaagtgctttagaaagctttgatttcctgaacacctctgattttgacgaggaggaggatggtgatgaggtttgtaatgttggcggaggtgctgactcagtattttcagacactgagactgagaaacacagttacaggtcggttcacccagaagccagggggcatctcagtgaagcgctcactgaagacacaggagttgggaccagtgtggcaggaagtcctctcccactgaccacaggcaacgagagcctggacatcaccatcgtcaggcacctccagtactgcacccaactcgtgcagcaaattgttttctcaagcaaaaccccatttgtggcaagaagtctcttagagaagctttctaggcagatccaagtgatggagaaactcgcagctgtcagtgatgagaacataggaaatatcagttctgttgtggaagccataccagaatttcacaaaaagctgtctttgctgtcattctggaccaagtgctgcagccctgttggtgtctaccacagcccagcggacagagtgatgaagcagctggaggccagctttgccagaactgtcaacaaagaatatccaggacttgcagacccagtgtttcgaaccctggtgtcccaaattctggaccgggctgagcctctgctttcctccagcctgtcctcggaagtcgtcactgttttccagtattacagttacttcaccagccacggcgtcagtgacctggagagttacctgagccagctggccaggcaacaggccttgctctattactgtgaagcactaacaaagacaaacctccagctccagaaagcagcttgcctggctctgaaaatccttgaggctactgaaagcattaaaatgctggtgacattgtgtcaatctgatactgaagaaatcagaaatgtggcctcagaaaccctcttgtctctgggagaagatgggcggctggcatatgaacaattggacaaatttcctcgagactgtgttaaagtcggaggtcgtcatggaactgaagttgccacagccttttaattacaggttaactgcctaacagctgtcttaatatctggcccttttcatcaggatggtgctgtggtttgggctggaaattgtttagagcctgagagacacgacaactgaaataaaaatgtaggccaggtgcagtggctcatgcctgtaatcccagtactttgggaggccaacgcaggagaattgcttaagcccaggaggttcaagaccaacctgggcaacatagcaaggccctgtctctagaaaaaaaatagtttaattagtcaggcgtggtggcatgcacctgtagtcccagctacttgggaggctaaggtgggaggattgcttgagcccagaagattcaggctgcagtgagccataattgccccactgcactccagactgggtgacagagcaaaaccctgtctcaaaaaacaaaacaacaacaacaactaaaaaaacatgttatagaaagaattcagagtctcgtttcacagtacctatctacttttcctttggccaatatagaatagggctatggtataattcaaatatattacatcgtcgattgtgtctaataatactcagtgaaagagtccatcttatcttaatatgtatgaaatttaaaaatagccatctttgtacttttttgcaagtttctctataagcttgaaatagtcatgtgatacttcgacaaacatcatatgccttgcagtttttctcggtcgtgttctcagggttgagtagtccccttagctacctaactttactttcaatacaaagcacaaaaaagaatatcttcaaataaaagtttgcctgcagaacctggcaaaatgacccattaggagagtttagatgttttaattttatgtgctcccagctactctggagtctgaggtgggaggatcacttgaggcagaggttgcagtaagctgagattacactactgcactccagcccatgtgacagaggaatgagagccagtctcaaaaaaaaaaacaaaaaactcccataatttattttgtttcttttccccatcctgaaaattcccaaatcatgtttccattatggaaaaatgataagtaaatgactaagaactacattaagattatgcctatacacttaaacaaaaaactcaaagcttatgcttttttttttttaattaatgagagctattttttatgatattcttaccataggggtgttttgctgctaagacaaatcaaaaccaaaagctgtagattcacaaacctgtgatgctctttgaggtggaggaacctagaagtcagagaaatcctaatggagtaggagtggaggaacatttaaagtggtccctccttctgtaaaaatgaccgtgggattagaaagaaggacatcctgaggggtggttactgcccccagggaaatcactcactggtaggattccctggccaaatagttcaaacatcaggtcccattattgcttcagtatcagagatgcaagttcattaagcaaagtacaagaccattcagtagctcttattaaaatatcttttcttcctctaaagagtgtacaaggtggggtatgccaaggtatcaaaacaatatatgtgagtgtaatttaaactgtggaatatcaactgtactatggacgtgtttgtatcatttagatgtcattttaaatatttacattttagcaagacttttaaaaaggactcatttcatttcaaagtgcaaattgtttgccaggcttctggcaaatggttctttcaactgtgaacttatcgtgtacatatctgtatatttataaatattatatatattcatacatccttcactttaaaggtacattgtacagtctgtagttaggaggtatagcctatagcttatgttaaatggttgaaatggttctttttatagaaagtcaaacacagatgttacaggattttgtgtttggtttgtcattttttttattttttattttgactattgcatgagtaattaattccagatcttttgtattcacttctgtattttatgtttggttgaggggtgcttttagttgtgtggcatttgtattcattgatctttcagtcatgtaagttaaaataaaaattatttttgaattactagca

SEQ ID NO: 370 - protein, 931 aa, Homo sapiens
MGSLEDLRVSAASRKGDPGKCNSFIENSSALKKPQAKLKKMHNLGHKNNNPPKEPQPKRVEEVYRALKNGLDEYLEVHQTELDKLTAQLKDMKRNSRLGVLYDLDKQIKTIERYMRRLEFHKVDELYEAYCIQRRLQDGASKMKQAFATSPASKAARESLTEINRSFKEYTENMCTIEVELENLLGEFSIKMKGLAGFARLCPGDQYEIFMKYGRQRWKLKGKIEVNGKQSWDGEETVFLPLIVGFISIKVTELKGLATHILVGSVTCETKELFAARPQVVAVDINDLGTIKLNLEITWYPFDVEDMTASSGAGNKAAALQRRMSMYSQGTPETPTFKDHSFFSNLPDDIFENGKAAEEKMPLSLSFSDLPNGDCALTSHSTGSPSNSTNPEITITPAEFNLSSLASQNEGMDDTSSASSRNSLGEGQEPKSHLKEEDPEEPRKPASAPSEACRRQSSGAGAEHLFLENDVAEALLQESEEASELKPVELDTSEGNITKQLVKRLTSAEVPMATDRLLSEGSVGGESEGCRSFLDGSLEDAFNGLLLALEPHKEQYKEFQDLNQEVMNLDDILKCKPAVSRSRSSSLSLTVESALESFDFLNTSDFDEEEDGDEVCNVGGGADSVFSDTETEKHSYRSVHPERHLSEALTEDTGVGTSVAGSPLPLTTGNESLDITIVRHLQYCTQLVQQIVFSSKTPFVARSLLEKLSRQIQVMEKLAAVSDENIGNISSVVEAIPEFHKKLSLLSFWTKCCSPVGVYHSPADRVMKQLEASFARTVNKEYPGLADPVFRTLVSQILDRAEPLLSSSLSSEVVTVFQYYSYFTSHGVSDLESYLSQLARQQALLYYCEALTKTNLQLQKAACLALKIATESIKMLVTLCQSDTEEIRNVASETLLSLGEDGRLAYEQLDKFPRDCVKVGGRHGTEVATAF

SEQ ID NO: 371 - DNA, 155462 bp, Mus musculus
  misc_feature (1)...(155462): n = A,T,C or G
tagatgactttttgcccttcccccatttcctctgactttgagaccctctttctttgatgaagaggagggacattgatactctctttttttggtgaagagggaggtatattgacctatgacgtatggttcaagggaagattggggaggaaaaattttattttcatgtattaaatgaaatatatttaattctaaaattcaatggaatatcaattttataaatgtaagtgatcgcagacaaattgatcattgacaaatcagaacattaaagttatttttctttttaaattttttattgattcctttatactgtgtgtgcttcattttggcacattcacacatacaaatagcatactttcaccatctccgcttctctctttactctcctgtatccctcttctcattccaggtccttttccccctaccttttagatgggctctttgtgtagccgactggcttctatagcgtgggcttccaggcttgtgtctctgtgtcattcactacatacagtctgctttaagagacttcagtggaggtcttattacacaggtattgtgtgtgagtccagtggaacaggagagggcaactgttgcaaaggtagttgatttgctagtagctcctgagaggcagactgtccacccaacacgaggccatggagccaggagaggcctgggccaaagcctctgttatggtctttatggagaggatggggtaagcaagggtaggccatataagcaagtgtatgtctgactacatatgtgcttgactctttaagaagtgggccagggccagactctataagaagtattcacagtttaaatattatgtaacgtgcttttttaaaaacaaaaaactgttttgtgaattcttccaaggaaacatgacctaaattctagtttttatcaaagcaaaacacaactctcatctcagagagaataagagacagattatgagccaaatacgagtgacctgggacagagattgaatgtaccagtgtgttaacaattcaggatgttttatagagacagagcaaagtcataagtcaaggcaccttccagatatattagtaagaatattaggtatgagggttgaaccaaagcaggaaaatctattgcaggcctcaggctgtattgaagacatttcccttttggtcagtagaagtcagtggtctcttgtgttaatagattcctacaagttttacgtgttagttacaaggatgttaagtcaggaggaatcccgtgataacttgtgagtaggcgcttggcctgtgtcatcccagcctgtccatgagcaccgagttttccatcagtcactagaccttgcaggaggttctgtgcaaggtatggttctttgcaggaactttttttttgctcacgtggctgcctcccaaaagtgtgtaatagacttttttcaaggcttagtaaatggtgttaagaaggttttcttcttcttcttctttattatagaattgtggagggaattggagagatcatgtagaaatattgattacttatttttaattgctgtccataagctggctctcttaaagcccagtgttggaaccactgtgcagtgtgcactgtgaggtgcttgctcttcattcagggtggagcacagagtgctaaaggtttgctggctcccagctgaccttcgcttgagatgttatgcagggggttgttctgggagggccataatggccttggcattgggaacctctcttgctatagaaaggagatgaggagaaaagtaccaacctcacagatctcaggagtaagtcatgtcccacagcatcagggggacaaaactaaactggaagggactttgtttgccttttctgttgaaacggctggctaaagatgaggtgggagagctttatggtaccagtgcactgtctttacgggtttctgactctcttgataaaacacagcttagagattcagttcttggtgtttgcccatgtgttaggcagtagggccactcacagttttgaagtttagatccatttagttagttttaatagtttacatttggctagttatgttacattagcattgagggccattgaggatgtaagggctctgttgaagctcattaaaagcaagcggtttcctcctcatcaaaagaatggcatctacacctgaccctggatggagggagacatgacattctgatctgctccaaagattagaatatttcatactattgtctcgcccttgagagttggggattgtcagtcacatgatcaaaagaccacccttcaagaagcctggttcaccaaaagccaaggcaaggaggtaggaataatacccccctcaactggacagtttatgtatcctcccacgaggcctttcctttttgtgtaggcatttgcatagttgcctgcatctagcacgatgctcgttggctttttggctgcccaggaaagtgttacttacctcttcttctttggatcctgtgctttgtttgccgaagtctgggcttgcttcctccacactctgtgctttctcacctcttctcgggaagcctcacttccttctgccttagtctcttgctgtccccattacctaagctgcttgatttcttaaagacatggcttcctcctctccatcctcctcctcctggcacctgctgaggtcttcagcttgctgaacctgctaatttttaatctttcaaactcttaataaaattggccttgggcttgcttccaaatttgtttctgaattctttcattaataagactaagatataaagtatgaacttcgatttccctataatgattgtattatgattaatttaacatttttagtaatatcttatttagaatttattagttctcttagaccctggagtagcaatataaaccttaatcaaaaatagattctgctagttcttggtttgcccttttggatcatgtgaaatattcagcttcctgtgtaattatgtaagtcacaaataatacttcggtcattgtttgacatcatgtctaactgtctggagcctagtggctaaagctgatacagaatagatgtcatcacagccgtagcactttcccattgtctgcttgttcctttttagacaggaatctgaaggtatctatgtggagcttagagtctgggcatgtaggatggccaggaagtaggttcctactgtgaccaaagaaaacataaagaagacatcatttcagaaaggtcatgacattactatatggttgtgaatttgaggggcagtgctgagcatctgatattttacctacaagttgtatctgaatgcttggtcttcagccatgacttactgtcatgtttgtttctttgataaaaatacctccatagaaaacaatatagaggagaaaggtttattttagttaaccatttcttttaagtccattcttgtggggaaattaaggcagcaaggacttgaagcatctagtcagattacaactatcgcccagggcagagagaaaagcatgcaagcatgctgcttgcttttgtgttcagtttgatttcttcactctcacagttcatgctgctgagctactggtgtagtgcacagagaccaactatgctatttaccatcatgccatacacagggcagccttaaccacaaatgttggtcctgttgaaagctacagtttgggatgagaagcacaagatactctggtttttcccgactacttgagagaggcctaagaggcacttgaatctcaggaacattgtcagagctctcatcctgagaagtgctccagaatggagttatcaggttagacagcagaagaactggcgagagtggccatcagacaggagtagtgcagaagtttagcgatttggaagtgggtggctggcaccctgcttttaataatcagtgagagtctgacagacattaagtaagactataaaaaacaagcttattaaacactgccgtctgaagcagtaatctaagaacatgcccagaacagttattgatgttcatggcaactaaaaaaaaaaaaaaaaaaaaaaaaaggaaatttatggtaacttctgtgatgattttttatttcttgctgtgctggagattaaaaccagggctttgcctatggtaggcaaatgctttactactgagccacatttctagcccttattaaaggtgaattttgtcccatgtaatagtggaaacgttaatgcaaagtagaaatagcctggccaaacatttgaaaattatatatacatttttaaagtataaagtctcgtacttagaaattttctttatggagaatatgtcattattagtgacctagtaagttaaaccttgctatatttttgcaaacatattttcaaaacaatctcattagtattggcttccagtaagcaaagccttgctatatcatggtatatgtctgcaaacagtttcaaaaactattaggaagttttggtcccacatttatctctttgtctctgtgtctctctttctctctggtgtgtgggcacatgtacatgttggtgcctgagggctgacatcacgcatctttctttgtctccacctttactttttgagatagcttctacctcaaggctggcagttgaagcacagcactatgcccagcttttgctttaggggatttgagcctccttccagccttcatgtcttactgacttttcaatcggtgtaaagagatgcttagagaggaaagagtttactagtgcttacagtttagagggtgaattgtagccatcagggcagaaaacatgagaggaagctggtcggcatggcactggagcagtaagtgagagcttacatcctgaggtatagccatgaggtagagagagagagagagagagaaacagggagggagggagggagggaggatgatcacacagtaactaggaacgatgtgtgcttttgaaaccccaaagccctccccagtaacacatctccttgaataaggtcacacctcccaatccttcccaaactgtgccaggttcaacagctgggacaaagcattcagatatacgagtctgtcgagccatcctcattcacaccgccacagctcagctttaggttttgagtagctaaaatattacaatacattgctgaaagttgtagcttacttgctatgttggccaaagttttacggtggtactactttaaatggaaacttaccaatgaaaatacatgcagcggtatattttttttctgtcaatctttctttggtaaatataaattttagaacataatcctacttttcacccttaattcaatacatatatattctactaaaatacctttaatttgttaggtcacctttatgtagtaaagtttgagtatattgtaaaggttattcttgaagtttagtaatacagaaatacataaaacactttgtgttttctggtttggaatgcaagaaacttggagaccacttcattgcattcttccagtaaggaaaaactagatttttaagaaagttcttttttagtatgaaaatccccaatttatttccttcagatatttatcctaggacagattgctgccctgcacatacagagacaaatagactcagtgttgggttaatcatgtgcaacaaacattactgaccatgctcaggtgtggcatggatatgaggattaacaacagcttaccactacaattatatgtcaagggctcttgtgtaaataatacctgatgtactaacagataagtaatgtaaataggcagatgggacgtttaagaaaaagtagagataaaaacaaacaaacaaatcttgactttgatgggctttcctgtagattgatttctgtggagaaaagagtctctattgaaactgaaactatacagaaaagagtaaaaatcaccacagaaaatggaacaggatatccaagaattgtgaaaaagactataatgtatgcatgaggggaattttagaaggggaggagacaggaacattgactgagagtgttcaaaattgtaagagatgtcaaaacccagacctaggaagcttggataagagtagcaggcataccccaaactacacaaaagtacattcaaactgcaggaaaggcagcagcagtggcagtctagagagtggcggagagggccgggagggaacaccttgcagggaggaagagttagttcctttagaagaggaccttcctttagaaaccatttaacatttaactagttaaggggaaaaaaaccctaccaatgtggacttctctagtggaagtgtcacttattgcaggacagaggcatagcagcttgaatatttcccttcatccttgagcttctactttggtttaaatagtaaatagaatgctttgctttgccagagtagaatttcaaaaaaagccagtataaagcagagttggagtttattaaatatacattttttatgtatatcctaattatgagcagtaagaggaatagaggcaagcactcaggaagaaagtaaggccacaccaagagcaggagtgtgggcttctcaagaagggtcacattttattgtcctagtggtgactgtaggaatttggaaaattttggaattttgttcagcaaccttcaagatactctctcctctgtcactactgccttagttacttttctgtttctattaagagacaccatgaccaaaacactgaattggagctcgcttacagtttcagagggttagttcatgactgtcatggtggagagcttgcagccagaagctccacaaacagcaggcagagagaactgactgggaatggcatggcctcaaacattcagtgacagattgcatctaacaaggccacacctaatccctccctaacagttccaccaactggggccaatattcaagtttgtgaccctgtggggcgattctcattcaaacacctatcaccacatttgcgataattttgttttgttaattgggattataagatggtgctagagtcttggatgggtttacagtctgatttgataaagtagtgctgcacacgggagttaggacagatccattcactgtaaatggagtttgtgatatggtttctaaattcaggtttatagctgggaagggagaagaacctgaagcaaatgctgccagttgtgttgaaattcttgattctctgctgttgagaggcctcagcctgtactttttcttgtctacctatcctgtctctttaaatgtaaagaagaaattatttcttagattaacagagaatttgctgctaatcgatgcatttttttttttttccattctttattaggtatttagctcatttacatttccaatgctataccaaaagtcccccttacccacccacnnnnnnnnnnnnnnnnnnnnatgcagaagatacaggacacggatatgcttatctaaacagtccctgtcaaggtgtggctccacacaccctgccctcgctgtcagggcttcaggctcatcctgttggaactgttgacttctctctctggaaacaacaagctccctctggctgctgcctttcccttctcccagtgtgagattccccatttatttgggcatcccttgtttttatagtctgatctttcaaatctgctctgtctcaggtacccactcttagactgcaggtagtcctttctcctgtatgtaatctggataagtcaggtataagatattctggatctttctttctactgatattactttgtgaagaattttaaaatatattgtccaaacaacacagctctacctcaagtggaatcagagatagtttagtctaagccaactatggatgactcccgtacccacccactccccccctttggccctggcgttcccctgtaccggggcacacaaagtctgcgtgtccaatgggcctctctttccagtgatggccgactaggccatcttttgatacatatgaaatcgatgcattttaaatgttaaaatttaccaatgttacaagttctttagatggtaggaaaaaatattgtgtagacacttggtttgacatattgcagtttgttgttcctctgtttatgcttgcgttatgaagaggtgtgagtgactggcgtcctagtcccttcctctgaggaactggtgtgcttgcaaccagaactcatctatggaacaatacagactgcagcttaactgattgttgacttgcaaaagaactagaagcagctcagatgtgtaatcccagcattggagacacaggtgggaggattacaaactcaggccagcctgggttatgtaactagacatctcaaaaacctaaaggacagcaaaacagcaacaaaaccacaacatcagaaaaccaagatttgattttcttgagcctaggctgtgacttctgtatttaaagatgccatagtggatagagtgagtttctggttcacaggaaagggtagctatagtatgtagttttaaagaaaccgaacccatgctaaatcaggctatgcaccggcctcggcggttttacccaccctgatggccagccccaagcggccatcttgccctggttccctcggctagcctgctgccaagttgctctggtcaaaaacccactcccaagctagttttctcagtctctgcttgctaaccttaccaaaccagtcttttcctgaaatgcctgctcacacttcccaggccagccataggaggtggcctgcagaaagcctgcttctcagatcccgttagccctgtgaaatgaaaacactaaagacttacaatataccagccagatttataacggtcaatctccaaccccaaaatgcccatgcaaagaacacaaaactcaattgatataaatacaagctgcacacccaggttgaacaaatgtattctacactgctctattgcccatctatgaagtcctagctacgtgcggctcctccaggccacgtggttctggttcatcttcacttccttctccgtccatttattctccctctgtccttcatctcctatcaccttcttcctcttttccctgtctaaagcttttagaccttttcctgcccaatcacaggctctagccttatctgaccaatcaagatttcccctaacctcacctgagtatgtggcccactcctctccagggcacccctcttgagggagcagaaaatacaaacagcaatccacaacacgtgtagtacccaattataaataagaaaccaacacatgatcacagctgtgtttctccctgctttatagatagatgttagtaatgtctcctgtgtcttaatgtagcagaacattttcttacagtattgtaatgccagttaagttgtggaatcattgaggacaattatccaggtgttcaagaaaaagacatgaatattttaagtgtacatcattaatcctttaaaagctaaacattgttggactttcaaattacaagtgaaaatgctaacaacagcttagaggtttactttatttcacttcagacattgatagttttaatctctacagagagctctctgggtccccttccttttaagagtctagagtttttgctggaactaggaatattattagtgagatctttgagagaaatgacctgggtcagtgtgtcacttctgagctagtttggtggggctctgtcacttgagggaacagttaccctaatcctatccaatttgattgcagcctcccatccatcacatcttgtcccattccagtggtatgtccctcaccatcttagtagttcttctcacacgattctatcctatcatttcatccaatctcatcctacccgctagtcctaccttcccatcccatcatcgcatcctaccccaccctgctccactccactcctcctagcatctcatttaattccagtgctgcagctcatcccttcccttcccagcctatcctgttttagcttatcctgtctcacatttcattccattgcatctctatgtcttattctatcccagcattccatatcatcccattttatttcatcattctgttctatcccattgtacattcccaccatattccaaaattccaacagcctatcctatcatctgtgttggcctgctttctgtcactattgtagccaggtggcacattatggcaggtgtgcattgaggagcaacaccagttctctcatgttccagggagcaggaagaaatggaacatgtttgaaagcatggcccgtggcctaagggctaggcccaccttctgaaggtccactacactttctagtagcaccactctggaatcaagtatttaacacattgacttttgtgggacactttatgtttaagctatagtatatgctaacctgaatgtacatctcacaggctgacatctgcaatgagttcagttctagaaacaacctaggtgctatatactatagtccccttcttcagggaccaaaaagtacgagggcctcatggtgggtaacagcaagtctgggattcatcctctatatggtggtcactgggtctctgccttttaatggatagaacatagcataagtgcagaagcagacagaggattgttatatattcccttgtgtctgtggtgtatgaaaacttgaaatacctgatccacaataatgtgatcatcagagagataagtttattagaggaaatcctgaaggtacccatgagcaactggagctcatgaagagtatggtgggctgaatgaaaatggcccccagtggctcatatgtgtgggcttagtttttagttgataaactgtttgggaagggttagaagatatgaccttgttggaggaggtgtgttgttgctcgtaggctttgaaaagcccacaccaggtcctctctatctctctctttttttctctccttcttcccttctctctccccctgtaggccaaggatatataagttcttccttaccaccatgtctgtctgcgtcccaccatgaagataaatgacctaactttgaacctgttagcaagcacccaattaaatgctttcttttaaaagacaaagaggaactgaaagtttacatagagcaactgattgctctgacctagatgctgctgcctatgagctaaaattaggctgggcggtggtggcggcgcacgcctttaatcccagcacttgggaggcagaggcaggcagatttctgagttcgacgccagcctggtctacgagttagttcccgggccagggaactacacagagaaaccctgtcttgaaaaaaaaaaccaaaataataataaaaaaaagattggaatgagagtcaggactcattttggggcaggagtaagatgaagaaagcagtcagatcttggtctctaagacaccttagtcagagatctgtgccatcatcatcactgcctagttgaaaaaagtggagctgagcaaacactctgctgtactagatgagtatagaagtttgagcttcatcctttgtatttcacatggatcaggactctaggagcacaaaaaaaaaaaaaaagacaaatacatttcacatacaaagattcagtattttcttaagggtaaagaacatcatcaataatatgaaagccaaatactaacctgggccatatttacagggacagagggctaatgttcttgtcagagattttattcttttgttacccatttatttatttaagataaaaatctcaccatgtagcttagactggcctagaatgtaaccctaactttccttaaacttgtgatccttcctccttgcctctgggcccctgtgttggaattattggaatgtgtcaccagcctggtcttatcagagatcttaaaaatcaagcaacaaactccacaaaaggtcatgaatgtaaaattcacatacatacattgtaagttgaagccatgctcttctacctatcacatcactacatacaacatagattgttatatgatgctgctgatgagaaggtatgttgatagaaatttctttgggaaagtttggtaacagaagagttttaatatgtacatgcaataaccaagatttccctttaaacttaactcaagtaaatactgacaaaagtaaatgtattttgtgtaattcattgttatcctaggaataggtcaaaattggatcatgtaaattcctcttatagaataattatttttatcaatatactggaaaactagccatgaaaatgatatagacttgctagcatgtgatagtatggagtgatatccattatatgtgcattttaggcacaaatgccaggttataaaatgtgtatccaatttatcacattatttataagacatgtagtaacgtctgcaagtaatgtctggactgaacaggactataatatatatttagtatatgtatgcaccaaaatgttttaaaagggttggttgtctcaatggtgctggtgattttaattgtagtcacactatgtagagtgaccttcttatgagcagaccagaagcagtgaaatattcaaatagggcaggtaggtaggaaggtgaagagacagtccaaagtgtgtccctgtagcatctgccctcggtggcctcaggtgtaagtgggcctgcaggtaggtggaacccaaatgcaggcagtgctggggcaggagggaggggcagtagagcgcaccccagtcttggtaggtgaactggctgtgtcccaggccggaagggtaagcaggctacactccaggccggaagagtgaaccagctgacttctctggcagcgggctcctcacagctctctctaccaccgaggttttgaggcaccatgaggtttcgggccaggatcaccagcaagcgttttatagagctcttcattcaggtcagcagcaccgtagcaaagctggcgaaggtctgtgtgctccgtgtgtgccctgacaggctgtacttctgtcccatggggctgctgggtgaggcccagctgtggggtgagatgcggcgcgatgtcttccaccacttctgcatggagggtgcctcgcaggagttcaacgagatctgtcttgagctgatgtctgagcatctggccagagccgtgaagaatgccggcaatgcttcatccctgaagctccagctcaccaacaagcagcgcccctgccttactttggtggtggagctggcatcgtgccccggccacacccgtgctgtggtccacgatttgcctgtgagggtgcttcccagaaggcgatggaaagactgcacagagccccatgttcggggctctgatgtgagtgtttatctgccagctctgaagaccttgaagaacatggtggaaaggatggcaaacgtgggcagtcatgtgctggtggaagcaaacctcaatggcagaatgaacttgactgtagaaactgatagagtgactattaaaagctattttaaaaatcttggaaatcctccaaatgccgttctgtgtatgtctcaaggcagagacccagaaaccatggtgcaagtgcgggtggataataggaagcttctacagtgttttgatggacatcagataaaccccacaatggccttatgtaatattttgagcaatactctgcttcatcttgttttggttcatgaagatatttctcttcagtattttattcctgcttcatgaatttcaagcagccttgattttctttttaaaagaattcttaattgaagcactttccagaactgagactttgagttacttgtgttaaaagcctgcaaccccatggatttggtagagtgtttattttgttgagtgcttcctttgtaaactgttaagaaacagttggagaaataattaaaagttcatgtgattgtttttttggttttgacagttacattatattcaacttagttgttttggaaaaaaaggattataataaaataatataactgaatcctgaaacaattattgtattattttattatgaaataaattgtgaagagtgagaaaattctccttttaaaataaactaagtattttgagagacttaatgcgctcagtctctctgaaaggtctgagatggattttgtatgtccaccacagattccgagaggcaaacaagggtcttctgaaggtcctcggtaggagtctttacgttactggtgagtagccatttcagggtttaaactctctgacaactctcttcctcacctcggagtcagacacttgtttgtttggtgactatttaaagaaaggtgagaactatttgtaaacgctattttgggaaagcttcgggatattcaggttgtgtgtgtatatgtctgtgctgtaacacagacatgctttctgatttctattggtaagctcaaacacaatgacccaggcaacttatagaaaggaggggtttttgccttatggtttttagaacaataagaatccattatgacagggaatcttggcagcagatgacagtcatggtacaggaatagccaagagctcaaaccctaaactttgtgtaggaagcagagctttaactgggaatgacagatggcttttaaaaccccaaagctttccccttgtgacatacttcctctaggaagctgtacctcctaaaccttacccagacagcactaccaactaaaccagctacatactcatttgaaccatgtcttccagctttatcctattgtatttcatttaattcaagaagaaagagatttcaagctataataaagtgtgtgtgtatgtgtgtgtgaagaccagggaacaagcctttcaggagcttgtctttagagccatggtttcttattgctctagagcttgacaagtaagctagactggccggccagtgatctctaaggatctacttctccctgcctctccagctgcaaatgtgtgccacgccactcttctgtttgttttgttgtttctcaacataggttctggggattagacttggatcctcatgcttgagcagtaagcacttcagggtgtgctgcccgaaaattcattgcatatctctgggttgtagtatgttcagatgagagccttcgtggtatttgttggattgatcaactctcttctttctaaaccttatgaatcccagcacatccctttttgctaatcatagtcaccattcccaatggttaccggcagtgacatttctgttagtaagcttttctctataatgtcagtgataattccttaatctcattaagatgtcatgccactgtgtttttggcaacagagaaagcagagcatttgtacttagaaatttggttctacgttctatgtgaactagaccagattctgaaagtagtccaaagaatccacgtgcttatccaatttggggtgtaattttcgtagtgtcagtaagataattaaatcactcagaggactcaattttctatgcaaattaaaggcgagtttgcctttgtcaagaattggtttgtggatgttaatccatgagacaaattacttattttatcttttcttgtctattttcaatgcagtaaatgttatagtatctttggaacaacacaattatttgttaaaagagttgttaaatgttctcccctgcccccatgtatgcctttgtaggtccttaaatttttattaatacattaccaggctaaattccacatcatagtttccgggaatatacttaagtatctgaaacactattatgtcttcttttagaggacgagtaaaagagagcaatagttatccctttaaaagaataatcatttgtaaaatgctattttatataaaattaactttacctgttgattattttctattatttaaaatcagtttattagttgcttgtttgtgtattttgtcaatgttaggtataaatatcttcatcatgagtttttaaattaacatgaactgaataggattttaatctgttgcatttgtgttttaattcaaaattatatcaggacatttttaaactttattttgaggtaacttcaaaatttaagaaaataaaagccttttaataatattaaaagtaacaatttctgccaagtcacttagccagatcatccaatatttacttttaggcccgttttctttattctttccatttacctgtttattttgtgtgatgccatttgaaaataaatgtccatcaactgaggtggatgttcagtcttttaaaaatttttcttgattttgacactttcaaagtattattataggtttatctactattcttactaatttggcttggacaataaattgatttctctttgaagttcatttatatggagttgtttaaaaatactatatgactatccagtttttaaatcatgtacttactagtttagtgttccttgagtgatttttctttgtaatatgtatgtctatatatatgtatatatatgtatatgtatatatatttcactttacatcggatcactgttcccccttcctgattttctctgtaattattagtggtcataggatagtaaatgactttctacagtaattattctatgcatctcttcattgattatgttcctagagtagagttgaatatttttaaaacatacacaacttactgctatcagttttgttttatttttcctcagtgtgcactattaaaaacaggcaaggggtgcaggcacacataagagagattgtccttgtatttgggttagtattgtaacactaggggacacaacaggagagccccctggacaactccctttggatgctatattttcctaaatctggacactaattgtctgctaggtaggctgctacaaccttgacatgtctccattcctctgcctcttcttcactggagcatgccactgtgtcagagttttttttatatatgtcctcttttatatgtgcgctccatctttctggaagtagtttgttgcacacaaggaaattcagagcagatgacttttttgaagatactgttttgttggtgatatcagcttgaaatattcactatgagaagtgcctaagtatttctaccactatatgcattgcataaatacttatttatataaattatgcatcatagatgtgtatatacatatactatatatgcataatgttttagtcgtagaaaacattttgaaacagggtcatacaatatagcccatgctatctttgaacttactcgtccttagcttcctgagtactgggattacagatgcgtgccatcatattccacaactgaatttatttatcttctgtgaagtgttttcaaatcttttcaaatcatttgcttatttaaaaaaatattttgctattaagttccattaatttttttttatataagctacttagttgtgtgtgtgtgtgtgtgtgtgtgtgtgtgtgtgtgtgaatatttttttctgggacacttctctgggtgagtagaggattttaattttggtgaagtaaaaaaaaagtttaaaaaaatgtatggttactttttgtttaattaaaaatagctcaatctatacttccagccaatgttggtagttttttatggcatcatcttgtactttataattttagttttcatgtctgagtctataatgcactttgaagtgagttttgtaaggtatgaggttatagttaaaagctttcctttcttttcctgaatacatattcaataatttgcacacgtttgataatattatctattttctccattgatatgctttggaacctctgttagcagtcaaggaacatgcgtgaggtgttttactatatcccaccacctgtcagcccaccttaatggtaataacacattgtcttcattgctgtagacttgtaaaatatctggaatttatgcactttttttgttttaaaattgttttcactgttctaagttccttgactgtctttaggaatttttgagttattttgccaaaatcaatatataaacttgcatgaatttatagatcagttgatattttagtaacatcctgccttatgatccatgaatgtggtatatagatcttcacttacttaagtctttattattcctgtttgtaggttttttttataagttcttgtacatttctttgctcataatgatattttcaatagaaaaagttttgttttgtatgattgttttttgacacaaaggcccattcataccaggctatcctagaagtcactatctaaccaccaaggatgaccttgaatctctgttcatcttgcccatatctcccaagttctggacttaccaacaggggctcccatcgccagttatgcagtgttgaggaaccaacccaagtcttcgtgcatgctaggcaggcattgtagctgagctacatctctagcttgcaaatagaacttggaatttttttctaattgtttccttctggaatgttttaagtagctacatttataaagattcatttgttttatttttaattatgtgtacatatatgcctgtgagaacaggtacccacgcagcaaagagatatcagatcctcctgcacagggactgacatgtggtgtgagctgttcaccatggtactagaaaccaaacctgggtcctctgcaacagcagtatgtgctgttaactgcggagccatttttccagccctaaacaatggatttttttttttaatgtataaatgtgaatcctaatatagctaaactcagttgttagtgctgagttgatttagttcagatgatttttcgtactttttctctttgtgacctctttactaaaatgcttgtaggtacataaagttgatatacaaacacttgcagataataaagcataaataccttttgatgtagaattttgccagttattaaggatgaatgcagacttgcatgttaatgaaatgatgtgtttgttaatatttacataagggattcaggcttggcaaactatttgatgctgtaggatgtagagtatcttaagaattttcagagatgattgatgctctagttttgaatgtaaatgaagtggctgaagatgaaggaggggaggtagagagaagtctagttctaacaagttttaaacacaaaatacttatgtttttccaacataaagcttgtggacagtgggtatcctacaaaaacttctaaaagcaaggatgaaattggttagatgcttagttttgagaactaacagataattgctgagagcggacatagcaaattagagtacagtatttgagcagagctctattttgacttcccagtgtgcattttcatccatgctgtcagttcttagcagtaagtgaatatgtgtttctgcctataaatctacgtcataggtgttcagaaagcatatgtaactcataagaggacatttgcattttgagttagttgtatgtatatttatgtactatatgatagaaaatataaactacattataatttaaacaaagtgaattcctatatttacagggatataaatatattttaattacaactatagtatatttcttagaaaacttttaaagtagaacaatgagatgatttcatgtagtatttgtgactcagttatgtaggcctagagctgtgcagtaacatgatgataacatttgggacctgggacttatggttttgtttctgtgaaatatttctcacagtgctaacaagtgtccattataaacttcatcttggtaaatgttgatggatacagtgaatgaccaaaccaatccaagctccagaactgtagtgaatgaatactttttatgtattgctcccaaatgtcaaacattcctatgttcatggtttctgttagctcaattggcaccaattctctgttttaacaggttgcttctataactggatcacgagtttgctgcacaaagtaccatgtctcgatcccggcagcccccacttgtaacaggcatctctccaaatgaaggaataccttggaccaaagtcacaattagaggggagaacctgggtactggtcccactgacctcataggtaagggcatggcctctcatgcattgtgacaagctgggttttattattaatgtaggatacatagttttgaaataaaaaggaattcttttctattttttttaatgaaagtcattatcaaattagatctatgctgtctttctacaaattctttagaaaatatgtcatggctaaggtttattcctgtttcttcaacttggtgagccctgcttattttgctatgatgaaaccttaatactgtttttaaaaatagaaatgaatgttgggtagctgggctagcatgcagattttaaatgtaactcataataaattatatgaactacaaatgaagttgtagaggtgaattgccagggcatgctgttggatattgttctaatctttcacctgagttcactctagatgtgacattctcacaactggtttcctaattgacagagacccagtgctgagttctagagtctgagctggaactgcctctcgcattaactgctggttgactagtttttgaccatccagaaaatattttctttttagaggaagcaaattgaagtttagcattgcagttaataattgaggtctgtgctgcccagatagggaatctttgctagggttacttaattatattatgtgtaattttccgtttttatccttagctatagtatttgatagtttagtaaacatctcttacatttattcttacaaagataggtgtgtgaagagtgtgaccttgaacttctgacccttttgcctcttcttaccagttgctgggattgtagccatgcacagccatgcttgatgcatgctgtgctgcggaccagggcaagggctttgtgtgtgctaggcaatcattctagcagaggagccacattccagcccagaggggtcaggtctcatccagggtcttgactttgtccggttccttgtttatccatactgggaaataagccttggaatgtatgaaaacatactatatagatggaattcacttctaaattatgtcctatatagtgttaaaacacaacagttagcagtctgtgtacattttgcttttgctttagttttgaatggtgctatttttatttgaccaagtgtatattactttcataaccatgctagtttagctgttgccaagaacttatttttaaaaggagcaaactcaacttgttaaataatttaagtgtttttaactgaaatacacctatattagtcaagtaaaaacactataaaatctactttacttggaattctcttactttttaaaacctgagggtaacccaggtctgggggtggactcctttaagtctagccttgggagtcagaggaggcagatttctttgtttggttgagcccagcctggttgacagaattacaggccagtcagtacaacatagtgagactctgtgtcaacgaacaaacaatagaaataaaaaatttcagtgccccaaaccaatataatatgatgctattatatttcatcaagttagatttgtcagtttttagtaagtaagcaaaaaataaaaagcttaagaaataaataggatacatgatcttattttcattttgtgataaaaataattgaagtctgcccccattcctcagtttgaattatagttttgttacctggcagggtaattaactcatgagtgatttacaatactgtggttttacactatactctggctgggcattgctttcagtcactccttgttagggtgtggtgatgggcctttgtccgggtttactggaagctgaatgacagaaggcatagcatagtgtctgttttattaggaaaacacgaaagcggataaagcaccactgagatctcctgtggagatgtgagaactgagagtaacccagcagaagccaagagtgtgtctgtgaagcactgtgctctagcccatgcgtgatacacattaaatacgcagctcagtccattctctagcctgtgtgtaactgacgtcagaagaagcacatacaaattctttttagaagatggatatgtttaaaatctttttggaaatgatcactaagtgtattcctgtatcttaacaccctgtgttaataacttaaacttgtaatagtagcagttctttctgagaacagtttaagtcttgcagcctaagtaacctgactgcctggacgtagctggaggccattgttctaattctgctgatggttgagggagtgaaggaaatcttaggtatcagagagaaaaccagattccatggcctgtgccaggcgctgtagacatctattcaaacaggaaacattattatgtgtttttattttttatttgttgtatacatgcttttacttccaggcttgacaatttgtggacataattgcctcctcacggcagaatggatgtctgcgagtaaaattgtctgtcgagtgggacaagccaaaaatgacaaaggagacattattgtcacaactaagtcagggggtaaaggaacctcaactgtctcttttaagctactcaagcctgaaaaaataggtaagactttatcctaaagaaaagctattgacctttagatgttaaaactggtagacgtcgtataaaacgcgcttaatgctcatgtcttattagatgtagtgtgttcattttgacaacactaagatgtgtctcaggttgagttaaccttcctttgctggcgactctcatggtagagtcccccgggctggctctgaacccctgtcagcccttctctttgagaggcagttccctaagctgactgtcagtgtgaagacaggtctaagaattattgtctttccaagttactggtgacatctgtcccttggctccttgatcttgaacatatgacattactttaatgttgttatacacttaagattctaagtgaaatagcttctactttggccacatttgtggtggtcgtatccttgtagggccaggtgaagtgcagccctctctacctagctctctgtgctttgtcccctgaggtcccacttcccccctgctgcttggcagccttagtatttggggctgaggaaccagactttgatctccagcagctgtgaagctccaatgcctgttttctgggagtaaaagaagaatagcaccaaacattatcaacctcatagggttggataacctagaagataactgtgaagtgttaacacttacaagaacaaattattaatttttaaattgttccaatggatactttatctctcttaataaaatattgataggtacctcattgtgattttgtaagatcttacaataatatacaaacataaaatttttgtataagaccatcaatccttattatattcagtcagtatctctctatatattgaaaaataaagttttgttgtccatctcagctcatagaggtttattctatagtgctggcctccataaatccttatatgtacttttgaagtaaaaacatgtaaggaatacaggaaaatgaaaatgaattagtttatatatattggtattagtatacatttgtgtatagaaatacaacaccatttaaatatatatgtatatatgtgtatatataaatatatgtgtgtgtataagtatacatatatatgtgtgtatatatatatatatatatatatatatatatatatctttagaaagtgaactgtaaaatcaaagcatgagcctattttacagatttttagaggatgtgtaaacacttttctaaaattcatcattttataattgtttatatagcacataaagaaaacttagttgaaaataaaattttattttgagtacctacttcaggatatttagaatagctcatagaagatgagggccagatttaatgacagccacagaatgtcggatttctgcataagcttgtcctgagcccttgttaatatccatgatggctgctgaagtagtccttttgcacagggtcccattgctgtctggtgctcagataactttcttctgggaagcctcagtgtcttccactcctagtctagccagcaggacacacttgctcagagtgagttactgagtcttcagtcctgctttgctgcagcccagagtccctgcagtgctgaaggctgtgctgtactgagtagggcagtacagagcttggtcccatgaaagagatgctatctttagagtttgtgtcttctttgcagatgtgcacccagtctgttttccctgaataatctgtttttccattatgcaagctatgtattctgtaaccaatttaattgtttgattttattggatttaccaaaaagataccagcctaagatttttttttctaatgatgtaggacatttccagtattcagcataatggagagaataagaaataacaaggactatactaattttgcatagctattcatgttagtgtttagagagataaagcgagttttcaaaaacagttttcaaccatttatattgcacctgtagtaaaatgactttcgattttggaagttaggaaaagaagcttatgttacatacaagtcatacctgtgtgatgttacatctaagtcagatctgtgtgatggcttctcagcgatcgcatgcaaggagcttgctgtgagattagtgctcaacctgaggcgtttaggactggagatttcgcagacagtttttccaaaaagttcagaatatttacttgaataaagagatattataagttatattattatacctcatactttgcaaatgatattattaacttaatcattaatatttaacaatgtacaattaattttatatgttattgagaaaacatctttttttttttcagaatgttttgtgagtggcttaaaatcacctccattgaataatgtatagtgaaatcctaaaccaaaaagtgttacttttgccattatagattctcagtatttgttataaggccagcaggcatgtaaagaacttgagctgtagtatccttaagtctcttacaaaataaagcactgtggtgagatgtcaaggcacctggagagtctctgtcttactgagtgcatattcctacaggcattttagatcagtctgcagtgtgggtggatgaaatgaattattatgatatgcggactgacaggaacaaagggattcctcccttgtctctccgtcctgcgaatcctcttggcattgaaattgagaagtaagtaccatttggttctttaattttaccgtctaagagttttatgttcttgaagtggagggattcatatttagggatatcccacatgggtcatttactgtattatttattttgattattaactttttatttttatggtaatatgtatgaggcttaacaagttttgcttcagtcagtggtttcacagataaaaatctttgacaaatttattttagtttttttggaggagtttacattgtatgataaagaatgttttgaaattttaataactactgtgctttggttttgggggttgactgtgggatgtgtgactcttacatgataggcaagtaaggtggacactacagaggagtcccccatcccataacatactcttgattaatgatataagcatcagtacattttcatatgtttagatagaatttgaaatcagtagaattatctattcatttgcttcagtttcctagaaatattttagaataatttagtccaaagggatcttttgtttttgatatgtcctgcctaaattcttacttaaggcagccctatttagctttatttatcagaattgtgccagttagttatacattttttcataagtgaatttaatgttttgttcttatattcccaagtatgaccaacttttttcatatatcttaagcaattcatctgatatattaattttatataatttattttctggccttaataattctgactacagagttacgtgatgggtgttgcctcatgaacagtcatagaaggtagcaagttagttctagtaacgtcttacccaaatctgcgtgtttcgttttctaagaatgaggaccattttttcccactaacctttaactacctaaccttcatgtctacatcaaagatcattaatacttttgagagcaaagcgcattttcactgctatggtgtccctgctcaggtggatacaaggggcccattttgggtaggaattgtttgttgaaaaaccctagagtgtaggagcttttagtgagcttgggatgtctaggtagcatctttaaagcaggggcattctaaaactgtctcaacgatatttgataccctgtcaattaaaatcaggacagttcaaactagaagggtaaagggtgggtgtgtgggagcacactgtcaactatgcatacataggcttgcagttgatagaaaacccatgaagggcctgcatcaaaactcctgaatgttagcttcttcttgatgctgctgtgaagtacgggaaggagggatcattctgactgctcttccttagcctttacaggtgaaggagaccagggcgatgcacgtgctctataggggcgtgagtcagaccacctgtgctagacagggttcctactgctgggataaaacaccacggcccaaagccacttggggaagaaagggtttattttatcttaccactcttagttcacagtctgtcactggggaaatcaggacaggaacctggaggtaggagttgatgcaaaggccatggaggagtgcggcttactgatttgctctgcagtttgctaagccagttttcttacagcacctaggacctccagctgttgtgtgacagaacatttttagagagacaagttacgtgtctactcatgccagataggaatcccatgacaggccaaagtatggctatcaccagtccaactggtgaaccaatgagttttaatggggttacttataggaatatggctagaaggggttactcataggatcagaagtgactcaaagacagctgtttcactaaagcccaccccagcatgggtaacagctcacaaggctaggaacctggaatattgcacagcctgcgggcagctcaacaggttgtagagtgttctttctgggcgataagtttgtccaaacctcttctaggtagcttagcttgtttctgcttcttccaggcagctgttctagtctcagagtcttcttttcagctcatcctcactttgggagagagtctcagctttaatgcttactctacctcataggagcctagtgaatctggtcaatttcagggacttcctaaagctattttgcattgtttacctttctgcttaaggaacttgagggtggaatgttttaatgttggagaaaactgttatatagacaccagcccaactcagtatcacccataataggcagggccctatgccttgcctacagaccgattttataaaggcgttttctcgtttgagagtccctgttctccagcttgtgtcaagttgacacagagctgagcagcatagcagccagtgctcattgtcgtagttgctactttcactttcattctgacagatgttttttccatagttcttactgcctcgtcctcttcttaccttttggccttgtgctgctagccacagagcagtttgattcgaaccatctctagtggcattgtagtcaggaaggcaggcagaaaaaatggcatgacaaaaggacttgacttgctttggaatttctttatatttctcttaagaggtagtgttctgtgacttggagccaaactctggctttgaattcggcatgcagggcggactgctgcccacttgaggtctggcctaggtttcttaggtttttctcgtgggctcttgtgagggctgtacatgaggacaggtgagcgctgcagccataatggcttgtgtgcttagtgataccttgcttctccctgactcagaacaaaaccttctaagtaaatagtgtaatttcattctgttgctatgataaaatgtcctgaccaaacgcaacctaggggaaaaagagtttgtttgacttaaaattctaggttataatatattattgtagggaagtcaaggcaggaatggaaaacatcctatccacagtcatggatgaagtaagaaggcttcctgctcaggactcctgtagctcactcttaagcagcccaggacccagctcagggcatggtaccacccacattcaaggggttcttcccacctcctttaacaattaagacagttcccaacagacatgcctaccagccaaccagtctagatcatccctctgtcagagcctttccaagatgattctcggttgtggcaagttgacatttaaaactatcacagttaagtttatataataataaattgtgttaaaattaaaaaataaatattatctagtcaaacaggttttctctccttccctgtcttcttctactgctccttccctcccacctaagacagctacaaagattttcctgacttctgttacaggaggatttgtttatccttttgttgtgcctgaggctctatcctgagttgcaccctggcccaggtacagaaagagtgagggaaaggagagccagagagtcagacattagtgagagtctggcttcctaacatacttaatattttttagtaaaatccttttgttcccctaataatgttgcattcggattagaatccttactgcctttcattttactaatgtcctgtatgaatttctaaaatcattaaaaaaattaaattgttggatgaagagcatggagatcttaatattatttgctagtgtaaaagtagtaattaacaaggtctgaagaagtataaatgcatctcgtaaaataatcacttgtggtcctggtgacttgtcagactagtgggaggcggcctttggaagatgagtcagcactcagtacttgcctgggaatgtgaggttcactacagccgacttaggtgtgcagtggaagggtggggagtcctgtggtgctgtgcctgggttctttgtgaaaaagcaagtgaaaataacataatataggctccttgatgcttttggtatgagtcaggttttaatatattttattggtagactcagcatgcatgccgtcatctttcagccccacaagtttttaacaattggcatttattggtgcctttgactgttaaagtccttcatgttcctaaatttttaactgatgtttttgcacacatggtgccatggcacttataaaaacgttactaattgctctgaaaaggtaacttcgcttttactgagactaggctgcgcttgtaaaaggtctgtatttctgatttactgtgctgagtgtcacaaatacatatgttcttgcttggttccagttataatggatacaaactatttaagctgtaaaagaagataaaaataggctcatattaagtgaaagtcctcagtagattttgtttcttgaaagtcctgtttgcctaagaagaatgttcttcaagaaagccttggcagggcactggtatgaagtgaaggcagaggcatggagcgtggctcctgttctcaatcacctcccactttttgagtgagctgttactaggggttggtgtcttaagtattcagttggtacatagatattatctgttttatttctacgtggattttgggcagtgtacatccggctctagtcttattgagtcacatttccaacagaaagaaacagtgactagttttcccagtacgtttagaaatctgcctttacaaaaaaagacagggtgacagcagggtcattcctaagaagatcatagaagtgtctcatttaacttagaattttgtaaaaagtagattggtgggctatggtacagtgtgcaagtccagaaactatgccttattttaaaataaaaaatttcccctaattttaatgtaacatttgtaaattatgttgttgaaatttaaagctgaacgaaataagcatggcgcattgccttcaaagcgcagcatccgttctttaacgtccagcagcctcctgctctccagtgctacaccctgaggcatgcgagcacacagcatgctttctggtacgtgtgtgctttatagacatccctgctgtatgcctgtctactcaggtgccctttctagaaggatgaagtctgagttgacactgccatccaccagaaacagggcagccggtgtgagtagtgtctcactgctttgcttctgtcttgagagtatccgtgagttttcatggcgcctcccggtttctccctcccatctcagtggggaaagtgagtgcaggtggagtctgaacactcatctgctccctctcttagggatccctcatctccgcgtgtgccctgggagtcctggcctgagtcagctgcacttggcagccctcgcttctattttacaatttctagatacacaggttaaagatcagtctattttagcttatttttaaggctagattattaagtcaagatgccttcagctatagataatggggaatgccaatttatttgtcttaaacaaaaaggatatttctttttttgcaatgtataaaattcaggggtgacacactcttagtcatgctactgagatttgtgaaactcaggtttgttcctctggtaaaccagcttccttcataattacaaaagtttttcacaattcctggtgttgaaacttggcataatgatgtgcaggggtaaacgaatagcttttttccgagttctctttagaagggagatctttcccaggaagattctcatcagcctgtctcagacgtcactgatctgagcagggttgctaagtaaagggtaaagcaagcagcacgtacttggcccccagtgcagatagatgctagactagtgctgtgtggagtgtcccaggagtggcagccccatgtacgtaagcgtaaggaggaagagaacacatctaaaggccctagatggaggtcgctgaaagccaccctcagggaacatgtgaaatgcacacctggctcaaatggggtttagtactcactgagcagagcacaggcctccggtggcagtactggcgatgactctggagtgacccggcttcctctcttttcatcctgccctagccctggacctggagttttagagcagaattaccaggacctgtaaccagcaggtagctttagctactaacaccagtaagtaactctttaaagacagtagcatcagaggccaccagcatgccacgtgtggctgttgtaaagagtgtggagtgtcactctcctagaaaagcccatctcatacttgctcacatgccttacgctcttcatgagcttgggatttctgttgaaggtgtgtcttaacaaacctgccacaggaggcctgtactctgctcaggatccagtgttatctgggctaaggttttaaaaaatgtcagggagctccttaggctgctgcagtgactgtctcaggtcctgttacctctgacagaaccacattgggaaggacagataagacattggtctcaagtccgttttcagataactggcatgtacttgaggattaaaagaaggcaggattggggtgaggggtaataggtgtgtatgatttagtagtccttgccaaggtgtgctctcaatggtcactctctcagtttagattctgtatgtttgttgaagaagttcttgttctgtgtggtgctttgaataggaatgccccccccccccagactcatgggttagaatgcttggtccatatttggggaatggcactaataggagctgtagccttcttggagaaattgtgtcactgtggaggctactgtggaggttttatttgctcaagctaggccttgtgtggcagtctctgtctgctgcctatggatcaagatgtaggactgtcagccccttctccagaaccattctgcctgtgtgctgccatgctaccctccatgatgataatggactaaaactcccgccccagttaaatgtttttcttcgtaacagttgcagtggtcatgatatctcttcacagcaataaagccctaactaagccactctgtgagtgggccagtctggttcttataaggtgatgactttagtgtgagtgtgcagccttgctgtcatgaagaactgcacttgtctggggtggtctgtccaaggtaactaaaaatttaagttaggacttctgtgccttctgtaatcctgtgagtgaggaatcaatgtaaaaccagcctttaagtgcctgaaatagcctacagtgtgatacagtaactaacagaggaagggtgaaagcctgcccccgtctgcccccatagcagtcagcctgtcaactattggtcatggctaggaaacagaagcaaaaatatgaccttggggtgaagatgaagctttggtcatggtaggctgctcagcatgtgggagctgtggatgtggtacttggatactaaggctctagacgcgcgcagaaacccttgaactgcctcgtcttcttttagtatagggttgcttctcattgagagcatgcaaaggtgtccgaccgtaaaggggcattctctttaaattgtataattttgcttgtgcagtctatcagggctggggaaacatttttgataaagggctcagcaagtcaggggagtaaagtacacacaaatatgacatgtgccagagggtataatctatttgagtctctggagcttttagtgtgagaactgtactcgaagaaattagtcctaagagatgagcaggtttagtacagagaaacgcttgaatgtgaaattgacaacttggacttcatcttgcaaacaggggtgtgggtcagcagcaaagcctgcaaggttgtatacctagagacagggagtgctcaggacagacatggtgtgaacttttcctgaggaataacaaacatctgttcaactcagctaggacagtgacaggccagtgttcacctcagatgggacaatgacaggtcagtgtttacctcatttaggacaatgacaggccagtgtttacctcagataggacaatgacaagccagtgtttacttcagatgggacaatgataggccattgttcacttcagttagtgcaattacagaccagtgttcacctcagatgggacaatgacagggaaaagaaatgattccacctgtactggttaattttaaatgtcaaattgccacaacaaagcttacatggtatgaaatcagacataatatagaaagtatattccatacatatatttaaatatgttcttgatagcttattgtaggtaaatatgcagacttatatatattaatttattatgtagttcttgggcatgctagtgtcagagcagttgtaatatattttaactctttttctctttagatgtaaacttcctcagaagaacttagaagtgttattccatggcatgagtgctgattttacaagtgagaatttttcagcagcctggtatctcatagagaatcactccaccaccaggttagtggccatcagatcctgatcactgggacttcagacagcttatgcagttatgcagcttatgcagtaacgttgacgtaagcctgctcttacagatggtaacatagctgtagctctgtgaggtgactttgctaagttcctgtcaatttgtctgtttccgtgtttataaaatgtcattcttagaagacttattcctgatcttacctgtagtcttagtagaggactaagtagaggactatccttatcagtcacatgaaaaatggcaattctgtgcacactgtagagcacctgccttccctgacctcagagcacagaaagcagtggatttattgttatgtgatggtaaggaggtggttggctctccccaaggtcgtgtgttcccttgacattttcccatactctaaagattacatttgtaactttttgctagattgatttaaaacagcaatattagtgaaaacatttagataaagagttgattgattgctacttagggtgtatattctctataagtcagtggattaaagagtatattaacataatttattcacttacagagatgaaaaccattattagaaaacatgaagaaaagttggtattttagtacataaatttgatctgatagtgttttaaagcaagtactctaagagtcagtttataattgtagaagattgctttattttttcatcatggacacattttttcctctcataactcagaattgatatgttttgtgtatggagttactacttaaagcaatatttcagattatattaacagatttttgtcagatcaagtggaaataaaatttccaaaataccttttctccctcaatttttgatggagatacaacagcatggttttattttttgttgcttgattgaaaaattttaagctaccgtacacagtagtggattttatcatggtagcaccatgatgtcatatcacatcacatatcacatgacatcacatatgcacctcatgtgccttgtttcttgattcttgttaaattgtgagtcacccacaggctttgtgtaattttgacattaaggacagagtactgtgtattgagtggtgagatgagagttgtgttcagggttccaggacacttgtgtgagggagtgggaaaatctgcttttgaactactgtagcttaactaggccactagaagatactcagaatttctgtcttccaagtcatgtatattatatctacatttctacttacttcttagggacctgacatgcttggaattatcatctatagatataagactagtttcatatctttcagccatcacaataaataaaaggtttagatcgataagaatttaaaaggtttttttttttgtctctatgtagttattgaatcattgtatatacttcacaggaactttagtatgtctagtgcattatcttgtcaggagtgtcagacagttgatttcttttcatttgtttcagttttgagcagctcaagatggcggtcaccaacctcaaaaggcaggccaacaagaagagtgagggtagtctggcatatgtgaagggcggcctcagtaccttctttgaagctcaagatgctctctcaggtaaggcaagcctgagagccatctgctggggcttccactgtggaaacctgacactgtgccccctcgtgtttatggggtgcgacatttggtctgtatttataaaagtagaggtttaaagcgtaccataaatatttgttgcagactaggctggaatctctttgaaggcctggtactgtaaatatttgtctctaaagctctgctgacgcatcttacatgtgaaacaggagaatcctatacctctctatgatgctcagtctttggggctgataagaaattgaatcccagcgggcaaagttctagaattcttaaagtcactttatagacatcgaatcttactcatatgcctaatcctaaaactgttccctagtatgtgttttgtgtggagaggcctgatgaagattgtttttagccattatcccaaggaccccaatgtacagtcacaactgctcactctgacatcctattaaaagaaaggaaaattgtgttatcagagctttagatactgcagtgaaagataacgagtaggtttttgtagactgccatattttctttttatgtagtgaacatatataatgtgtatttttatgtattattaatatatataaatacacattaataaaaattaacacaattattacttttgaaaattaaagtccctataactaagtacttgtatgacattcatttgtttgtttgtttgtttgtttgtttgtttagagagagagagagtgtgtgtgtgtgtgtgtgtgtgtgtatgtgtaccatagcagttgtgtggaggtcagaagacaacttgtggaagtcagttcttttttccatcatgtggtgcctggaatgggactctggccgtcaggcttggtggcagcacttttatccactgagccatcttacccatccataactattcatcttatttaactgtatattagagggctacacctttttcagaaagacagacttttaatatttcacatgtttaaatatttgctatttaactcatactgtttttttttttttttttttttacaaaacaaattcctcttttcactaagtatgtatctcgtattttcctttccttgtaggtggaagttaggactttggttaggtgaaatgtacgcagtgggagtgagtggagcaaggagagtctcttctcccgtgacctgtggtgccttgtggttgctgatgttactgatgtagctctgcattaccaggattggtttctatggcaatcagagacctgagcttgtatgaacagttttgtgttgtaatgcaaacatagtacttaccaaatatttactctagtacagtagttctgagcctgcggttcatgacccctttcgcaggggatgcctaataccattgtaaaacacagatatttatagtatgatttataacagtagcaaaattacagttacgaagaagcaatgaaaataattatgtttggggatcattacagcacaaggaatatcagattgaacaaagatcgtactgataaataatttaattactttatagcatatacaaaataattatcatagtcaattttacatagtcaatttgaaaacattaacaacatgccataagtctggctcctttgttttttatagaaagagaaaagatactgttgaaaaccagaaataataaacaagttattttactggtggaggtaaccatattaacattgcaatgtattttagtctgtttttccttgctaatatgagtatatattacaatgagatcatatcatatgtagaattgtatgtgctagaaatcttttcttttctttcattaatttttttacctgtttatacccatgcaaagtgacttttttctttttttttttcccaatatattgtgtacttggattctgttaacgtcctgcccagctctcctgtctctctctctgagatagttccccttccatttccctctgtgtgtatagagaagatgtggcatctggatatgcttacctcacttattaagaactccagtacatctttttcatgtaaagatacaatttcatttttaattgtgactgaataaaactgtttgtttatttaaatcatctatctatgatctataatttgtcacatttttcttattcatgcacctgttggtgggcatgtatgctaacttgataacttgcctactgtgtgtaacactgcagtaagcatcgatttgtaggtcatctctctggtgtggtgacttagatgcctttgagtgtattttcaggaatggtatatatctggatcataatagctctatttttcatcttgtactggctggttttgtgtgtcaacttgacacaggctggaattatcacagagaaaggagcttcagttgaggaaatgcctccatgagatccaggtgtggggcattttctcaattagtgctcaagtgggaagggccgcttttgggtggtgccatccctgggctggtagtcttgggttctataagagagcaggctgagcaagccaggggaagcaagccagtaaggaacatccctccatggcctctgcatcagcttctgctttctgacctgcttgagttccagtcctgacttcctttgatgatgacctgaaacatggaagtataagctgaataaaccctttcctccccaacttgcttcttggtcatgatgtttttgtatgatgtttgtgcaggaatagaaaccctgaccaagacacatctcttgaggggtcttcataatggctgcactggcttatagtctgagcagtgtataaaggttccttctcccttgcgtccttgccagccctgtttgttgtttgtcttttgataaccacgttcaagtgagtgaggtggaatctcagtgtatttgcatttgactttctctaatgactaaagatgatgcacattgtcttatacgtctattgggctccatgcagcatcttttgaaaagtaccctctcatttcctttttccacgtgttagagctgttatgaggtttgctatatagcttttagttccatccatgttctaggtatcaacccccggttatgtgtcatcagcaaagcttgtttccgttctatagactgtgtctttagggattctttactgtgtcaaggattgtaatttcatgcaatcacatttgtcaaatcctggttttatttcctgaataattttagtcattttcagaaaatccttgctttatcctgtattttgaaatgtttttatctgttttctttgaacattttcacaatttcaggattcattttgtactggatggttggaaatttttgttgttaacttttttgcttgttttttagaccaggtgagaaatagggatttagtttcattctatagatatccaacatgtggataccatttccccagttaaagaggctgtcttttctccagtatatgtttttgacaccgttgtcaaaaatttttgggtcatctcttttatactttgtgtttgtgtgtgtacgtgtgttagtactgtgctatttttcttattgtggcttacaacttaagtagtatgatacctgtagtttttttcgttttgctcaggattgttgtggctattcagagtgtttggtgcttccctatgaaaccaagaatcatttgcatagagaatgatactcgaattttgctagagagtccattgaatgtgtaagggactttcgataacagctgctttcacaatagtaaccctgccagtgcatgaacatgggagatttcttctagtttgtaatagtcctgtatttccccccagtggtttaagttttcactgtagagaccttttactttcttaagattattcctagacttgtttcattttgttctgttggggcagggggcactgtaatagaaattcttttttcctgatttctacttttctacattcattattggtgtatgtttagtaaagctactgtttttgatgttgattttttatatgttgctactttcctgaaagtattcattgatctaagagtttctggtagaacccatttctgtaaatacaggatcttgtcaactgctgctgtgtcacagatctttcttagggaaatgcacacacatatctctgtctgtttcccacagagagggaacccatgacagaccaaagtaatgactgcaactaagtccaacttgatgaaccgtgagtttactaacagaagtataggtgaggactacttagaggagcaggtatgactcaaaaattcaactgcatcaccaaaaagccaatcccagcacaggtggaaactcgcagaagtgccttcctggagctctttgctcttcttgcaggtggctgcacgggtcagagaaaccctcttggcttttgagggacagctctcatttcccaggtggaacaggtttgtttttttttttttacctgagtctcatgagcctccctttctcttgtggagaaaacattcctacagctgcaaatggtggtaatttgactccttccatccctcttccttttccctttgcttcccctgccccttcgggccaagacttgaggtgctaccttgaataagcgtggagagagcaaagcaccccacccacctcaggcctgcctctagagcagtggctctcaaccttcctaataattcctcatgttgtgatggcccccaaccgtaaaattactttcattgctacttcataactgtaattttgttactgttacaagtcatgacataagcatctgtgttttctgatggccttaggtgacccttgtaaaaggaccatttgacccccaaagaggtcatgagccacaggttgagaacctaggggaactagtatttttctgtgattagtataatgttagtacagatttattggatataactttactgtagggaatgttcctcctgttcctattttttctgattttgaactttgtcagaagccattctacctttattttgatgagcatgtgattttctttcttgagtctatttatatgctgtattacatttgcttagggattattgtttgagggcatattctatgttttgatctaatctattcatattctctcctttccaatttcccttctgtttcctctatcgctttttgtctttaaacctcatatgctcttttttaaccctcatttaaatcagtgagtttatttagttgtacctgtatgtgcctgggtggatggggggcatctaatggagaatgggtaacacttccggacctgcatcctcgatcaacactgacctgctgtggtggtttcagtgagatgtctcccaaagtcttagccatgtgattacttgtatccagttggaattgcagtttgggaatgcttaggaggtggggccttgttggaggacatatgccagtgaagacaggcttcggggttcagacatttacactatccaagtttactttctgttttgtgcttttggttcaagatgtcggcgctcagcttccttttcaagccaatatgtgttcactctgtcatcatggactcctaaccctctggaacgataagcctaaataaaccctttattttaaaacttgcctttgttatggtactttctcatagcaatagaatagtcccaaatacacacttccctcctcaatacccatcaattctccaaggctcctcagatgggggtggaactttataaatatctctccacttctgtgttggcttgatattggataggtcttacacatgcaatcccacccctgtgaattcatatgtacaacagagttatcatatctgacaaatattgattcactacagatatttattccctctggctcttacagtctttttatgccctcttctgtgcaatgattcttgaaccttggtggaggaagctctgatgtagatcttcaatttagagctgaactttcaagtctctttacacatcagtcagttgtaggtccccatattgatttccatctacataaagaaatgtctctaatgaagattgagaaatccactgatctgtgtatatgaagataagaactttgagtgcaggttattattattcttctgcttgaggatcttgccatccatgggattttgtgccactcagcagtcagatgtaagttctgtcttatgggagagattttgaatccttttggaatgtgggttggttactcccatgacattcttcccactgtttttccagtggtcatgtgttgccagttattatgactctcaggtcttacagccaggtaagaatgttgatgagttttcttccctgtagcaagtatagcactttccagcactgtgcaagctagatagtagagatgaggtttctaggttagtaccagctggatttttccatgtcttgccattaagttctagagggaactaagaacaatgacagtagcagtggtaatgatgaaaatggagggatctttgggaccccactgactagcaacttgaaaagaagtacaccacacctgttgttcagctttttatttgtctatggcttgtggcactgtgtcccccctaccctcagtacaaggtaactcctgcattacttgtacacatatgcatgtgtgtgcacacgtatatgcatatatgtgaatgtgtgtattttgtgaaggttccacaatagtaggtttccatattgcattttcagaggtcttgtattagttatctcttcccatgccccctcctcttctctgctctcctattcataccccatttaaccttcctgtttctttatctgctttaccctctcatactactgtgtcaccttcctaccatggtctcgtacacatttcctgcccactatatgtattccagatgtaacgttcatatttggaaattcaaagctaatatccacatatgcaagaagccaggcagtgtgttctctttctgggtctggactacctcattcagaatggttagttctggctctgcatatttacctgtgagttttatttttctttacagctagataatattccagagtatacatgttttcaatatccatccatgaattgaaggacacctaggctattttattatcttgctgttgtgaagaacaaccatgaatatggatgaacagtgcccaagtatcatatacctagatcatatgatacatctttttgtacctttttgaagaactttcacactgattttcatcatgaaatcagtttgcattcacaccaacagtgaataagtgttttaaaaaatatttctcattctaaggtcttcttttgagaactccttttagttccatgccataaaattttaatctgttattttaggtttttactcagttccttatatattcctgacataaaccctgtcaaatgtatacctggtaaagatttgtttcccattccttgtagactttctcttcccttgaatgaaggtgtcctttgctacacagaagtttcttagtttcacgagtacaatgtatcagctgttgcttggtcttaatgcttgtgctacctggataccattcagaaagtccttcctgtgcctactctttgaagcatgttttctactttctcctcttaacagaggaatttaaggaatcatgtctgggaagtctttgataattgaagttgggttttattcagggagaaaggttagggcctacttccttctgcatgtagccctctagtgtgaccagtgctatttattgaagatgctacattttctccagtgtctattgttgactctttgtcaaaagtcaagtataggcacataaacagatccaggtcctcagttctattgtattgattaatatgtttgttttctgtcaatactccagatctctagtagagcttaaaatgagaggtggtgatatctccctcagccttttattgttcaaggttattttgactactctgaattgtttgtttgtttgtttgcaagtaaaagttaagatattcaacttccgtgaagaattgtattagaattttaataaaaattgcattgaatctgtaggttgcttttgataggatggccatgtttacaggcctttccatcctttggaagcttcttcaatttatttcttcagggtctaaaaagctttattttataaatctttcacatcattagatttatttcaagattttgtttgtttcatagttttttttttaatgtgtgtgtagctactgtgagattgtttctctgatctctcagtatatttgttattagcttagccaatcccagtataccacaatttcacagttgtgagaggtttttttatacttgatttatcagtatattagatttattttgaggctctttagtttgtactttatgatacattatgaaagcaaatctcaagccgcatgttttctccttatgctttagtataaatccccttcatgagaacatttatatgtataactataatactactagaacaactaataaaataagtaagactacttgattttcaattcaatcacaagtcatgttcaaatgtctccagtcatcccccaaactttcctatgtgttcaaatcaagatatagattgatgggattgcattttattttgactctcttaagagtcttttaaactcgcgtggatcctcttatttttacccttttaatttttcatgtcatgaagaaacaaactcactaaccttgtatggtattctatgctgggaagttcactgacttccaccccatggtgtcatttaacaacattgtatttctggattcaatttcagtattttggtttgagatcatgttgttcttgttacaccagaagtcttttagtgtgtggcagggctggcagtggtgatggtgacttcatcacacacacacacacacacacacacacacacacaagtttctgttgtctctgtatattttttttaattttagtttgggaaatactgaatttactagaaaaaagatcttatctttttagtatcatagttttcatattacttaatatctgtgttataggccttgtcatggtctttttactttatctgtataatttaatttgttttcttttattgaaagtaaggttcattttctcataaatataacctgattacagctttcctctccctctattccttcccacttctcctaccccctggatctatttcctctctgtttctcattagaaaagaacaggcttctaagaggtagcaaccaaatatgacaaagtagaatatactaagataaaacaagccatcatatcgaggtcagcaaggcaacccaacagaaaagggaaagatctccaagagcaggcacaagaaccatagatccacatgttcacacactcaggagtccataaaaacactaagctgaaggctgtagtacgtacatagaggacccagagcagacctgggtttctgtgagtcatgtagccttgcttacttgattcagagggccttgttcttctggtgtcctctgtatcctctggctcttacactctctctgcctcttcctttgaggggttgtcttagctccggtttagggctaagggggaatttgatggagacatcccatttagacctgtgttttctaaggactctctcttcatgtctggctgtgggtctttgcaactgttcctttctgctgcaatgatgactaataaggcactgatctatgagtatagcaaaatatcattaggtctcatcttattgctacgttcttttagtacaacagtattatttgatttcaccataggtccctggctataactccagttccaagggatccattgccttcttctggcctccaagacacgtggtacacagagtacatgtggtacacaggcatacatacatacaaaattagtaatacaaactgaaaacaaacttttggtgctgggaattaaatgcaaggccttacacatgctaggcaagtcctctgctgctggtctgtatcttagtcatatccataataccttttgtaaaccttgggaagttttgttttcattatgtaccttaccagcaatgtatgataggagttatggttttaaaaagcactattctgagagcctttgtctgccactgtactgcaagacagttatccctgtagaaaattgattccagtgatgatgttactgagaagagtcgtaagccaacatggttcttttatttgtatatacattagctgttcgtgtccacaaaaatgattaaaagatatatttgtttagccttgaattaaaaaggaggagggcataaacgagagacaggaaggcacatgccttatagaacatacagaaatgccttgtttccatttgcttatttctgtgcttgatagactttggagggtgtcaaccagtgccttcagttctcaaaaacaatttttgatgctgctagtctttgatgtcctgtgtttgtaggaatagataaaggagcagagtgataaaaccaaaacccagtcctcttctagatatcctccatgggtggttgtcattgtctagactgtttgagagccagcccaagtctactttctcagctgatctcaactaaatatgcagtttaaaatctttattctctttaactttttttgcattcatttttttcataaaatactgctgtatgcccgcgtaacaagcattgtgttatttctagcaacaggcgtctttcccttgcttacactttgctgtttctcccacttttgttggctttgatgctcctgagggtctccagctgctgttcaggcaagcccctagcaagtctttagctcgagaaatgtttctgccacataaattacgcagcagatgtaagaggcccttctgagctcagtagcacctttggttccactcctctgttcctttaccggtccccgaatgcccttggagcccatgcatttacatctcagtggtcacttgtttttggtggcaacccccaaattgtgactgttttgctgtggccagactgaatgaatgttcttggcagtacataaagagaccaaagcagaattcatacacaagccactcagtaccagtttgcatgttgtagctgctccaggaatcctgaagctgagctggggttttggaattttcggtctggcatgtcctgttgatgtatgatgtagtgtaggcagagtgctaggacgcagttccctgagtgagtcattcctacctgttggctttgtgtggcagctgagattggttttattagttcttatttacagtataattagggaaggaaaggaatgataggttacttgcccaatttaaatgtgacatgatttaagcactgttagctttctgttaccttctgttactataaatatttgtgataattgacttacaagaaaaaaggtttattttggctcttggtttcagggattttgttctacgttgcctaggtttgggggtggttgttgctttggttctctaatgaggcatcttgccgtggtggagtatatggcagaacacactcaacagaaagcaaaaaggaaccagaggcagggcccaaagcagtagttttccctttaagggcatgcccaaatgacccaccttccagtaccaccacatgtaatgcagtgtccttgaggacagtcagcactgactgacgttttctatgatagttaatagaaaccagttgcttaatgggcattttaatgaatttgaattagcaaaatacatatttcatctcatccatgtctcgtttattaagtataaccttcagagtctgggacattaacatgactaagctacagcctatctatatagacctagaactaaccttggccatgcttttaagggtagctgtaagaaaaaaacaaatgatgaagataatgactgcagaatagaggctgtaacatttttactctgtggttgtttatggaaatagtctctgctctggctttaatgttctgactcatacaggctagcaggcaagcacagtggttagagcatatagtatgaccttgcatagcaatgcatttttaatagatattctctctctctctctctctctctctttctctctctctctctctctctctctctgtgccttatttaacagtgacatctatgtaagggcatgcttaggcattttgagttttttgactgaagttgcagtttcatattttgctcagtgtgtgtgttttacagacagtgaggcaatgatgtagttcaaaagaaatagcagaccctttcctagaacttcaatttttctttaactagtgctcttataatacctttttgtttcctaactttaagcttatgatgttcaactagcacacatatttaagtttttaatagattagaaacaataacaaacctgtgatcatgtacccagttgcttattgagttattctatttaaaaatgttttcagagaaaataaaaggccaaatgaaccagacattgggttatttggtttaattttctggaaaataggattgcttttatcagatcccagtgtctcttagacctcatgcttggctgacagcttgacagtggctctgctgtggtagagatgggttggaggaagttgctctgtcagcagaaagggctgtaaactgagctcagagaaccaggtcaccccgtcttgacctgctgatcagtgatggcttatgtcagcatcagaaaatgtggccacacagtttcctgtattgttggttctcacttagagaataacatttgcagtgaggctgtggagcatgtgctgcctgcccgctcaggagctcaggacagtgagctgcacagggccagccctgcgtttgcaaccaagcttgtcagagcatcgtttcagcagtgctacatgtgctgtgggcagacttgcttccctagagcagtctgcctagtgtagcttttaatgcttagacgcaggaacattctcttccgtttaactttacaagttgaatgcaagtttaagctttgatgtgtgggaatatgttgggtcatttctactgtgtaatttaagtttgagccagtaaagattcacagtttctttactctgaatcaacaaagacaatttttaaaaagtagtgactgttcctcccccgtgcgtttgttttttcttttatgaatgtgttgattcaattcagtacaggaacagtttgtgtgttttagtatgtaaaacaaaattgaggtaacattacaggaaaatgtattataaagaacaaaattaggattaaaggctaattataataacagaaaaataaacattctctggacttgagaacatattcaaaagtatttgaacactgaatttaaattttaaaaacttactgagttaaaaaaaacagtgcatcaaattgagttatataagtcttgtaaaagaaatagacacatccacatttacatgaagtaggcttgtttgtttctgaagcataaactggcacctgtctaggtaaccaaggggaagctataacagattcaccatgtgaatgtcagtgagtgcctaattaatattcacaagtgctgtttggttcactgaaagaccacaaagtggaacatcttgcatttgggttttcacttgagcaaattgtgtgaaaaagtagaaacccaggctgcttctgccactgttgtgaggagaaacttctttttttacaagtgaatacagttccctaaaggcacagtaagtttacagctctcattttacagacatgcaaacagaagcctaggtagtgccagttagttactgatctgtgctgcgtgggcagcatggactgaggccttaaagactggaacctgactgcccgagctcacattccaaatttggcttggtgaccttctgagacatgtttatttgggtgttaccacggtcttctttctcatcggtcagatataaatactgggatgcacatcactgtcagtgggtgacacacgcacctcagaagtgcagtcttcatgcacagtcacaattcaattagggtttgctctgctggcttcattttgtcacagctttaaaatttgaaatcatagtcttaattccttaccaaaataagcctgagagctgttttaaactttccctcttcattctccagtattctttattattgagtcaaggaatgtaaacacctacccaccccacccctgcctacacacacacacacacacacacacacacacacacacacacacacgcactttctctgcacagtgttggtacattgatatgcgttctgaaatgtttccatggaacctctaggaaattattgtgaatataagagaactaatatgtattccccatgtgatagtccaggtctgaaattaaattttttgaggttggtagaacccaaatagtagtactttctatcttgctgaggtagaagaatgatttcctatggccacatgaagattgtgctaaagacccacaaagcctgaagctccgctttcgcttttccttttcaagtctatattgaagaccagatgagtgtgtctgttgtatactacttgaataatgttaaggtgtgaacaatgtaaatagtatcatctgtgttttcccagaatgttgtatatatatgttcctcttgaatggtgaaaataataggacaatttctaaaattgtttttcaatggctttaaaaaggcttttttatctttctgtccattaaagtggcccacgttgaaactaggtttgtttgctttttcctagctatccatcaaaaactagaagcagatggaactgaaaaagtagaaggatccatgacacagaaattggagaatgtcctcaatagtaagtttgtctactactgacgactgttgatggcctttagaacaaggtgcagtgcaggtctgcgggatttcccagggcaagggcttggtaacgacttacaaaacctcaaggacaatagaatggaatgaatctgtttgcattttacttagttacatttctcaagaactgtaatttgctacctggaaacaaacaggcactgagacagcagccagggctactactgagtagacactggcatctccattgtcagacctgccagcacgtagggcagagcctcagctcctgcacagcagatgcccaggcaacgtctgtctgtttacactttgccctccccagagggacgtactctagaacattctgtaaaagttgatggcccaacagactcccaagttttctgtttcctcctttttcccttttgttctttttctgacattccgaggtatttgccccaatagcagaagaaattcatcagataaattaatttgtactattattaaaattattacatgttttaaatgtaagttatgtttcccacatgtagtcactgtgtaatatgaagtaatgtgcataggatagccttgaatacacggttcccttggaaagaagggttaaaaaaatgaagcaacctcacatagatgtttagagattttatgaattcagggttatgaaacaaagtgaagtttgtttttatggcttggtttagtcccatgagtagaacatcctgggtcttatgtaaccattttcttcataggtccagtgatgtcagtaagaaaatattttgtagaaagaatgctacctttggtggaggctttccttggtggtagaatttgaatccttggacattccatctaagtttctggatttaacgggacttaaaacctgtccctttgtttatcactcctgcggttattgcttgtcttggggtttgttgtgcttttgcctctaagcaccaagtcataaaccgtgtttaaatgaatatattctgaattttccgtaaataagtatttacccaagccatctctgcgtcttaaaagagacagagcatacagccacacagataagcagagtgtggcaggtaggcagtggggtaggtggatgcaggtgtgtctcttgcagggtttcagcagcatgaaagggaggcagtggctctagataggagacaggctgcaagctagtgagcaggagtgatgtaaactctgtgcccaccagagttctccttagactagagttagccttgaagaggtgagcgcccaaaggagctcagccaggaagccgtgtgatggagcgcttagaagagcgggctgggtgggctcactgttgagtcaacaggagaccaggtgcgcgtgtgcgtgtgctatcagaatcaagtacgagaaaaaaactgagttctactaattgattatttggtgaatatttggtagattgcattcaaaaaagaaaaagataagccagccctaattttagctttttcccaaacttgcatcgaaacagattggttcatgagagccaacagcttcagctctctagcatgtgagtgtgtgtgtgtctgtatgtgtgtagggccccaggatgtgacatggttgatggttgtgtgagtaactagtgcacactgtcttaggcactgtgtgctgtcacccagttacagaaagcaactagctagtcttcctggcgcctgttgaaacagaggcactcagagaaggtttagtctttgggaggccctgcctttgccaagtaccagtgtgcattttttgaggtactttaattctccagctactttcacatttgcttttctgttttcaataccttgtctctccctgggacaaactgtgtgatggttgggaaccatcctgtgttgttctagccgctatattcctatgaggcacaacacacacacacacacacctcacttctgtaaactctcttctcaagttgtccttacaaagaaagagactagtgtcatcaccttgaaataggagacagcataatgtctactctaaataaacatgtctgaaattataagataccattagaatgacaaaagtagatcttctaggtgtctgtaagagacaggtatgagtgtaatggattagtgtatagtgtgacagcaacttcttcccttgataccctagggcacatttcactgctctgtaggtctactgtggtggcataagggctttgtggttagttagttcgttcgttcgttcgttccttcattcgttcctggggtccatgtgtgagacagtgatagtcattatccaaatgaactgctgaggaaaccattctcagacaaggggaaagaatagaagacaaggagaaagccctagcatcagcctctgttaaactgggcgtctgagggcaaaggcatgcatgcgtggccctctgatccacatacatttattctgtgttcattcagtggacagccaaaaccatatcagttgccttaaagttgggcattcttggtgtgagggtggagcaaggtgtatgtgaattaacacacatggaggattttggtgggatggctttgtggacaaccagctgatgtctttgtccacatcattagccccacatgtgatgaggaccccgttcctctgcatagtgctcttgtctccttgcagtcataggagattctcaaagcattttgtgactgctggtgactatatatgatgtgtagatagatcttagtttcattgctctgaaacattttattatttaatatctttcataatgtcagaattatgaaccatatttttattgtaaatgcagtgcaaatcacagaaaaatcatagtttactagtgaaagttgtctatataattttcaaccttgtataaattcaggttctcaattcacaaattttggcataaattttaatttcagtttaaatttcttcttataaaattatctataggaaatatatgtattttattcaagagtagtatattttctacctgttctcgttttcatatttttagagttcaaattattggctggaatttttttattactttagaatgatgaaaataatttgaattcagactgtttgctctgaattctttcattgcatagaaaaaggaatttgctcgtgtgagacccaaactttacatgtaaataaataaataaacagaaaagattctgttccatgtcaaatttaagttacaaagcttaaactcatgatgtttatacttttaaaatgataagcaaatgctttaagatatttttttctgaagaaagttttaaaattcaaattagatttcagtgttcactcaagccttcattccatggcttggtgcaagaaggaaatgtatttctcatcccacaatagaggtttagtatccacattaaataccatgtgggaaaaacagctctcttgaccaaacgaagtttttatatcaggcctttaaaatttcaacagaatttaaacattatttagataaaacaatcatgttacaaagacgacttttaacaggatcaggccacccacagtgtggctgtggtgtgcaagccacccagcgaggcgaggtgagtttttcatctttgcttaaagtatagtcactagaccagataatgtagaaactttttacaagcaggtcaaacagctgaaagcagtttattcttgctctctttttttcttgtagctaattaaaattaattcacatgttgcaaaatttaaactatttttgtatatagcaaattttgccttaaaaaaacagcactcatttaaagtgatacgtataatttttactttttaaaggaaagaatcatacaaaatatcctggtcatacatgagtttacaagatttagctgatttaagaaacagtaatgatgctgtgttaagattttgtcattttaaggtttatgtaattttctgtgcttacaacatagagggataattttgtcaagaaatagggttagctttaatgtttttttttttttaatatttttctgaagacagtttcccatatcccatttattaactgtagtgtgatgcagaattaataaaatttaagtggcttgtgtgtgttctttaaatatccagagttgttataaaatttagaagattaaaataagtatagatacattttggagaaagttatttgggcttatttagtaaatgttgcttttaattagataccattcttaacatatgaaaggactttaaaaattagaaattttattttatcaaacttttaaaaagtctcctgaatttcagtgcagtataacattaccgcttgctttttgtgctcagactcaggtcactgtcacccaccttcctttctctgtttacaacaggagcaagtaacaccgctgacacattgttccaagaagtattaggtcggaaagacaaggcagattccactaggaacgccctcaacgtacttcagcgatttaaatttctcttcaaccttcctctcaatattaaacggaatattcaaaaggtacagcatatgtatgtgtgcagttatagatgttgctgatcttaaaatagatggttaaaatagataagataatataaaatattttatattaaccatgtgctcattgttctttcctaatgatctcacaacgtgtttctttttttcaagggggattatgatgtagttattaatgattatgaaaaagccaaatcgctctttgggaaaacggaggtgcaagttttcaagaaatgtaagatttctttattacttttagccctatcctttcctcttgcaggaggacggtggagtgagtgtctatgctgcagagcgctgcttgcctctgagatctggtttatatggttcttctttaaaatgtaaaacaatcagtgcaaactaacctcacaggttttcctactgctgtgtggtgggaatgcacatccgtggcgagggccagtctcagatgctttgctgttttttaatcacaatgcattaaaaactttcatactagagagaagcaatggtaagtttttcacagacatggaaatctgcatttcagtctcttctcttcaggctaaaacagtgcatttatgagttctactcttactctaacgcaaactcagtactttgaaaaaattactctataccaggtttacagaaaataaaagcttaggtaacttatggttaaaaacttattaactaggagaaataccacaggtcttattaaatttaaaagaatgaaatccataaggtttcagaacgcagaatttatttctttactgtggtgaaatttgcatgcagtgaaatgcacagaccttacgtgttacaggtcactgaactctgacaaacgctcatgcctcctatacacttgagatggtgtgttttgatccctccacaaaggtcccttgtgtctcttctcagtcaaaaagcaaccagaattctgctttctgaaacttgattttgaattcagttctgtaaatcttgcatcctttaaaaatagattatgctgaagtagaagcaggaattgaagatctaagagagttacttctaaagaaattgctcgagactccatcaaccttacatgaccagaagcgctacataaggtaaattgtgtgcaaggattctgatagattgcatatatgtatagatagagtatgaaacccacaaacctaatttgggggaatcaaagtactgatgaaatggtaaaagggaagacaatagatagggatatttggtataggacaagaatattcctcgaatataaatacattggaagcagttatagaggcacccacccctcaaccctgccaccaccctttgaaggaaagacagccttctaggttggtcaaaggaaaagcagtctcattgctcagacctgtttttcctgctcagtaatggttaccacctgactcccctggtggactgggtgctgcacctgcaaatgccatactccacaaggtgggaaattatagcccacaagtgtaccatggcttgactgtagtgaaggatatagaaggttttcccttgacaatatgtctgatttacataccttagtgatcctggagagaagtaactgtggaaatagatttccgttggcagtacatttagaaatactcaccagtattaggagagatgggcctcagggtagtggagaagctaagaggatgagcagctctgcaggagtgagcctttcatcctgggcagctctggagccctgctcttcagtgtcttcatctgcagagggaacggaacaagcaacatgactgtgttgcagggccattgagaaggtggtgttcttagggagttagcccagtacccagcacataaggagcaggcagggaggttcagctgtacatagcttacactgcatttggagttgaaacataagttatcagatttttgtaactgagatttaaaaatactgacttaattttctgctatgctatctgagtttagagtaaagtgctatttcccaaattcagtgacttccttaattagtgaaatttactaaaaatttcagtacctctaagatgatgatagacttcatatatgtatgcatatgtatttgcctgtggtcatcttatggatatagaaaatactgtctgtaggccttcctgtagttagaggctaaggacctgcactaaattatcttctaggataggaaggaacagtgggagcagatgtaggacagaggatttagcagtggaaccagagagcagtgaaactgattgctgctcctagcaaatgcaggccctgtgctcacactgggctgagtgctaactgtgtttcctctctggccaaagggtccagcacacacagccacaacaactgcatatctggtgtcagagcccacccttgcctttcttcctctacctttctgaggaaatgttatatttgaggaactttcctgacttgcaaaactgcacaatttaaagtggaaataaactctgagtgagttagctaagtgccttgaagaagctttgctgcttatgtgttaggttagcttgctcctcctgtgtgtgtgagctaaatttattttcagaagtacactaaacttgtgggtacaaatctgagaagacactgagcaatctgatgaataacttttaaaattacattctattcattagtggttttaaaaataagctcagagccgggcagtggtggtgcatgcctttaatcccagcacttgggagttagaggcaggcagatttctgagttcgaggccagcctggtctacaaagtgagttccaggacagccagggctatatacagagaaaccctgtctcggggggtggggtgggggtggaggaagctcagaaccaggtcaagtctgttttactttaacatctatggcaataggtcctgtgggcaccaagtaaagccagagacagcctgtgcatagctgtgtgtgtccgatccactctgccatgtacagtaggagtgatagttccccactgctgtgttgtctgctctcctgggcataactgaaggtagcctcttcctgtagcgtagcaagaagcagtgctcagcgtggttgcgctctctctggctctctctgtctaggtgtctctctttctgtctctctgtttctctctctgtttctttctctctctctctctctctctctctctctctcccttccccccactccccctccaccactgtgtccctattcctggaacccttgagaagcccaaggagggtgactgaaaatgcttttaaatttcctttgttttgttttcctgagtattgagaccagagtttccctgaaaatgttcctcctcctcaaattctaaaagtctgaatctctactcatgagaactaagatcctttcctccgccccctaccttcccagaagccttcttcagaatgttctctagcatatcagttaaaaagaaaagcagtaacttgtatcactagacaaagattcttttaatgaaactgctaggtttaagcttggtactaaaaaggaaaaaaaaggtattgaagtctagaactaacactgtactttgcaaccaaaacattttctagattttctgagacagtaacttcatcattctacataaaatgtttctaagtttcttcaattttatattaagatggtacggagttattaaaacttttagggacataatgtacaagctaaagagatttacaattttagaacatacaaagcaagtctgctgggctactgctaaggagcctgagtgacacactgcctgcagccctagccaggggcttcacaacgaggaggaagcctctcatgtaagagtgttgctgtgctgcgctgttgatagcctctcaactggggctgaagcaaagtgttagttgtaaagtatccagatgcaaagcagccggatagggagatattgcaatagatgactctcagcaggaaggatcagaaggtatgttctcagggaaggaaaggcaactatttgctgtatttatatcccaaataataaaagagaaaagctcttgggagaggaaaaaatcagagtggatttggagaactttgcactgaattcctcatactaagctaaatgtaatttgttggaatgtggctttcttctgagggtagtgctcttataaatgaggaaggcttataggtgccttctttatatgggtaaaatcctttttcttttttaaagttggcttcctaccttctagcacataaacatagctgtttgcagcctgtggacagtcacagggagggcagacggccatcatggtgctgatctggcagagttctgctctctggggagtcaggtctctgagctattagctcctgaaggtcagggttgcctggcgcattcctaatgcatgtcaggtttctattcaacatcttgtttgttgtgaacttattacaaaatggatttgtttctcctctaattagctgctaattgagatgtctgagtaatgagtccccactactgaagaaatgtgggtatgccccacagtgattaggacacggctaaggtcacagcttgtaaccatcaatgaacattttcatagaccacaaatttttaacctcaaggcaaatgttagctgagggttaaagtattttagtgcaataagttcatttgaaaatacttctagagttgatatgtgtgtattatataagggctcagaaccaaacgagtaatatttgacagaaaaattttgattgaaatatatttaaattttctacaaggatttgagtatttcttatacaaagaaaactttaaatattttaagaactgttgaaagttaagaaagcatccatttgctttacattttatagagaaatagtttctcagttgtaaattaatttaccctctagaggtaagtgcatgctgtcaaaaaaaccttaaatcttagtggcctcatactgaagtcattgtagaatagtgtcacattgccatccagtggctgtattttgtatagaagagattgggggcagggacattcacccagtttcctctgctggctcccacctagggaaatgaagttaatgaaatgactcttgaataatagaaaaaacttgagagaagtgactgtttataaatgtaaagttagtttctccctctgcctcaaacaaatgagaaaacctgcccccggcgcttttgcattgcacagttgtggcgaacgcttcctgcaatgtggtttgtgacttgtggatctgtaggggtagggaacaggagggatgtcccgtataccaagtgcgattggtaaatgcgaggtagaattcttctgatcactattggtcagctgttttcttcctccccactctctttatctctctgtctttgtccccctcctcttttcttttcactctatccacccctttgatttttttctgtcatgttttctttaaataatataaaaataagtctaaatgtaaagaagtgttctcaccaaatccttacaacctttggtctttgttgaactagttttgtcttttttgttgattatttggcaaagagataaattaaaaccctacagctgggtcacctgcactcgctgctcttctaaaggacataagttcagttctagtgcccacatggcagctcagagctgcctgtaacaccagtttcaggacattcagtaccatcttctgacctccaccagcaccaggaactcgcatggtgtacttacgtaatgaaggcaaaacatacattcacatacaattctaaaaagagtaaaaacccaacagctttgtcatttactagtgatgaaagcagtggagtagatctcagtataaactaagtaccaaagacaaatattggcaagtgctttactagtttgttaagttttagcctttgctgttacaacaggagcctgtgctttgccttctcaggtatctttccgacctccatgcacctggtgaccctgcttggcagtgtattggagctcagcacaagtggaccctcaagctcatgcaagactgcaaagaaggccacatgaagagcctaaaaggcaagagattctcttccagctcacttgcttcttagtgcttagtagttaaggggatgaagatgagattttcctgatcttggtacctgtcttcattgttgtcggtcctctgccctactgctcagtactgcccctcacagtgccaaagcaagtgccaaaagtaaaaaagagagagcactttttcagaaatctgtggatgttgttgacgagtgctatagacagaaccttattttatagaagagttaattttccaagaggtggacatgattctgtagacattgtatcagcccctggtaagttccactcttcatcagacatagccagagtcacttgtgagttaggcaaataccaagtgctagatagacagtggtgagagaaagagaagcaggctgtctccccgagcgaccagcagaggaaaggaaacatattaaacgtgcagctaggcaattgaaatgttgagacaggccagtaatgaaaagaaaaatgaccatggttttcaaggaagttaactgagaagaatatttcacatagtcagttcgagaagatagcttacagaggctccatattacctaagaatcagaagtagctgccagataacctctagctcaagtaaggaactgctgtctaggattctggggtaagtttaaaaaaagaaattacagctacgtttatgtgcatgtttattgacttttctttgtttaattctgacactcagcaaaaacatattagtgactgtgctccagttagttgtagtgcagtcccaagggtctgacttgtgcgtgcttccagcatgtgaaggaggtgacacgtgactgaccacagggatgctgtataatatgtcacttcctaagacgagaagttctgagtggcatggtagctcacaggagcaaattgtgatcatgctttgagggtcaggaaaggagtgttgtgagatctgtactgaaagaagaaagattggacttgaggaaaacttattctagaaagaacatcagggagccagaggcagccttgcgttctctgtggctggagggaagcacgtgatgaaaagctacaagagttcaggctatagtaaaatggtgaggtaatggaccttgttagctgcttggaggagttgggaggttgtccagagagcagaaatatgcaattgtccaagcagggaaacagcatatctgagaatggacaaggagagattctatagcagcagagtgatgccagtacaggggaggagtccaggctgcttaggaagtagcatggataggacttgggcaggaataactgcctggagtagttcagtaacatggtggactattgagaactaggaaacagaatttgcccctaactcgcatttgacaggtgagtctggaattgtctgtcatgaaagaagacagatctatgcaagaggtagttgtttggagttaacaattcagagccttggaggttgtttgcacccagactgtcccttgctattcatgcatttattcatgaagatggaaaaaacaaaatagaaaaccaagaacagaatctggaggggcctcactaagtgactggaagaatgcaagcctggaatggcaacagtgaagaggtggtcacagggacagcatggccacatgacaacatgggttcaaaaaaccaaatatgagtgttcctggttttaaaattaagagagaagaacaaaggcgtcatgggttgagcagcaagggtgccgctggtatccttggtgagagtagctgcagtgccttagacacctgggaagggaatagagacagcatccaggtcctgggaatgggaaggaacatacaacatgaggtcagcattgcggccccacagagtggtagctgggaagagagccttcctttgtagtttatttgtcttgagtgaactgtctttagtgtatgtggtttttcagttcaattctgtttctgagtttgatactttggaaaccctatatatcatgaactgatgccacaatctcaattgtcaataattgtctcatatttgttgcaagggaagatgacagtatatgatatggaacaactttggaaatcttacaagtccttttatatatacgtgtcagccagtcatttttgagtctgctctgttctgttgactgaccatcagaatcttagggtggttttaacatctgtcattgactagcctcttataagcatgtccagccttttgacattgtatcagaaaactgtggtctacaaagttcaagttttcaagcttgagagtttacaaaacaaacaaaccagcccacccaactgacagacaaaacaagaaaggaaaaaaaaagtcctcagaatctagttttacgtaactttattgtaatgtgctaggctgtatttattatggttgtcctgtggctcatgcagcccacaggttaaagactggctctgtctgctaggttctgagacatagagtaaaagtcatgaatacaggctgcatccccagtgtgctggctgttgtgctagctagagtcacaagacagtgctgagcagacctcctggagctttgggtctatgggacatagaattttttaaatgccatagtgcatgtttggtagtaattgtgaaaaggttgggaagcgcagaatgcagactcgtatgaagtcatagtgcaggagtacctagcctggtagcaggaagacaaggagggtgtctggagacatggtagatagtgctcaacacggtcatggtttgtttgctacacgcaggatgcattctgacgatggactttcttacctatacttgtctaaagagataatttagtatgaaagtatacagatttctgagatatttcagcatgctcatgtgaagacagcatcccagaaaatttcatgccacctttgcctgagagaactaatgactaatatttcatcactgaaagatttgaatcttgattttactccgtactaggattgggagcatggcgcttgtgtgtccgagacaagtgttctgtcacctggcttcatgcccagcccctcttttcaacttcatgctatgtattcctatgtatgcatgtatgaatgtacttaagatgagcatttcaaaagagaaagtgaaacagcattacatgtaatcagattcctcttggttttttcctgtaaatttgtgtagagcttccgcattaattgagaggatgttagttacaagctttacctagtttatttagtaggctgtttttcttaattgaaagtaaaacacagtaccttacagctctttgaaccactctgcagatttcatggcaataccatgtaatttcctaaactcattatgcaaatttacataggttattgttgaatttaatttttcctttagtcttctgactaggcttaactttacctttgttttgttactaataaatgttaatatgaattatttaaataatttttaaacattagtttttattctttaaaaggtcacatttaaccaatattatcttcctccaatttctcctagtatccctaaccatctccctttcgacttttatgtctttttttttttctttttattattaataacctcaagtctcattagtgctgaatgtaaataattttaacatataacatttaattaaaagattgatgtgatcttttgaagaagcagttttattatttcattttagaaaaccacatgcatgtacatgcatacacacagtgctggggactgaatttggggccttacacatgccctagtcacgaagcatattctcaaagacacacacacacacacattgatacccccatatatgtatgcatacacaatttctcatatacctagcttagtttaatcagttgttagctagtccttcacctgttacttccctctccctcatcctatgtatttgaagttgaccacataattatctgtgcatttttagaggcaaatattatttaaaaattttaaatcgaagtaccaatatgaatacttgaaatatcaatatattttatttttatttggaggtgtcttgtttgtttgtttgtttgtttgtttgtttgctttgagtcaggattttttatgaagcccaggctggcctagaacttgcagtggtcctctggtctcagttttctgagtcctggaattgtaggcatatactactatgcctaatcttaataacttatgaataacaaatacctgttaaatttcaagctcattttaactttatctagagtccttcctaggtgtttatacaatcgccttttatacttgatcctaaccaaaagccaggaagcaatgctaccatcactttttaactgatacttctgtagatgaattggcagatgtgcccagtacacgtgcagtttgtatcctatcacagaagagccggttactaggggaaatgcatttgctttaaccctttttgcagaaggatgctttcatgtcagaattatatgagtatatgccattggatttgctcccctttaacacacagtttggcaggcattggatttgctcccctttaacacacagtttggcaggcaatgcaatgatggtgtacaggtctgtgtgtgaggggcagtcttcagctaaaacacatgccttaagtgtaagtttacagggaataaacagttgttctttcatgtaatctatagttgttgatgaacttgtagcagacactcacaattttcttaagtattacaatgtaaggcagagtggaagaagatccactaagtgtgtgggtcctccatcagtcatacgttcctaatgtgacatgttggatttcctttgtgaggaggtgtcacagcaacgactggcagatgtaccttctcggtacacactgatcatgggaaggaatgcctgtccagatccttttctggttgcaccatcctgttctctccaggcctgtgaatcacagcacaccagtccacatgtgcctgcgctgctctgttgtggcaagtgctccatcagactgggatttctctgccaggaaggcaggctggtcccaggctacttaggaagatctgtactgagacttcccaagccagatgagccaagtctactttctctgtgttttgatgctcattttctgtcataggtggattttataaaggaaaggttgtacgatactaagtagtaatccattgaactgttatcctccgcttaagaatgtgatctgagttgacactgagaagatgaaggtgactgctagaaggggcccagaaattatggttgcatctgagcaggatacctctagctttccctctagagcttcaggactcatgggtggcagggatggaaaggatcattgccatcagcctacctgatggtgcttgtggcttgatttgaccgacccctgtgttcagagacagagtgccggactgcctggcgcaagcttggtggtcttgattgtagctgtctgttgtaggtcctgcatgtcagaaggtgtctatattccagctgtcagatgctgtttagaggtggtgtgtgtgctctgaaatgatggtgcctgcatttcatctagaactctgttgtcaaggtgccatggtgctcagaaggtagtctcaggacctcatctcacaatgaaagctggctgtcctttcaatctaaaaacagtgaatctgaaggctttctatttattctagtcactgcacttagactactaactctggagaagagaaatgaatgcagttgtttaaacccagacaaaacagaggctaagaactgagacagtttgtgaaataaaatccagtttaaatggataggctataaatattaaaagcaggggaagaattcttggtgtctttttttaaaaaaatgtcctttatacacatgatctgtatcgaggactgggagggcctcctttggacttcagttgttacattattagtgtacagtcaccctggcagatgctgctcatgaaatgattcaatgggagggctcactaccttcctcagagagctggcattcccagattccctccctggtccctgggtcctgaccctgaagctcagatatgacctttgggatctttttacattgaggaaaagtgtcaggagagaaaagcagtgtttatgttgaaaaacataagcatttttagtttttttaaatctcatgatttatgtatgttataagacctgattttgaaggtttaaatacagatgcaggatttgagtattgtgttctttttagcctgaactgagtgaccatgctgtttctggtgccctgggtgcacaccacccaatactctgaaccattgcacaagttaaactttttccaccgcctgaggattggtctctaggaattcctatgaaataggtccaaaatgagagtatgtcttaaggtttcctggcaggaaaagcctttggttaaccccctgctgggactctcaaacaggactttgaaaggtggccttcaaaggtgtcgtcttctttgttcctaaaatggcttgagtttaactccctgagcagctggctgtctggtaaactgggggaaaggccgtcagctcagtctcgcatctttggatctgtgctctagttagggcttccacaaggacttcctagaatcagagctcagtgaggggcatttagaagaggagccaaacttatgtaagcaatgagttcttaaaaatagacacacaacagaaggaagaaacattcgcacatggctcaggttgtctttgaagacttggaggggacacgtcacacctgactggctttttctctgttcacagtggtgagtgggctgcaggcagtgagctgctcaaagtgcctcacagctctgcatgcacaatcctttgggtttgatgcactgtaaaccaaccagccaacaaaataagatgtttttaatgatttcaaacatctagtagattgttaaatactcactgataaaacgaaagatatttgtccacaaactttaagttacagagggcttccttttcagctgacgctcattcagtagtcggtgtctacaaatgagctctgcttttgttgatctttatctaaatatagcagttatctttatgtacacattttctccataagcattttaaataagtaggttgctagtacaattctgatgttttcctaatggaagagtagtgtagtttccatgtattagagtaaattgtactcctcattaggaaactgttggcgtcactgaattttctttagaattacaaaaaaaatatttccatagttaagacagtagacataagttattcacatattaaatactttttaaaaattataacttttactttaaagttatagtgtggtttgtacattaggaagggttcattatggagttcatttcctggagactgaaacactgaggctgagtgagtgactctcagtgtttgctataacacgccctgaatgatagcccttagaaggagaaggaaagagaagacactactgtagcaagtgcaggtcgattcaggttggtctgcatctttttcctacagctaagtcctctggtattgggcacataaccgctgggcagtgtggaagtgtctagttgcagactccttggagggagtccttcacccggacagttgttctttcacatgctgtaataacagtgtgttttaaattggctttagaagagggaatgtttggtaggatttggtacctgttgtaagtctgggagctctacggggctgcacaggataaagtggatgtaggagagggaagcacaggacaagtgctgagcccaaagcagcattcttctccccaaccaagggagggcaaggatttctattctcctctctctttgtgtgtgtgtgtgtgtgtgtgtgtgtgtgtttgggttttcagaagcaggaagaaagaacatcatgaattggattcagagtgcccacattagaaattgttcctatgtctgaaagtagcataagtgtatataaacggttgtatttgccagaatacaattaacagtttttaaaaacacgattgattgtagattttgaaatacacacacacacacatatatatatgtatgtatgtatgtatgtatatatatgtttgtatgtgtgtgtgtgtgtgtatatatatataaaaaaatttaatgactgttttagtttacttttctgttgctgtgataaaacactgaccaaagctgattgcaggtagaaggaaggcttcatttcaactgatgaattatagtccatcgtttagaagtcaggcaggaactcagcaggggcagtcaggaactatggaggcagaacgaaagcagaagccctggaggaatgctgtttactgtcttgctcagcttagtttcttatataagccaagcccatcggcccccacaggccctcccatgtgaaccattaatcaagaaaatgttccacagacttcctacaggccagggtgatggaggcattgtctcaattaaagttcttcccagataactttttgacttgtgtcaagttgacagaaaactaacgagcagaatgagaattttacctttcaagtgaaaataaagaccaataattttcaccagtaacttaggcactttttaaaaagtggttaaggctttatgaattaggtgtgccttttcagtggagtttcgggtctgcacagtagagtaggaactgttgtgtgtgccactgggaagaaccggatcttgttctctcatcaggagacctgttcacctttttgttttacacagatagatcaccaaggctttgtcacaggagctcttctttgggttgccccctgcagctgattctctgtggcttactgtacagcttgaagacttcttgcagtgagagccacttccacttggtgcctaactaatcctgtcctttcttcctagtagaaattaaggtttaacactaaatgtcgggtacacccagtttagaacatgtgcaaggcaacagtaaaacgttgacatttgcaagtagtcttattctgtattatctgatttttataactctgacttgcataatatagaaagtttcctcaaaagcagaggttaccctttttggttactcctatacctactttattacaaactatttcactggccagttggctgttctagcatcttgaaagttcacatcgttaattttgtattcaaaatttatttccttttttaaactgttgttttgatgttgaagtacacaccagaaatgtggtctagaaccaaaattgggaagctcaaatgtgagtgaggcaaactgcatggtgactaagtcctttgggttaatttggattaaattattcccttgaaattgaggaaactgctctgttggagcttctaatatatagattccgaagatcaaagagcatttttatctgttgacacaggtctaattcatgaggaatttgtaattctgccttgatacccccacccccaccgcagccttggcattgaaattcctctgtgtagtgcttgaaaggaatcctactctgcctctgcctggaggctcctgggcctacatgtttggtcaacaagcaacagtgggtggtcgggctgcagagcaggacaaggacccgctgtgcacaggaaagtgtgttcaaaggtgtttaagggtggcaaggaagtaggctgccctcctgaatctggggctgtggatcagtgtcgtccccctcaacccccactattgtagactgtgagaaacttgctatgggaggcatggagacacagtgaaggtatcccctggctgcgcagctgtaggctttatggatggagcctgctaaacaacgaacggttaacaaatatttgcattttaaaaaaggaaaatccttgcttttaaaaatgagatacatgataatcaaggtatatgacacatgctaaagtttcctttcctttttatagaatctcctagacgtcctattgctatttgaagctgtttcaggttcacgcgttatgtttgtgagcttcacaagtgctctttctgaaacaattaaaagctgaagcccttttatctaatggaaatttcacagtttgtaggaatcagaaatgtttcaaatttatagcaaatggtgacaaatgatgacatgaccaggactggttgcctttagtgaccctaggaacacatccactacttctaaaccaaacttccaactggtttttctcttagtaaaacaagatttctgttctgttttatgttctttcaaaaataatttccagatttaatgtttgttttaatttgttctgcatacttcacattagaagaaacttataaagaatgttgcttcttgaggttatagaaaatttaactggaaaaataagataccaacttttgattgtgtatgggtttaatggtaggtatcgtacagggtcttagacatgtggtcaaattatcagttgatactggctgtggcaactgaaggatgcggctagacgtgagactttactcctagaactgggtggtcttgtctcccgtcctgcatggactttcagagggaagctctctctgtgctgcagggttctgtgcctgcttgacctttccagagccatccgcatggtagttatgcggcagatcgcttccacagagccgtagtgaagggggtttcagtcttatgagtcattcattcattcattcattcattcaaggcgtagttgcgattcatgttcaatgtgaagtggtaaactttatacctccaatcaaataacaactgctaatcaaaatgcatgctttccactttgttcatacaaatgatgcaaaacttcagatcaaaactccctcccagtcataaaataataattttacagctaggagggtttcatagttggaaagcattcatctttgtagctccaattttcaacatagtaagcctctacggagagccatgggctttctcttcatatgaatccctgctgctgttcctagtgtggagatacttagtaaatgcagtcgcctcataattgacagtcaagttttccaagttccccgtgggctgcagatgtaaatcaaaagtacagtggagccggtccttatccccagtgttgccaggagctgccttccccgaagtcccactcaccaaaaacttacaaagttttgctttttgacaaatattatgtctaagaaaacaattgatttgttaaaattcatgttaacttaggttgaaaaggacggggccaaatgttgctttatgtcacctacagaaaaggccaatgcaaacgctaaagcctgaaatgtgtggtgatagagaatgatggagaatggtgtcctcagctgattcccagtggccaggtctctgagcgctcaaagaaaatatgcaaagtgacaccatcttcagtcatatatgctttttgtaaaaagatgattttactttaaattatgtatgtgtatgcaagtctatgtgagtatgtgcacatgggtaccagtctccaggaggccgaagaaggaacagaattgccctggagctggcctcatgtgggtgctgggaactgaactcgggtgtcccacaagagcagccagtacgtttcaccccccatcgtctcttccatcccagttgtgtgtgctttgtataataaacaggttctttaaagcttcttatatcgtgtcataaggtataaatgaagaaaggttgacttttgttgagaattttaaaatcttatgccgagtctatagtttacacacacacaaaaggtatttctcttgttcttcattgtcctatacaagtactcatgatcaaaacaacttatctgtaatcatcttgagaaataaaagtattgagccatgtaattgaagctttcaaggaatgtcaatctgcaaggccttttgatttttgacatagtaataatatgtgatatatggtttgtttaaaatacatgtctgaataaatttcctcctaaactcatactgccctggcattctgtaacacactgtgacacctttggtcagaggaaagaaactaaaccttgagaagagaaactctaggttagtatccgccacttagctggagggtttaaaaagtgattctcagtcttcctaatgagtgctgcgaccctttaatacagttcctcatgttgtggtgaccccagccataaaattattattgttgctactttataactgtaattttgctactgttatgaaatataatgtaaatgtttttgagagctagttgccaaaaggggtcagggcccacagtttgagaccagttgcttcaactcttacatgtagccctgcagcgccaccttctggtcactcagctcacatgtttacagagatcattctgagtggcagtgtgacctgctgggcacacgctgcttcaggtacctgcctgcctgagttattgcttggtgatactaattaccaggtaagcagttctttcgtgtgttgcaagcagagcactggtgtggtgctctctgacagaacagaacatgttattaatatcattgttaaagaaagtgatgaaacaatctttaagtttcaaaattcaagcattcctaaactacaaatattatccaaccatataacttaaagtcaaagcaccagttaaggagaaaaacattttttgaggatctacttatgagatgctaattccaatatttgtagaaatgtagataatatattttcatgaggctagaaaatctttcttacttactcataaatggatagccttagatcccatgaaaataatgtggaatatatattcataaaataaaaacattttgtgatgttttaagtatccatatttatacacattatgaactttcagatatttctaacatgttactaagcttaagcccctttatctttctggtacatcaggaaattagtgttttgatattaatttttctatccttagtaacagtgaagaccgtataaactacagtgtgtaaaatgtcataaatggtgaaaatttccacacattttccatttactacggaaagaaatcaatttcagatagctttatcctgtctgtctgaattccttttgccgccagtgttacagaagctgtgcagaggaagatgtcagggaagaggctttacgcctgctcagttggatttaaagttagtcatggtggtaaagtccaggcagcagtttccacccacagtcaggatgtggagagcaaggaggccttgtgtttggctagcatgctcctttctgtgcaagctaggacccagtatcagagaacagtactgcctacgttagcatgtgccttcccacctcacccagccaacataacccctctcagtgtggaggggacttgcgggtccattagtgtcaactctcggacttactgtttgcagtcttcagctttgcgtcctgtaccactcattgactttaccttctggattgtagaaggcttatgtgtaatatgttttaaagtgggatagtttagcagcagttagcatagtcatcagaacagggtccacaaataattgtactccactgagggagggaaagcaagctatccaagtgacaaaactttcattctgtaaaacccactgtagaatgtagccagtactagatcatgtttggtgatgcacagtgacaggaactcatgaaaaaaggtcctgttccttctcactgtattctctgagtagcaacttcagttatattgaactgtttattgacttattttctgccccaagtcagccagaatctaaagtcctccagaacaatgcacatacgattgctcagtgaatgctggttagatggtattgaatagctgtcatctgtgttgccatagaaatatcaccttattctcatcaaattattattttaatttataaatggcacttttccttagaacttgaaaatatccatatgcttttaaaattgaattataaacagttttttagtaactaacttgaaatcagtcactcatatcttgagggagtagcctgtggaaggcccggacgtggggaagagaggaagcactcagttcttttccccgaggagacagggagctgccttggaggtgagcagcacaagacgttgacagacaacgtgaagttggcagcatgaagcacatccccagggatggtggaggcagcgcaggaggaaagcagtttgagttagggcagcactggccaggcagtagctgtggtggttgcatctttagagctagaagtttacatggatgaagaggagtgagcatgtgtgagctgtggcctttatgtgtgcagagggacgagaagcacggcctggaagactgtgcgtttctagctaagcatggctcttgttttgtagccattgagttcttaatgtctgcttttgcagtgtcgccatgcctgattttgctgcatgctttctcaaactacacattaattccaccatgctgtctcttagaacttggtattaagccagaatggtaggtcgagttatccacatgtaatataatgaaactgactttataaacctatttagggctacaagtagcttggtggcagaacttttacatgcgtgcctggacttaatcctcagcaccacaagaaatagaagaacaaaagctatttgtggaaatttttactttcgttctttacttaaaagagtgaaatggttgagcaaggaagagctgtaaagaagcactagtctggattaaaccacacagaataccatctctcctccaggtcacccaggcccgcacagccccatgctcgacctagacaacgatgtgcgcccctcggtgttgggccacctcagtcagacagcgtcactgaagagggggagcagctttcagtctggccgagatgacagtaagttatcacccctacttccatgtgtttcctcagacttatatactttgaagggatttagtgaaaaggctccgtttcatactctaggaaattgacaggtagtaaaaagatgaaagagaatacgatgctctcatgttcccccatgcttcgtggagtaagccctggaaccacaccactttgcacaggcctggatgaccaagcaacagtgtgttaagtactgagggcctggatgactgagcaacagtaagtacttgtggcacatctagcactacagtgtctgtctgacagcactgcccagagccatgtcagtcttctccattgctgtgaaccaggacaaagttattgtcctagttacccaccaatctgccctaaaatatctgctgaactcagcttttggagtcagtttgctattttttaaaaaataacttttcagtagttttctcataaaatggtttcagctttaatacttattggatttaagaaaggacctaaatttaccttttgctcctgttgtggtttttcaaataatgttttgttttttagtcagcaagaagtcatgatcagctgctttgagactagtgtgtggtgagtgtgtgaatcagagagattcctatatgcatgggtagagtgcacagtgagatgttcagagctctgtcagcttcacaggggtgtgcttctgtccatgctgctttcctggatttcccagcaaggaaggcaggtgctccgggtgagtgttccacagtagccatgcagagcagtggcagtgctccagtgagtgttccacagtagcagtgcagagtagtggcagtgctccagtgagtgttccacagtagccatgcagagcaatggcagtgctcctggtgagtgttccacagtagcaatgaagagtagtagcagtacagagtagtggcagtgctcccgggtgagtgttccacagtagccatgcagagtagtggcagtgctccgaacaagtgttccacagtagccttgcatagtggcagcagtggtcagagagctgagggatggagtaatggtactttgaaatactcctcttgagacagtgccttgtgactgctacagtcaggcaactcttctagtgctttagtgtaaagagcttaacttgggagctggagagagtgcacaatagttaacagcccttggtgctcttgcagaaggcatgtgtgtggttcccagagcccaggttcacatatgtatggaactccacttctaggggatccaatgcccttgtctcctttccattagcataaggctggctggggcatgtgtgttccaggcagcatggtgtttgccattagcacaaagtagttagaggtaatcagttacttttagggaaaatagccctgttgtccaatgaaatgcttcttggtagacttaccttatgttgaatttgtctgttctagaaactgaaggcagagcttgctcagttagtcagcagtccacatagataaggtcagaggtgattgataagcacacagacaatcttcaccagggaacaaataaaagtttacaacacccttagatataaaggaccatattgggaacaaaatttaaaaaggggggctggggccctggggcagaacaaaaggaaaaagatgcccacgccccacctgtttccctatcctctggtcagtcagatgtgggaaagcttctttctaccctatccactcatccctgggtgggcattcctctatcccactcttcagggggtggtcaaggggcagccctgcctgacccccacccctggagctactttgctaaaccagggttgtgggagagagggaagagggaagaagttcccaacactgaccagagtgcacagcggaacttgaaggtgcagagcagagactctatggttttagagctttattatagaaatgcaggggaaagagagaaggtagaaaggacggagagagagggggggggaagaagaagacaaagagggaagaagagagagaagtgagagaaaagaagggtgaaaggacaaaggaataagagagcgaggtgtgggctaagcacccctttttatggtcttcactgttgctaggtaactggggaggagtttaacctgaaggtcagaagctactactggccatgcttctcttgtgggggctgtgggaggtggtaccttaggcaggggccagagatccaggaacatgagggaacgcctaccttgtcatgtaggtgaattatgaccatcggggttcagacctcagctcgactggagaccagcctgcaattctccacaggaccataccttttacttaagagaatgagtttaaaactttcccccacagtatagaaatgctgatgtgccctaccatgcagaggccctaagctggcaaaaggaagtttccatgcacatgaagtcttcactctggttcgtacggtggcagttgtaaaaggcagtgatacttcagtcccacaaagccccagggtttgttctgtgtggtcttgggtttggggcttgtctgttggtaagattttaaaaagctgctgctttcatggttctctgaaagtggacaggaacctttgcatgtatgtagcgatgtccttctcagcattacctatagctgcactttgtgacccagtgactcttgtggtatttattcttattgcaaaatgctgaatgaggaggatttcatttagtgagagtttgttaatttgaataatttcaaatgaaatagtctgcagaaatgctttctgtatgaatatgaagctcagtgatgagaagtccagagagccaaactgaaaaatacagcaatttcaggacttttgacagtgaagagaacgtatttatatttgcttccatatataaaaagcacttaacaaagaattgttaaaaaacctgctcacagctctttatcaacaggcaaatgggggagagacattttaaaatagatctgctgcatccctccctcattgggatacaatgccaacacgttttatctgtttttctttatttctgtttacctggactctttctctgcttaggatagaactcatggtattatgtgttctacacaagtttcagacactgagccaaaaggcaaccctgcctaggaatacctattttcccttgggccctccttattagtttctttgggtgtgcagatagcatggttgtcctgtacattatggctaatgtccacttaaaagtgaatacaaaccatgcgagtgtttctgggtctgaattagctcactcaggatgatattttctagttccatccatttgcctgaaaatttcatattgctgttgtttttaataactgaatagtataccattatgtagatataccacgttttctttatccactcttcagttgagggacatctaggttgtttccagtttctgggtgttatgaataaagctgctttgaacctggtgagcaagtgtccctttggtatggcgggccatctctttgctatagtcacccaggaggaaagtgttttgcaggcagctaggtggaggctttcttctgtcctgggaggagcttgagcactaggagatatccaagcccataccgcagtgacacactttctctaacaatgccacacctcctaatattgccactttctgtgggccaagaatattcaaactaccacactagcaatccttaggataagggtgaagcactgtcctctgaggacttggcagctgctctccccttccctgctgcctggcactgccagtataatgctgagagaagtgcctcaccaaaaggaagaggtgggggcagggtccctgtgtttcagtacaaatgtattcatagtgttttactcttttaccctttagcatggaggtataagactccccacagagtggcatttgttgaaaaattaaccaagcttgtgttaagtcagctgcctaacttctggaaactctggatttcatatgttaatggaagtcttttcagtgaggtatgtatacacttctgactccagatcactgaatttctaggcttaaaactaaggttttggggttcttttaaaaagtcttaggtgtctagtacctttaccaattttttcatatttaaaaaaattaatcaactttatttttaaactggtaagcaaataaatacatcacacaccaaattagacattttcacatttttaaagattcattttaaaaatcttggtgatccttgagtttgttatgtgattgagacttagttttcttatctgtaaacagagaagagcaaagttctcttgtacacagtggttctaagggctaaatgagatgcacatcgaaagagaggtcaaggaagttgatttaaagattcagaatccagtggaaaattgtgtggatgtttagtgtatgaccaagcaatgaagaacaaggaggccacggccctggggctcagatctaagtttcccaatggaaagaatttagtagtcacacaagttatccagcccctgtctctgaatgaagtgttttgtaaatcattgcactttcagagtcagcattagtgagtatagttttaatatacagatctagtttcatctacatgtaaccattgaattttctcagtgctgtgttttgagatgttatcctttctccaatgtgtattttgttatctttgtcaaaaatcaagtggcatataggtacctgtaggtgtaaacaagatttagtagtattggacagtagtagactgatggacgtctacaggagaacaaaagatgtcaaagcggatgaatgcatatgaaatacgagtcccatagaaaatggtctataagtgccatgttaattatttccacccaagtgtttttttttctggccattttgagcctgcctgcctgcctgcctgcctgactgcatttgtttgtttgtttgtttgtttgtttgaagacaggatttctctgtgtagtgctgtgtagaccaaactggccttgaactcagagagatctacctgtctgagtgctgggattaaaggtgtgcacgacagagtacttgcttcatttctttgtagagtcataaagttgacaaatgtttttgatcttttctatctcagttaaaagagaatatacttctttatagatcctacatagttagagtaaatacatatatatttggttataggaaaaactctgcatgtttttggggcatttattctattaaaaagcttaaaagccaccactggagagttgcaaaaagcagaagggttagaaaatgtacctacttggggactggagagatggcttagaggttaagagcactgaccactcttccagaggtcctgagtttaattctaaacaaccacatggtggctcacaaccatctgtaatggggtctgatgccctcgtctggtgtgtctgaagagagcaatggtggtgcacacatgcataaaataaataaataaatcttaaaaaaaaaaaaaacaaaggaaagaaaagaaaatgtacccctcagccagtctctgagtgaaacaagaacgttcattaaatggacataggcatagataattgatataagagagctttaaacactgtccactttaaatgtccttttatttctaaattgtagaactgtcttattaagagctcattcgttacaagcttctaacagttaaaacaatagtcacttctttaaactatttgggcccatgtgaatcagaacagtgaaatctgccgttgggctcaccacaaactggttttggtctgattgtgcaggaaagaactgaggccttaattaacgaaatggctaataatactgcctcacctgtaagttcgctttaaacgtagtatattttaaagtatcaaataattcttatacattaggaaccaacatttttaaagttccagagctttaaagcacatttaaatgttattaaaagtttaaaaagtttgactttcttttaaatagggcagatcttatgaaccctttgtattctatattggggttgctcaggtctgtaatatcaaaaccatcagaaactgttgctatcacacaaaactctcagccatctgctctccattttattgacattaggtctctagaaaagagctccaccaggctttttagaatagtgtggcatggcatgtcatggcaaagcacacaagcataagcataggcttagcatagcagctctgccctggcggctggccagtctgtcacaacaagacttgatatctaggtgattttggcaggcatttagatcagcacagattgaaggtagagctgcttttgaaagcatgttcagaacagtatcctaaccacagtgtgccaggtactgacacatacacacacacatatgcacatgctatacatatacacacatatagtgtacatgcataaatccatcctaaaatactcagataccatgtaaataaaacaatgactgagataaactttactatctttccctcttgaagtgatcaaataaaagtcaatttttaaaaactcatcctaattctgtgagtgtgtatcaaaggaacaaagctaggcttctaatgaaagtgatcaatgatgggatgggaggaaaagggactcagaacataatctctcacctgagccttagcatacaagaagtagacaaaggagttcacacaacacacatgtttccaaagggaggttccaaggagagccctggcatgcacaggtcctagcgggcttgggtgtcagtggattgggttgaggctggaggcactgtgggtcagctgccttttggagagaatcttgggaggaaagcataggtctgtgtgtgcaggcagaataggagtgagagaggtggcagtggggttggggaaaaagtagtgggtgtagtttgtattcagaggtagtgtgcaggtcttgctggtgaatcatagggagaaatcaagacaagtgttcagatatagcaatgaaacaggcttctggctaagcaggtgctgtccacaaagtttctttcttgaaggaaacctgccaggtttctggtttttagtgtactgcatgagaggatcctgtgaacgaatacttaggagataataggtaatctaagatccctgtataagtctcagaggttttgaactgcaaatccccgtaagggagatagtatttgaaactaaaggcaaaattagtgggaggtaatagaagagaaaaatatttcccatactcagatcagacaattggtagctttcagaaggctactgtgtatcactctgtgagccaaacaaagcagaaagcagagcagtagagctctgtggtttgtctgggtgggagagagaaaccctgtgctgtggtaccttcctggctgttggcgtcatctcacctgggcacgtagccttcatccttacaacattcaggctaatcgtgccatttccctgcttactacacttaatacactttggtatcttatataatagtatataaaactacttctcatgtaagacagtgaactcaggagttagctttttaagtgattatgatataaacttttaacttatatttttaagtttcaaagtaaaagtatatttgtacaaagaagaatgatgaaagcttcacagcttaacatgaaatcttaagtcatgtaagttaagggtatgtgctaggtatatatttggtactggttcttaatcagcagagtagcctaacccttcttgtactcattcatgtcaatgatgcccagctccatagctctagtatgtgtgctatatatgcacatatagaaagcatgacttatattctcacattgacttcacgggaatattgtaattatttatgcgtctcttaacttgaaaggtctttgacatgtctttacacttagtcaacagtacctgaaaactttaaacttaacagatacattttgtgttatgttaatgaagtattagagtttgttctacagtacttaattttgttttgcttctctatctgaaaaggtcataagcttgtccttttaggccatttttatatagtagtatttggttgtcagaacatttgttagtaagaaactagcagaagtccagttgaatagattcctcttaactatgaaaacagtctcctgtacattacattaaataaagaaaaacatagactttatgagtaaatagaaataaataattctaaaatgatagaatgtattcactcctaagatacactgcgaagaaaacagtgatttataaataaaaataaagggacagatgtagtgcttgtgtttatgataaatatttaccaatttcctttggcacagatgttgtgtgctctccattagctcagcgtttactctccctttgttgctttgccagacagtgagatgtgatgggaagagtgccgtcctgggcacgacgcaccatgtggttcagttgcaagttgagcattgatgggaaatggcacacctaattcacctacgaaatttgtagtctcagcttggttcttgagtgtgtgcctcgatttgtagcagagcttagaaagacgaaggctaactcgttttggaataagaaaggttttgtttctggttatgtcttaacattcatttaatcaggttaagtctcatgtcttcctgtatggatgctaaagcatttcttaacttttctaagttatttctaaaagatagctaatttttttttgtcaatttcttagacggctgagaagtcaggccagagtgaaagatcaaagaatgtgaggcagagacaaaacgatttcaaggtgagtgaagggtgagaatgctgacttctcagagcactctctctcctggcgttattgaagactttacagtcaagatactgtcttatcatttagaacaaactctaccaggttgatgaccataatgcagttttgcttttcattttctagaaaatgattcaagaagtaatgcactccctggtgaagctgatccggggagccctgcttccactcagcctccgagaaggggatgggaggcagtatggcggctgggaggtgcaggcagagctttcggggcagtggctcgcacacgttatccagaccataaggcaagtgtgggcacgtgggagccatgctcatggaaagggctcagtgggtttacatgcatttgtttgctgtagtggtttttaaaacagtcaacaccccagagtaagatatgctacttaacatgtcattgaggaatttatcttctgcctctctgtcctgaggctcctatttctcacttatctagccaagcagttcttcagcatgtctggtatatgtgctggatgagagtgtcatactgtctgtgcacccatctgctgcagagaccctgtactgttcctgctgcgctcatgctgtcactcctgagctccgtgaggcatacacacaggacagtccaggcaaggcagggctgctcggatcccccttttctcacttgtgttttatctgtttgccaggctaacatatgaatcactgaccgccctggagattcccaatgacatgttacagattatccaggacctaattttggatctccgaatacgttgcataatggtgacattgcagcatacggccgaaggtatcttagttttactggacaaagttacctgagctggcttctttccagcttccaaagccttgaaaatgagagaaaaatagtgttagataaatttgcacctatttattcatttatagctgtagaatagaattttttcttttttttaagtatcttttcaaaacaatttaagatttaaggcattgcagaagtgaaggtagatatacttgaaactaagaatataagaatacctttataataaattttaaatagaaactgctggatatagaaatttatgtaaaatatggtcccaggttaaaaacatgtggatattttctaagttgattttaaaagtcacatgaaatcagaacaccgttagcagtgtttctatgaatattagaaattatacatgcttttctttatatttccagaattttctatatagagccactgacttagttggggtgctcttgctatgaggaaacactgtgaccatggcacttcttataaaggaaaacatttcattgggtctgccttacagttcagaggtttagtccattatcatcattgtaggaagcatggcagcatgcgggtagacatggtgctggagaagaagccgagatttctacttcttgatctgtaggcagcaggaggtgaactgagctgctaggcttagtttgagcatatgagacctcagagctggtacccagtaacccacttcctccaacagaaccacacctactccaacaaggccacatctcccaatagtgccactctctctgagcctatggggggcattttctttcaaaccactacatcctccaaaagttattttttataagtgacctttaaagtattaagtgtttaaaaaaaacaagaactttgttataaacagcataggctggtatcgtctgccaccagggttctaagtggggaaggccttgcactgtagaattggaagttaaaacatgtgtcaaaggagagaatggaatgcaggtaagaagctaaacatgcctcccacctgcacctacacaagcctgccctgctgaaagtttaggtaggcgtcactccacgtgagaggtagccaccattcaggatccagagggagggctcaacactgacgctaagccactcagagcagagaccctggagggctcgttttgcacaagtctagcactgctgcaaagagtaccgagtaagcagtcactgttgtgagcagcttttctcctggtagtgcattgcatgaacattttgttagaatatgtgagaaaagcataactaaatcctcagatataccaatattgagttttatctctgttttcataaacatatgtaaaatactaaaagctacaaacctatagatgtttttgtctctgttgaagttcagtgagataattatactagaaaatatttgtgtccttgttttccatgtagagataaagagattagctgaaaaagaagactgggttgttgataatgaaggactgacttccctagtaagttggatttcttttttattagtcattagtgtttattatatagaataaatgttttatgttaataagggtcatacttgttttacactatactctagtttctagaaattataaagtaatcttaaagtatcctttcctggagtcagttttactgactgctgatcacagccatctaagtgagtgaaagcgggggcttgttcacaggcgcatggcctgtagcacttcttcagtctacattgcttttttattagagcgggcttatttccacaccacttagcaacttacgggcttcagaaagtcaatgttggggacagaagaatgatgtttgcccccaaagctcaaaaccaagcaagacaagaagcacaagctgacatgtctagtctagaaacatcctctgtaggagggggttgagaattacaagagcctttgagaataggtcttataatttttcatgttctcttgcctgtttgaagggtgctcctagcagtctgatggggacctagtcactactgaaacacaggacacaggacaggggttgccttttcccctcacactggccagacagctcatcatgcggccagccagggtcactgtctgcctttgtgactctctgctcaggtctctgtgtggctctcctggtggttctattggacttactcctctcaagaagaaaatacagcaatctctgagctgccatagccactgtcttaagaggctgctggctagagggtgtccccgcgccccaggaacaatgctgcacagcagcctatgtggcttctgccagtgtccttcatgtcctcctttgcaagggagagaaaataaattgtggggagtgaaacttccagtttctgccaagaacagagtggctttgccccacaagttttaagccattggtaagccaggggcaagagaccatacagcatcatctttcctgccaccctgcataggctccaggtagactgactgactttagaggtacatataatatttagctcgtcactctctgagatgtatgaaagactatgaaacatttttatattcattagatgttgaagtaatttaaatattttagtttcatttttgttgctgtgttaaaatactctaaccaaaagtagcttagggaaagaaagggatttttttgcctacaggtccaggccacagttcgtccttgagggaagtgagggaaaggactccaggctgttccacacaacattgccttcagtcaaggaactcacttcacagcccgtgaagtaaagtaggaacagtggaaacggttcttgatgactggaagcagacttttattcccgctagctttcttgtgcagttcggagcagcttgtctaggatggtgctgtcctcagtgggcagtgtccctcctatgtcagttaacaagacaaccctgtacagacagccacaggctgatagatctaggcagctgttgatctgagactctcctctcagatgctctctactgtgtcaaggggactgttaaagccagcaacaaagagatgctgtgctaaatgagttgtattaaatgctcttcctgagctgtcagacatggttcctggactatctcacattgcctgtgtggcttaatctcctagcacatgccacgcttctgagtggtgctgacatagaggctagtgtactgcattctactgagtcagaaccagtcctagggaaggccagggatctgtttggccttattcccccttaatatagaaggagcacaacatgcctttatagtgtgggcttagaagtaaatgtgagtctgtattggacaaaagattttatttgttacattaatgcttatagtaactagggccaccatgctaattacttgtttgaattatttcttactatatcttaaaatctcattcaggaaactatttattaatcatagcaatgttaaagagtatgctaaaagagaaagagtggctattaagcactgatgaaataggtgtaggaagctagccatcagcttaatgcctatgtatgtatctgtcccatattagttttgtgcaaaggaaaacaaaaagccatatgttcagtttgagaaagttaaaaactttctcaaaatttcattaaacaaaaaactgaagaacactcagtcctttagcacaaagcagatgctagctttagctccttcctaatcaaccaatcagcatgcacagcctcctatggcctggcccatagagcagagttctgctgggaagcctggatattgtagaggaactctggaaaatgactagactgaatattagggaaacatgctcctagcctgtttataaaatgcacagggttaaaaagaactaaacccagtgggtcatgtgaacaaacagctgaagtggtgcctctggtgcccttcctttcctcttgagaaagttctgtgatgaagagcaacaagggccatcaagcccaccatgccagcttccttcttcaccagcatttcctgcccccacctgtgctatgcccatatctctcctcctgttctcaggggctttgacaagagaagagccttggggtatctttctttagatgtatttgtgagttttattttttctgacttagtatatgtagaaaatgtgtaccatgacataattgaccttaaggatcttgtacctcctctagatggttgttgtaacaggacaaggggtgacctgcctagaattgagcttgtgactaatatacatgcaatgtagtcttcaggtgtgagcaaacaccttagatttgctcttgtcagtgagcataggcttttggtcagattgtacctttgttcttttctgtccatccggggacttgtcctttcggcatattcagctccataaataaatacatctatttagccagtgttgtctgtgtttgaagatattgttcttcttttttccagccatgtcagtttgaacagagcattgttcactccctgcagtccttgaagggtgttgtcgattgcaaacctggagaagccagcgtgagtttctgttcccttccacctgctttaaaagatcttaagaaatccctgtctgggagtagcaatggagtcacggtgttctctcttactaactgcactcatttagtgacctgcatagacatgtggagttcaggttccagggcaggctgagcagttgaagtgtgagtccagcagctacaggcagaccagggtccttgtggcctgattgaattgctgacttggatattgtcagccaactggggatcagtaccaccataggtagacagccacccacagccagtgtagttttctgtgttttagcttttaggtttcacttatcagtaaaatgttttgttttctcagcaaaatcaatacttttttttttttaatctgaatccttcttcataggtctttcaacagcctaaaacgcaggaggaggtttgccagttatgcatcaatatcatgcaggtaagtgcaaacagagatgtaggctccaagccatgcgttgatttgtcgctcaccttgttgacatcactgtgaaatgtgggttttttcatagtctcctctgtatacatgagagtttagagtaagatgtgaagattaatgttttagcagtacttgtgtgtgtcatttctattgtgttctcctgtctgtcttaatgtactttgtattcagttcctttagatcgcagagtaaattaaatgaaaatcgattgcttgtaattcatctagagttgtaaagtaatttgactggaaccagtgctttgtaggtacataagtaaagttgagcatttgtgtgagtaaataaagaaaagacaaaaatgactttctcctaaaatatactcatgaacataataatgattcaagcaaggtgctattaatattttgtcagttctatagctagacattgttggggtgtatatttagttctatagttagacattgttggggtgtatatttctaccacataacatatgcactcacctatgcacatgcatacgtacacacattcttattagacacacctctcccccagacagttctgctttaatttattaaaaattattttaatattcaaatagattgatatctgaaaatttgtatcactgagacttgctatttttgcccaggtttttatatactgcctggaacaactgagcaccaagcctgatgcagacatagatactactcagtaagtaaatgtggaattgatctcattggtgcatttgtggagtgcagacattccatactgaggttgggtctcacaggaagccttggttgtcgtgaccttattatatgcttggcctgctccctgtctctgtgctccccagccttctgagttctcctaactcttgaaagacacttgtagttctctaccaacactgttgcatggagcatcaacatagtgttgctgtcctcctttttatggcaggccgttgtctggtggacactcggtctgtcttgctgaatgacactgcgcatgtagaactcttgtgcacctaagactcctgctctaacatagtatcagctgaagaaacttgctctgtcacctctggtttttcttcaggaatataactttggcatagctgttttatttatctttatttcatttgtgtcaagcatagtgcagagtaattttctttccaatacaagtcactcatattaaaaagtaaaacagttaaaaataaattgtaaaattcataagaaaaaaaaacacagtatcagactaaagtgtttgaatatagttagcgatttgagaatttttctgttttctgatattaacttttgctcttcaatatataaaactgtcaccttcagtgaccagatttcttttttttaatttatatatatgtgctcatacctggcgtgcttgcatgcatttgtgtgtgtgtgtgtgtgtgtgtgtgtgtgtgtgtgtgtgtgtgtgcgcatgtgtgcatgtgcgtgtgcgcgtgcgtgagtgtgagagagcctgtaggcactttgggaacagaagtagatgatggaggctcttctcagctatacctctgccacattgaggcagggtcagtctttcacttgagcctagagctcactgactaagcttgtcgagccagcccatttccaccagtcatgtgcttaacagtccaggtaaggtattatacttacctggtattcacatgggtgctagagattggactctgctccttataactgcgcacaaacactgaacccacgtgtcttagtcagggtttctattcctgcacaaacatcatgaccaagaagcaagtaggggaggaaagggtttattcggcttacacttccatactgatgttcatcaccaaaggaagtcaggactggaactcaagcaggtcagaaagcaggagctgatgcagaagccatggagggatgttctttactggcttgcttcccctggcttgctcagcctactctcttatagaacccaagactaccagcccagagatggttccacccacaaggggcctttcccccttgatcactaattgagaaaatgccttacagttggatctcacagaggcatctcctcaactgaagctcctttctctgtgataactccagatgtgtcaagttgacacaaaactagccagtataccatgcttatctccccaattccacatttttaatgcttataggtctttttttttttctttttgtctttattttttatttacattgtagtcattgtcccccactcattccccccttccacagttcctcatcatattccttctccccacttgcatctgagagagtactcccccttctacaggccttccccttccctggggcctcaagtctctcgaagattaagcacatcttctcccactgaggcctgaccaggcagacctctgctatatttgtgccaggggccttgacctagcccctctatgctcctgattggtagctcagtctctgggagctcccagcagtccaggttagttgatactgctggtcttcctatgggattgccctcctattcagattcttcaatccttccccaaattcaaccataggggtccccgacttcagaccattgactgggtgtaagtatctgcttctgtctctggcagctgctggtaggacctctcagaggacagccatgccaggctcctgtctgtaagcacatcatagcatcagtaatagtgtcaggccttggtgccctcacatgagatgaatcccaagtctcttctccatttttgtctctacagttcttttagacaggaacacttctgagtcagaaattttgactgtgggttagtagccctgtccctccacttgaggtcctgtctaactattggaggtggattcttcgaattccctctcctcaatgttgggtattttggctaaggtcatccccattgggtccttagagcctctcatctcctgagtctctggcattttctagagggtccccccatcccctaccacaccccacacccctacctgaccttgttcccctttcccaggtcttctttgacttgactttttttttatgagacttattatcccaatcaatcttttcttgttactttgctaaaattcctgtttcatacacattctaaggcgtattgcaggcatttctgaactttctcttctgccatatttattcaaatatactttatttcagttagtgctattttaattaccatttgtttatatttcaactctttctagatcggtatctttttattttatttctatttttttctattttagcatattatttgctatttcatcatgttagacttacatacgaattcaagtcaatcaagttaacgaaaaattctgttaaggtgttacttatgattctgttaaattggtaattaattaatgggttagctagtctgttctccccttagatcttattatgtttttgattgcttttgagttataaactaatttcttagctcacctttaagtaggtttcaaatctgaaagtgggtttcaaatcttcccctgggaattctgataggcaaaaacattttaattatatgagtattatttggttttttggcatttagtagtttatttttaaacataatgcagtcagttgagtattgagaatgcccccaaataagttttatatggctcagaataaaagatagtccttagtgcttttttatgataataataattaagtacaaagaaaatctacagagttatacagccattttcatcaaaacatttggagttattggttttgtgtgagttttaattatgactgttgttttgcctcttctgcctttagtctttctgttgatgtttcttctcctgatttgtttggaagcatccatgaagacttcagtttgacttcagtaagtaaaatggcaagcacagagaatgaagtgtatcatgctaaagggagtggctgtggtagtcagcttaagtcacttgagccagaaacatcatcccatgttaagatggccactgtggtgactgcagtatacattttggggttacgtaaacagacgcaatacagcacctgcatcttgagtgttaaaagtgcctcggctgtttcctgctgctgcagagttgcctggatggacaggtggggaagcagaaggcatgacatttccttcctggcatttgcccttccagccttcttttttcctcccagtcccctcttttatttgaacataggttatatgacaaagccaaaaccaaatccctgtaagcaatctgatagaggcattttctcaattgaggttccttttcccagataactctagcttataggaaacaaaaacaaaacaaaacaaaacacagtaagaacaagtgtcaagagctaagggaagccatgaagtggattgaaatagctgttccatgtgaatctaggaagaaagtggggtagaggagatggacctgaaggaaggagcctttgaaactcagactgtaccagccacctgtcccaactatgcttttgttttcttggtctctcagaaggagccttattaatgcacagtgaccgttctgatctttgttcccttcccagctcccagcaaacgctgtgtaacccatcagccatgtcctagctgatttgtgtgcaccctgacttggagggctactccaagcctcccatctttctctagttagagaggagagcaaggtggttccatgtccatctcccaagaggtgcggaggtgcaccaggttgtcagcggtctcccagggttttcactttcactcctcacaacagcttacctgtccatcacttcccaagttatgttcctttgtttccaaaatctgtgcctgtgttcttccctagtggagggatctcatcagatctgacttgtgttctgagaggacccagatcctctcagggttgtattattcagaaggaaatggataacattgaaaaagatctagattttgagtcagaagactttattcacagtctcaagggttcattgctggtgctgactaggagtacagagaagtactacataagactcattccttcatatacagagactattatggtcaaatgtacatctctataccaggtacaaacaaacttcagattaaccatctaagtttaagaattagattcttgttattctgttttcttcccactttcatgtaatgttcaatataacatacacaaacaaaatgtacttgctgagagttagtctttagattactgaagtagttctcactttgaagagggtccagaagtcttgtaatggagaaaccaagtcagcacagtgggggaacagggcaggatagacttgcacactcaatcaactagaatggaagtcttaatcctaaatgaaagactggtaaaggacaggcttgaagccacttgagacattgagggggttctgtgtgtttggagtagctgctgcaaagtcatttacttcctgcactatgagaagaatgtgttaggataaaacagaaggtagcagaagggaagatggcctcacatgcccagctagcttagtttctctgccattctgccatatattcactttagaaaaataatgtcatttacagtatgacttcctctggccttttttatattccatttcctatctaaaagttatttcagggcccctagcagcagccttctgtttttctgggctatttaatggtgttgtaggctttatatatgcctgttgatgaccaaaaagccaggcgtacatatgtacatatatatataattggttttttgagacaaggtttctctgtatagccctggctgtcctggaattcactttgtagaccaggctggcctcgaactcagaaatccacctgcctctgcctcccaagtgctgggattaaaggcatgcaccaccacgcctggctttttgtgctgaaaataatgacaggcacttgtaatgaagaagtggggagatatataattaccagaagatggatttgcttgcttattgactttagagactttagttcatcctttagtccccacacctcaaagagcaagaacctctgtttttctgcattttctcccctggagtacttaactgtaagttactctgattctgcacagaaagagtaaccaagtgtgggtgagaactgttcctggaaagtggttttgccttagttttagtcaaggatctccactgagggccctggatgagtcaccattccagagaatgcctcccacttataggagctcaggcccaggctgccctgaagtgaaccacagcagcagcagagcaggggccattcctagaattttatttacagatagagttcttctgaactgtaaaaatccactgtattcattagactacaattatagtctaacaattttgtaaggaattgtttaggtggacagagccttgaagactgtaacagcaggaggcattcttcccctctccctgtcttttggggaggctggcatggacatgggatgggactgggccccaggacactgggccaaggaaggaacaaggagcccttcagatagatagtatggcattaaaatgttctctcaagttgtggatgattcataaaccattttctaatagttcctacactttatgtagttattcataatatcaacttgtttggcctttgtgtacataaaatgttaaatggaacatttgactcttcctttggaggatattggaagtaggacacagagccttgagcattccagaaaaggtttcactgttgagtttctaccccaaatccctgtttaaatcctcagtgttatgcttctctgtgtgttaattttaggacacagccaagaaaaccaaggcataggatattgatgttaaagggcagaagcctatcactgtacttaatacaagatcaggattatctcttaaattcaccagtactgtctaagtttgttatggtctgtttgaattacaggagcagaggcttttgatagtcctgagtaattgctgctatttagaacgtcacaccttcctaaacatagcagaacattttgaaaaacacaacttccagggaatagagaaaataacacaggtaagtgctttgtagttagtaggcaagtccagcgctttgccacattatcgtctcagcacctcttgcctccctgtaccccagttccccaggccccatgctcactcttcaccctacccatctgagaatgatttccttcctcactttaaattgttaatgtaacactgctttactcaggagcaaaactgtctgatggttgaactggttaacttaaccctgttctaaaagtctgttcaaaggtcaggcaagacaatcaggagaaaaaagtcaaacctaaatctaagaatcttccccattgactcctgacggaagaaaccttgaggcactgctgagagcaaccctgatcctaactgcaagggatcacttcctgctgatccaacctctgcctcctgtcttctcttcccgactgcagccctcccttagcctgtctgcttaagcacaccctgttctcctgaggctggcccttccttccttccttccttccttccttccttccttccttccttccttccttccttccttccttccttcctgacttcactacaacttttgcttgcttcgcgctccacctgctggatgtaggcaaaaatgtgcatgtgcatgcagatcagtggaaccagttttgtgctttagaatgtttgctgtcttgtttatagtttttcaaataagcagaaagggagagagaggaaaaaaaaagaagttccttgttgctaaaggttggctagttcctgagcaaagtttatcagatttctgggtaaaactgagccactgtctaatgccagcatacttttctcagtgaagaaaagaagaaagataatcatcttgtcaatcatataatcagagtttactctcagtggacgatctactttttataaatgatgcttccagttcgtaaactggcttgggttttttttttttaaataaatgaaaatgtcagagtgggtggctctgtcttgttttcctgcctttcgtaaagattaatcatcctgctgataaatgttgtgacttgaggctttgaggttgaatgtctagtttatttccagaaagctttcatgttcataattacaagatctgtgcaagggggaggaggctttgtttttattcagaaaaatcgtaacgtgactgtatgtacatatgaagaactttattgtttttgcccttaatgatatgtgatgtcattaagaattgcatatgaaagaagcaatgtttgacatttaagtttttgtgaaataataagcagaaattatgttgctttactttatactattaagaagcaaaatgaaactaatataaagggaggtttttgatctcttttccagtctgtgtctgaatcacagagaaaggtaatatgaaggcccggggagagcgcagaataagcagtaggctttttgaccactcagcagtatgagctttaaaaaaattatttcttgagtgtcttgaaactattcagttgtggctgcagtgactagagtaaagcgatgtggacacccactggctgtactgtgtgccgtgtgccgaagctctcattttcatggtgtcaagcaagaaaaacccacttgctctgaagaaaaaaataggtcactcatagcccttatttttcacagttcatgatatactcaaggaaatgaaactaattgattaatgtgcatcattttaacatgcgacactaagtggtgattcactagataagaatatccctgtaaggttccaccttaaagcaggccccttgaggcctctgtaacttctgggtcacagggagcaactgctgtgtgcctagaaagttccacctactcatccattttctcgttgtatttgttaaagacctaattacacatatgtgcacacacacacactcttgactttttttaatttatttttttaattaggtattttcttcatttacatttcaaatgctatcccaaaagtcccccagaccctcacccccacacacacactcccctacccacccactcccacttcttggccctggcgttcccccgtactgaggtatataaagtttgcaagaccaaggggcctctctttccactgatggccgactaggccatcttctgctacatatgcagctacagacacaagctccgggggtactggttagttttaattggttctttgtgagtttcacatcacgctctccagtcctgcacacctccccatcccagcatatctgccctttgctcttgcaatctacctcccttcccaatacacacaaacaaacaaataaacaaacaaaagcaaagcatagaaaactatctcatcatggaagaatgaaaatgtcacaatgtatgccatggtatactgcctctgtccacacactttcactttcaaatgttcattgcaatgacctaactatatttttgaaaaggagagataaaaatcaaggtcatctttaatgtactagactaagtatttatttaataagacatatcccttctgacttgtcccgtcacccccatagtaagtctagacctgtcccgagtcacctgcattcacacacagtggatccgtatctcctcactccccgtcgctgacctcacgtgggaccccgagatttgtaagctcctggtaatacatacccacgttgctttggggggggggggctgatcacattgtgttttgatcatcgtttcccagcataatttttaattgtataatatccatttgtatactttaatttgcatggaaaatgactgcttttacatttttattgcctgtgttgtagaagaaatagctaggaagcatgtagagaccaagggagatacagaggtttgttctgaggatggagaccaaatacaacacagatcgaactcctcaggaacatttgttgagaatatcagatctgtgtggaggataagccttaacatgttattttattgtggcagctataaagatgtaattccagggacttggggggggggggcgggcgcgtgcatatgttagatgcaatcaatattaaggaagcaaagctatacaactgatttactatttgtatagttaaagattcttcctgtctggagaatgcagacattgattaagtattaaatgcattactgaacttctatttaagctcctaaccagaaattccactcaggagggtaaggggacagtttcttttcatcacagatgcaggcaaatcttttatatctagcaaccaatttaaagtatttcttacgacttgaaccataggtattatgtccattaggtccattctttttagcttacctgagtatacttcttagaccttgaggcatttgaatttactgatgaatttatgaatcactgcagccgtgtttccttcctgctgtgttatctgtggctctgcttgtttcgtcttcctcatttcttcatcagactacgttcattaaattttgctaagaaggtatttttaatgttttattgattctttgagaatttcatatcatgcaccctaatcccactcatttcccactcctttatatctgccctccacccttgcaaccaccccccaaagaaaaccaaaccaaaccaaactaaaacaacaacaaaacatcttgtcatggaaactgtagtatgtcacagtgtgtgtcatatggtacacccttttgtctccacattttaccttgcaaatgtttgttgtaatcagtcattggtctggtttgaggcctctggcttctgctatactatcaaccctggatcctcactaggactcttctctgatatcctgttgttgccctgtgtcatggagatcttggaggtttggatctgccagaccagctcctttatcagctccagcagttcataaatggggtagatcttggagtgggctaactaaaagccctagatctgggcttgagtggtagctaagttggtctgcacaccagctctcctgcacccacgccaccagggagagctcttcagtgctatcctggctatctcacccaatcccagtcctcccacatgccaccggggccagttccacactcctgcccagtgaggtgtagatcctgctctcccgagtgctacaactggtgagggccagtcccagctctcctgttctcataacccagggccagctctcccacctgtcacaggctaaaccctaaccctgactgctacagccagtgagagacagggctagctctcccaaccatacttccagagctagctctcccatgctgtccaagggaagggcctaggctcaaatggttgcacaggttcttcatattcacccctttgttagtcccacttttctccacagtgtaggaacctctccctcagcttcactttctctcgcatctctccatctttctcatctcactatcacatattcgctctttgtagtggcacccatggtggatgcttgcttaggtgcctttcttctggccacactggaacaggtgcttgggtctttttattaaattatttttgtgcaacaaattacttttaaggttgaagtttcaaactggtgtatcctctccaactgaggctagacacaacagcccagttaggcaaatgggatccatagacaggcaacagctttagggacagcccctgtgctagttgttgggggacctacatgaagaccaagctgcatatctgctacatatgtgtgggacgtaggtccagcccatgtatactctttggttggtggttcaatctttgagagccttgagggtccatgttagttaactatattggtcttcctgtggagtttctatccccttctcggcctgcagtccttcccccaactcttccataagactccccgaacttcatccaatgtttagttgtgttcctttggatctgttttggtcagctgctgggtggagcctctcagaggacagttatgctatgttcctatctgcaatcatagtagagtatcattaatagtgtcagggattggtgtttgcccatggaatgggtctctcaagttgggctggttattggttagctattccctcaggctctgctctgtctttgtcactgcatttcttggagacagaacaaatttggggtcaaaagttctgtgggtggattggcgtccttattcctctactgggggtcctgcctggctacaggaggtgaccacttgaggttccatattcccactgctaggaatctcagctaaagttaccccccataaactctctagagcctctcccatcccaggtctctggcacatcctagagaggtccccaccatcaccaccggtaccagctgagacaatttccattcattcttctgaccctctcgcctgtctctccccacacctgatcctgaaaacccccattcctctcctatcacttctcctaccagtttcctccttccatctgcctcctatgaatattttcttccctttcctttctgtcatgttaatctcttataattatttttagggggtaagtgtgcagaaatgtgtttgtgtgttttcatatgtgtacagttacatttgtgggtgtgcaggtgtacatgtagaagccagagtccacttatatgtcattctctgtgagctgtccacttggagttttgagacaaagtctcataccagcagtgtccaggattctgcctgtgtctacctctctgggctgggattacacgtgtgtgtcaccacagctgtcttttttatggtctggcttttggtcatgggtggctttttaagtgggtgcatggcagttctttaccagctaagctgcctcccaaccccatcttcatttccagattggccttggcaatcactaccaggtattcaacccaggagacctggctcatactaggcaagtgttcttccactgagctacatcccacattttatttttcaaggaacttgcatactttaatatactcatttggcattagtgattttctttaatatctttttaaaaactgactttgttcctttccacattaattttctattgtgttagttgcttgaaggagtttaaaacattaattctaagtcttcttttaaacttctttttaaacatctgaagctcagtgttctttactcactgccttatctccacaaaagtttagatgcgctgcattttcattgttagcctcgttttgcttaagaagtttttttgtggggtagggcaggggttactaagggaagtcctcttgtatgtctaccattgaactgtattcctgtcttattttaagaatacttgaaagagtttttggagctgcagagcacttaagaacaattgctgttattacagagaacattggcttggttcccagaatctgtaaggcagctcacaaccttctgtaccactagttccagaagatctgatgtcctcttcttgcctccacaggcccctccatacaagtggtacacgcacatacatacatacatacatacatacatacatacatacgggcaaaaaaacataaaacaaaaaccttttgaaaagaatatttacttggaagttatatttcatatttctagggtggttccagtctgttaggtgtattttgtaggaactaggcataatgtagaatgggaaggaacttggatttcattttcttccactgtttccctcacctgttcatcttcctcattctgatttgtttgacctaagttagtgcccttgatcacaaatacaggcaattcattctttgaatcttttcataagcatatgtatgttgtctagacttaggtaaggaattgacatggctctgaggttgggttcctgtcgataccattgcagtggtatcaggttttgaggtgacatttcagaactcatactgatcctttattctctgtaggttttatgactttcttctgggaaagtgaagcccaccccctaattcaattagaaactgggaactcttataatttgcacctgtatgtgtacattgtcctctaacttggaacttagctgtccaccacacctcaaactctggttctgatccagtacaatttcttcttttgtttacgtgttggcttctctcattgttcatgtatgtccacttcaatttctataggtttgtgttataaggcctcctagagctagactatcttccctgtttctaacttcagctttagatttctgtagtgtttctttgtgctttaaaagacagcctgcctttcaattctatatcctgctgtcataaaatcatgtcctgtgatctactctcactcccatctgaagagttttcactgacttctgttcctgctattgctcccaccattgcttggtgtgtgctttggttcccagcaggcgcgtgccttagatgtgcattccactctcctgtcagcttcttgaagttcagctctgatgttcaagaagcctgggcccctaagtaaatgatgtgaaaaaagactggccatgttccactacacataccctgagccagcacactgatggtgtcaaaaggcagttagccacttgagtaccactgagatcaaggcccctcctataaggctgataccaacctctgtctgttttgtcagtactgccagtaggagccacagttggcctgtgctgaactgtgcctagatttaggcctgtagtactcacactaggactctctagtaacatctttgatgtattgtttgaaccatgaaagaacaaaagctgttttctccatggagtgactgtaggacaaactcggactactcagcactgagacacatctcagtcatacagacatgtgattggaagataccagagtagccacaggcaggttgttagaacagagtgccattggatgacattactgatgtggaacactacagttggtgtccttttgtttgtcattgactattaaatatttatactgccagtttggtctttctacagaaaaagagtttaaaggattttgaaagacaacctatagtccatagatgggacttatttcttactgtgtaagccatactaatagttctctttattagtgacatagataagatagaaacctgaactatgtagaaaaattatttttaaaatgtaatagatacatacttgcattattttatttcttctccactcttaacttggcattttttaaccccatgttttgtgttgtaggttagcatggcatcgctgaaagaactggatcaacgactctttgaaaattacattgagctaaaagcagatcccattgttggatccttagaacctgggatctacgcaggctactttgattggaaggactgcctgcctccggcaggtaagtctaggaacattttctgctgctgcaaatggtgacgggtatagataggtttctgtgaaacaagatgtacttaaactatttttctttatattcattcttttctcttcttaccaaaggtgtgaccttatttttacttatggcaattttacttattgctttaaatcatttttaaactattttttttctgtttagaaatgtattcttttctcgtatattacatcccaattgcagtttctcctcctcctacctccagtcttccctccagcacacctcacctttccctctgatccatccttcctctacctcctctcagaaagaagcaggcctcccaggaacatcaaccaaactcagcatggcacgctacaggaagaccaggcacatgccctcacatcaaggccagacaaggcaacccagtaggaagaaaggctcccaaaagcaggctaaagagtaagagacagttcccaaccccacagagtcccacaagaacaccaaactacacagccataacatgtatacagaggacctagctcagacccatacaggctccctgagttccttgacacctacccctcatgaattctggtcagttgattctgtgggccatgttcttgtagtgtccttgacctctgtggctcctagaatccttcctccctctccttgtaaggtctctctgagctccacctaatgtttggctatggactctgcacctgcacccatcagttgctagataaaatctctctaatgacaaatatgctaggctccagtcccagcacatcctgcagacaggaccaactgtaggttgacagatttgtggctgggttggtgtcccaatccctctacttgaggccaaagctggttaaagaagatagtcagttcaaggtaccttgtcccctattgctaggagtctttgctagggtcaccctcatagatttcatggagtttccattccagatttctacctcgcccctgaaatacccgttccagtcatctcccagtattctctcccctcatcctcccacccccagtccacccacaaaatctgttctatttcctcttcccagggagatccttgtagaaccacttaagcttgcttagcctttctgtgtctgtggagtgtagcatgcttatccttttctttacagttaatatccacttacaagtgagtacatactgtgtttgtctttctgggtctgggttacctcattaaggatgtatgttttctagttcattcatttgtctgcaaatttcatgatgtcatttttttaacagctgagtaatattctcttatgtaaatgtaccacgttttctttatccatttttctgttgagggacatctagattgtttccagtttctggctatgacaaatcaagcttctgtgaacatagttgagcagatatcactgtagtaggatggagtgtccattgtgtctatgcccaggagtgctataactggggcctgaggtagatggattcccaattttcctatgttgatttccataatgtctatataagcgtgcacttccacaagcaatggaggagtcttctcattgctccacatccttgccagcatgagctatcacttgcttttaattttaaccattttgaggggagtaagatggaatctctgtcgttttgatttgcttttccctggtagctaaggaaccatttctttaagtgtttctcagccatttgagattcttctgttgagaattctctgtgtagatctgtaccccatattttaattggatttttggatttggggtatctagtctcttgagttttttatatagttcaggtattagacttctatcagatgtggagatggtaaacatttttttcttttttcattttgtaggctgccactttgtctgggcagcctacaaaatgatggatggtgtcctttgccttacagagcttttccagtttcaggaagtcccatttattaattgctaatcttagtgcctatgctatcagtgttctgtttcagaaagttgtctctatagtaggattttcatagaccaccagctatttaaataatgacaccaagtctttttaatatattaatgcttaggctttttagctagagcaatgtcccagccagctatctaaacttaacataactaactggcctacaaccctccatgtggccagagttttacttctctgtacctgttcacaatggtccacttccccactatatcccactggcaagtcttctgaacctgccttcttctcccagagaccctctctcttcctgtaagtttggctctctgccagtacagcaatcaacaattgacaatacaaaaacacaccttcatacaatgtactccaatatgtgtcctgtgccagttcattcaaggctattcctcactttttattctatcaggttcagtgtatctggttttgtgtgagaccattgatccacttggacatgagtttatggcagtgataaaaatatagtcaacagatatttatagaacattttacccaaacacaaaagaatataccttcttctcagtgcctcatagaactttctctaaaactgaccacatactcagacacaaagcaagtctcaacagataactgaaataaccccctgtattttatcagaccatcacagactaacacttgataacaataacagaaacaatacaaagcttacaaattcatggaaactgagcaactttctactaaatgaaaaatggttcaagacagaaataaagaaattaatggccttgtagaattcagtgaaaattaatacacagcatccctaggcttatggtattccatggaagaaaagtgtcctgaaaggaaagttcatagcactaagtgcctgcatagaaaaaattgaacagatctcatactagcaacttaatcacacacctgaatgctctagaacaaaaagaaataggcgaggagtagatggcaagaaataatcaactgaggctgaagtcaataaactataaacaaataaaacaatacaaagaattaacaaagagttggttctttgaggaaatcaagataaacaaatctttattgaaactaactaaaagatatgaaaaagatcatccaccatggtcaagtagacttcattccagagatgcagccatggctcaatgtacaaaaatcaccatataaacaagctgaaagaaaaaaaaaaaaaaaacatgatcatctcattatacacagaaaagactacctaccccttcatgataaaagtcctggagagattagggataaaagggacatatctaaacataataaaggcagtctatagcaaaccaatagccaacatcaaattaaatcaagagaaactcaaagcaactccatgaaaatcaggaacaaaacaaggatgtctactttttccatatctattcaatatactcaaagtttttattagagcaataagacaactaactgaaggagatcaaggggatgcagattgggaagaaagaagtcaaggtatcattattcccagatgatatagtatacgtaagtgacactagaaattccaccagggagttcctttcagcaaagtaactggttacaagattaacttaaaaacaaaaaaaggaannnnnnnnnnnnnnnnnnnnnagagagagagagagagagagagagagagagagaaaggaaaaaagaaaggaaaagaaaattagagtcactagaatcacttctatgtataaatgacaaacagactataaggaagaagtcagggaaacacccctttcacaataggcacagatcatataaaatatttttagctaactctaaccaagaaagacttttatatcaaaaacctagagtctctgaagacagaaattgaggaagatgtcagaagatggagacatctcccatgtgcatggatcagtgggattaacataatgaaagtgtcattttaccaaacacaaactacagattcaattcaatctccatcaaaatcccaacacaatcctttacagaccttgaaaggacaatactcaacttatatattgaaaaacaaaaaaccagggcatggcgagatggctcagaggttaagagcaccgactgctcttccaaaggtcccgagttcaaatcccagcaaccacatggtggctaacaaccatccgtaacgaaatctgatgccctcttatgaagtatctaaggaggacagctacagtgtacttacatataataaataaataaatcttaaaaaaaaaagttccttggaaatatttggaagtaacaatgtttcctccaacctttaaaaaaaaaaaaaagaaaaacaaaaaacccaggatagctaaaccaatactgtagaataatataactactagaggtatcaccatccttgacctcaagtagtactacagaactatactagcaaaaaccatgttagtagcacaaaaacaggcacattatcaatagaatcaaattgaaaaccaagatataaaatcactcacctatggacacctgatttttataaagaagccagaaatacacactggaatcaagaaagcatcttcaacaataatataccttctttatctcttgcacacagttcccaaggctggttctctaacttgagtagtacaaagataattccacagcaaatgtggctctataggcttatctggggagtagcattagatttcttcagatgtgcacccaggaatcacacaacagtaccttcaccctgatttctatattactgagctaatttaactcccttcccaatcctctctaacatttttgatgtccttttctggatgatcattgtggctggggtgaagtgaaatttcaatatagtatttatttacatttttctaatagcttagcatcttgaatatgctttcatatatttgctgatatttgtgcttcctttaagaacttctatttgtttcctatttattaactgagtaatggagagcaatggtgtgtgtgtgtgtgtgtgtgtgtattgtgtatcaggtaaagagctggctctccccatcccgtgtctcccattcttcaggctatctcttcactgtcctgattgttttcctttgctattcagaagctcccacacttgatggaatccctcttggcacttactcctcttattccctaagctattaacgtcctatcatagaagtactgctgttaatgttttgaagtgtttttcctgtaatttcctctaatatgttcagagttttcaagttttacgtggaaggtttttcttttagtctattgtggattgattcatatacaatgaatgacagtaggaatctagtcttactcttctgaatatagccatccagcatcatttcgtgagaaggcttgcctttttattcagtgaatatttttagacctgtgttgagagtctagctattttagctttggagattcatatctcggccttgtcctgtggtattgcttcatgtgtctgcttttgtgtggactctttgttatgtggctcatggtgcaactgagcttcagtctctcttgttgccatccatgtctttcttcatggagagagccattgtccctgtggaatagtagcaatttgcagggctgcagaggagggcctgcttttcctgggccctctgaccactgctgcttctcatggcaaacagcagaggttcctggtggtgaatgtgggcagtgacagcgagccttctctgttggggggaaccagtttcttgctgcacttccctctctaggggcatccttgaaactggcacaagcacctgggaagtcctacactccccagaaagcactgtgaggccctaggaccttaggtgcagtgtcagctggccatgtccacgtgttagggaccctatgacaacactaaaatgtaattagccagggggaagaggtgtgggaatggtggtaggaggtgaggattctcttcagttcgattagacagcaggacttcacagttccacatcctctaccttcatgtttttagctcaggtaaccaaagtctgttttctctaatatcttcaggttctttcaaccctgacatttgtgggttagcaatagagtataaaatatttaatcgtaagatttatcttaacaataatagccttagactgtccagcattgagattctgctggctctgtggcatctaacctctttacctactttgatctcaactgtaagataaacctcttttgtaaacaaatggcactgtcgaggctgcatttctcacattgcacatgtactgagaagccctgcatttatttcacttgttaacctatttagttctgttgtttgtgtagttttgacttgattacagcagaacctccatctttcctagtcatttagtgagtgttagtttgttaaaagctgagatctcatgttaagtgatctggcagaattgacataacaattctaaaatatttcagtcagcaaccttaatagtatttttagaggtattatctctagaaactgaattgtacaaaccacaaaggtaaaactaattgctaacttcaggagttagcattaaattttgtttccaatgctatgtgtagtaatttacaaaatacagtttattagtatcataatttaagaagaaatttgttaaatcccagttatgtttcttcagctgacacatagtatattgtcagctttttattggtaaatgtgtttctaaggttgttttcactagttctgcatcacagtactgactactctgaagattttaggtgttctattatttgtgattatatggcgcttcttgagtatttacattttatgaattgtagaaaaattgaaaatgtctctcattgtcaaatacacattgaagttcaggtctttgaagaaaatctcaagaaaaaactttctttaaattttctcttaagtacttttttaaagctattttttttctatctacaatgcatataaacttaaatgtattaacattctttagagtatttaacaaatgaatttaaacttaaccatttttatccaagtcaaatacacaattgatttttaattcaagtgctttaaattagtaatgatatgtggatttctggtgagcatgtagaggttcacagatacaatgatgtggaatgtctgttaccactcagcaaacacacttgagtgagaatctctagtctgcgatgtttgtggtccagcgcagcgtgtttcctctcctcaggctgggtcagacacagcccacagtgtcatgcgcatggctgagctgttagttattggatatctgttgctgggatggtgtgtgagattgattcatacatcccatgcagagcatatgtgcactattgatgtgacataggaagtccacagctctttcatgtctgtgtttgctgacccaagagcaacgtgaactgtaccttcagctcattacatttgggatattttcactgaactgtgagaggtatagtacagttcagttatcatctattatatctagtaacatgaatcatttgaagctcaggttccaatttgaatgtctagagaagaaaaactgctagaagaaaagaatgaagacaaggaaaaattggagtttgcatttgttttgagaaacttgaacactaaagacaaccttgctattgttccctaaacatctgtggctctctgatttccctctgtgttcttgttcctctgtgctgctgtaaggaaatgcctccagtcaggtagtttataaagaataaggttgggattgaggatcagggtgtagtcatttcagtgtgctgtgtacctgcatccttcagagaggacaaagcctgtatccttgtaccactgaaggaagtgggagaaaagactaacttactcaaggtactttataaggcaggcactcattaatttacctttccaaatgatgtttatgtgagttaatattatttgtaattactgacactattaagtgaagtcaacaagcataatgaatgtgtgactaatatcatctctgggtgtacaaaaaaaggtgtgattgatgccagtaaatataattgtgttaccctattaacaaagcatttatttcagaaaaatgtttcagtgttaattcctatacaagtgaaatacttctgttaatacttcaaacagatcagttgtaaagacaacttataaactataaattaactttgaaagattttttccccttattacctcctggttttctagacaatggaacccagcagtcaacccctttgtttccacctgaagagactcatttacccattcccgggccccagccctctccctgtgagactcctttggagaaaaaagagtttttctttgcaggcagatgtaaattggagggagtttcttggataagggtccatgtccattttcccttcttagcactgggacacacacagtctctgtgagttcatgtgcatcagtcctgttgtgtctgaaagacactgtttccttggaatcacccatcccctctggttccaacaattttccatctcctcttgcacatagctccctgagccctgaggggagaggtttgattacaacatcccgtttaggactgagtgttccagaactgcttactctttgcacattgttcagttgtgagtgtctgtattcccatctactgcaaagggaagcttttctgatgatggctaagcaaggcactgatctatggatatgacagaatgtcatcttattgctttgtttctttaacaggacaatactgtttgaattttccctgtgcccatagtccatccagtgtcagattcttggctacctgaacagagtcagccatggatttcatctcatggagtgggttttaaatccaatcaatgagtggatggttcctcccacatttgtgccactgttatatcagcatatcacacaggcagtcatcattgtagattaaagggtttttttttttggtttggtttggtgtttttttgtttgtttgtttgtttggtttttgtagctgggttggtatttaccctttcctttggtagtgtgcaaagtaccttctaatgccgtgaacactggtctgtaggagtgaagtgaaggctctaatagataccagcttgacttctccatgttcaatgagatatagaagtgataccaccagcaatagggttttactatcagtttgtggagaacaaccataactttggtaatagcctgagatgtttagaagtttccacaggggtccccttgtctcagggaaatacagtttcagcactagtcatgagatgaccatgcgtggctctttagcctcattgcttaaaataagctattcttgtaattagcacccagctgtgcagttattaccagtccaagtgcattctttcccagaggtcctcctcgcacatcatgctctctccactggacctcccaccaccctgccatccccagctgaggcctctagatagatacagaatgccctttcagcttgaacctggctcaggacttctctcctggtgttcccctgcctctttaccctacctggactttttttatcctgtgctgtattcaccctacctagaacctgattcacagtatgcattctctgacagactctttaagcaattagtgggttggtttatgagaaacactctgacaaattcctccagcaaggtacagggcgataataaacagcaattaaaataccagtttacactttagtttttagatgaatagatactttaaacagaatatgagattgaatcaactactcttattcagtgaatgtcaaagaagggaatgttgttgattaaatgacataggtgttgcaaaaatagcatccgtgtagaaggatctgagcatttgtaatgcacatagcactaaggatctcttaagtgccacctgtccagaccccttctcataactctttgagcctatacagatcatatgttctatgcttaggcacttttcaaaacttatttcttctctggatttagaacgtgtgctggatcggtctcctgaactccaactatgagcagctcagctcgctattactactgctttagatgaaaacacgccagctgggtggatctcatctctgaagcaatgccttgtccttcatcctttcctgccctgaactctgaaggaaaaattttcataagccctagggctattcttgatttcacttgagaagctttgtaaggacattttaatggtcctatattttatctgctcacacacacacacacacacacacacacacacacacacacacacacgagagagagagagagagagagagagagagagagagagagagattaattaatttcagttttctgaaggagaataagcctggttgttcatctttctaagtcacaggttcattatgtaagctcactttgtttttcagaccttgtctcctttttacaaacagtttaatatattatagtcaatgccataaaaccacttgtacagtgctttagacatttggttataatttctttgtttgccaagcatttttcaataaagcttaattttggccttactcatcttcaatgtgaaattgattaaccttgaagtggactgtggcttgcatatttcttttgcatgtcttatctgctgaagtatttattacattttaagttgatagctgtaagctatgccacttggcatcagggtaactaatgtcccattgtgcaaacctgactcatttttaaacttttattatagaaaatttcagacacttatcagagtagaacagaataacaaattttgattgacctgttggccaactccagcagttatcagttctggccctgtgtattttgtctgcacttgggcttctagaatctgttattttgaagtaaatctcagatattaggtcatgtcatctgtatgtaaatcacataaagactaatttttcctaaagaagcataaccaatcataatgctattataagacttggaagaaaattaataattccttaatttcaccaaatattttgtcagtgttcaaattccagatgcttatagctcagaaggtttactcagggctcccaggttcctgtattgctttggttgatgtgcccccatttcttgtttgtcggtggttggttagttggttagtttgatgtaactctagcgtctccctttccagcttacttgttggatcaattaagttcttcattgtgtggattttctgaagtcctgggttttaggattgtttccccctgcttttatctgtnnnnnnnnnnnnnnnnnnnnnnnnnnnnnnagagagagagagaaagagagagagagagaaagaaaaggtgttagcttaaattctgtgtccgtgtaagtgttcagggttattactattcttcctgcttgtgatgttaggattgaaaattgaattcaagtgttatttggaccatccttttaaaggttcattgtgaagtttcatctaatgatttatagccactgatttgtgccataatctatcattttctttctattttagtcttttgcatatgaatggaaagtgtatgtaccctgatacacatgtggaagtcagcagacttttcagaacgaggctcccttcttccaacggggtttcaaaggcagagtcttgtttctgccacactgtgtactccaggctgtccagcccaatagcttccagaagtttctcgaatcttcaccttccatctcactacaagtgctaggcttacagatgagtgacaccacatccgactcttctccttggcttctgtggcttgagtgcagaccatcaccaagcccttttacccagtgagctgcctcactcactgctcttttggttctctggttttttttaagctcattattaatacttaagaagatataacaactagaaaaatattctctctccctccttttccctcccttccttctactggacgtctacttggaaagcttgccccatacatagaaggttttccaacacacagctacaaccccaccccactgttacagtgtgaacagacatgtgaaggttaaaacagccagctgggccaggaacactgaggaaggtaaactaggaggccttgtggcggggggtataagatagctaagctgactagttaaaaaggacaggttagtgctggctggctctcacaaagcttcccccaaccctaccctaactctcaccctgccagcaatataagcaaagtgctgtttcccttcatgtgttcctgcttctaatgcatttaataatacagtttacagtagagtaaactgcaagtaagaatggcttagaacatttatctcccacctagtcaaggaagaccaccccttggacaaggagttaaacacaagacaaccaagaacaactacagctacatcttgtaactatgataagagttaactacccattggcaattaaggaaaaagatctgggataaactacaagctgattatgtaaatgtgagaacgaagggaacagtctaacaaaccagcaaaccagacatcctctaagactagcaacacctactgggttgagcgctgcagtaccagccaggacgagtgactagcaggcaatcaaggacagcagctagtcaagcaagtcagagacccacagtggggctgaggttgggagggattccccctgactgagtgagaagctcagaacgtggttgggccagagaaatagacatgcagggctccccttattggttaggcttacagtcagcccagagaaactaaccagtctcagtagaagctacctcagtctttgtctggtttttctcccaagtcctatgagaagcacctagaaaaactacccaatggaattttccctttcgtgggtccccttccatgtgctaatctaccctttttgaagaccctctcccctagagtttctcttactttctagacctttgctttctgctttaagctttctcttcatattctcttctggttgctgtagacttcagtcttgtagtcagtgagacaaggcctggaagaaggaccatggacttggttgaagtagtgggtaacagggagtgtcaccctaactcctgagttgtagccacctgagacaagaacatctttctttccctccatcccacccagataagccatttcttattaagggatacaaagtactttcctcactagctgtttggttccttcataggaaagggcagggcagtgtgtcctttgtttagtcatttccaaacacgttggcttcctagcatttttcaagggtcatcaaaaagatagtcttaactcttaagttttatgaactctttttgaacatacctgatgaatttcatttaattatagtagttgttcttactgtttgctgatgctagccctgaacatgtttactaatcgacccctggaatggacttctgatcttgaaggctgtcattgctgagatcttgtgttgtgatgtagtattgcataccacattcactggtcccagaggaaccagccagtggaaggcaggagggatgtgaaataaggaattcttcctctcagttctcttcctctccctacgcaggctctgtccacttcattattgccaggctttctggtctctctctgaatctcatccagaaatctgttgggacctagtgcctcttatgtctcaggtgtaccgtggttctgttttgcagcaaatccatgctgagcatttccagaatactacttttcctgtctgaccagtgatggaggctgtgcccctgctctctgcagcagtcccttccaggtagtgaggcactggaaaaagtgtacatgtacattctgtagtcagttgtgtgtagtgaacctgtggaacttaagcttctgaagtactgtggaaagcattagggatttcccccctcactttacctcattttgtttgtctggctacaaatctaagaggctctttccagacttaatttccacgctgtttagccttttgcacagtcgtaaacagtgtgataaggaaaagcttttctccatggggttgagtgacttatcagtacttctttagtacttgcttgtgacctgggtgaatgcatgccgcgcttactgtttctcttcggtggttctgtctttaagtgttcatagggcacttgagaacctgccctgtgatgctttctgactcagtctgccgagagccaccactgtctggtgaaacatacccattgctctaatggccatctgcacaggggcacaagcttgaaaacactgaagcttcacagcaaatggtaaaatttggattgttggnnnnnnnnnnnnnnnnnnnncaaatggtaaaatttggattgttggtttcatatgtttagtctaggagctgacatgctgtcaccctgacacctcttcaaaacaaaagccttgcttaccagtcagagccccagtctagtaaatcacacggctttgctggtcttcgctgggtggaacccactaggctcatggtaccctctccacgggggttgaacgtgaggctgcatgacacttgaagattgccatgggctttgggtgggtgggtcctctgcactgtgacataagcacatccacgttgctaagttttgaactgggaacaggatcagtgctgtgatttataacacatcacagcagaaagccaaagtccagatgagttccaaatgttaaatttggaccacttacagggtttaagtcaccatcaaaggtgccttgataatgtagcccgtttcctagaatctaagagatcagagtcacagtagtgaggcttgggacagggcaaacaagtggtctgaaaagaaacccagaggttgttttgtgctaagcttgggtactcaaggcctttcgtgtgtgtgtgtgtgtgtgtgtgtgtgtgtgtgtgtgtgtgtacttgtatacatacttgtgtggggaagggacatttttaatggaaaaccgtatgagtgaaaattattgttgccagctctgccctccccaggaccagggtatgtcttcacagctaacacactactgagttttgagtagctacagtcagctttaaagctgctgctggcctttagaccgtattgtgtaacatggcaattttgcgaccacagtgctatgcacaaataaggagtggtggtgagttacactggttagtgtggatctgtttacctgtgcatgcaggtgtactgagggtgcacacagtgtggcagcctgaggtccctctcagatatcttttcttaatttctttcagcctttatctttctgccccagggcctttcacggaacctgaaacccaggtttttactaggctagccagccagtgagcttcagggagccacctgtttctgctcccctaatactgggactacagggttgtgccatcaccttcagcttctttacacaggtcccttacttgtgcagtaggtcatttactgaacatgaaagatgacaaaccaacagagatggacactgaagagacaagaaatgtgaagatacagctttgcttcattcgcttctaccacccacatgtcttagcccgcctctgtaggttttggttgcttttaaatttctttttcttgtgttccagacgtgtcaggttaaatagattatagttcatagctactcattttgagcaattcaaataattctgagcactgagttgaaaaaattatatttcaaatattctcttttctatataaccattataaatttgtttttggtttgatcaaaagcaacatcatgcaaaggctttttgtatggctagaactaaaagacagttttgtttggttttatttaaattcttttgagaatttcctacatgtgtattatattcacatcatttctacccctccctctgtccctccaactcctcctgtgcccctatcaacctctgtcaagtttatgacctcttcttcctcagttattatttaatatgtatcccattgggtgtgtttagggctgactgcttggggttgagtaacttaccaggaggctcctccacagagaagcctgactccctctcccagcagctgtgaatctcctgaagctcttcacctggggtcttgtgagattcccatccatgtgggcgtgtcagctggtattgccactgtgaacgtgtgctgcggcaaccacattgttgagacttcatggtaggtcttccttgtcatgtctagatgacaccatctagctacaggcatcttagtcctctgtctctgcctttggaaaggtttttccaaccccattgccatgatgtgtcctgaaccttaggtgtagaggtgcattatagatgtatcagttgcggctgggtctcactctttgcattttgattagtgtggatctaaaaagtgtgtgtgtgtgtgtgtgtgtgtgtgtgtgtgtgtgtgtgtgtgtgtgtctgtctgtctgtctctctgtatgtctgtatgtgtgcgtgcatgtgcatgcacagtgaccacagactacttacaactgtgggtacttagaaaacggttggaagttgtattggtttaagcaaatggtgtgttcactcctaaagtctgtgtcccctccatccactggtagctggctaggtgtgcagtaccaggcatggtttccctcctattgagtgtgcctcctgtgtaattagacagctgcctagaagactaaagcacttctactgtgaaagtaggcatatcctgctgtgctggtcatggtagtttggaggctttcccacggggttggactccagattactcttctcccttggccgtttgcacaagagcatctgatacaatgagaggtcgtcttcagggaggagactttcaggtgatcgaagtgtgggtgtccggccaataaataggattttaccttcacattttggaacaaccaagggtcacaacaatagcctctatggtttgaggagtctcttcaattcccctgaccaacaactcttgaaggaggattcccatggctgtcactgggggttttggtagatcgcctatggctcttgtggggatcattatcaccccaagtggcataaattcagatagacagacagatagatagatgtgtgtttactcatacacattatatatttatttctaaatagaacagtatgattctctattgcattttcaaacatccttgatactgtttatctgtcttctctctccctgtattgcctccctcccatctccccagttaaagtcccccatttttcccattttcttctttatagtaacagttatcctctctagaactctccctccccatggtctcttgataattataattcagaatagagcttccattgcttattttcttattggttcctttcacatcattttcaaaacactttcaaggatttttttttaacccttcctgtcacttctgtagctctctgccctttctacaatccatcttgtatctgggaccctgtgggtctcacaggattctgaagctgcatatccgtgtatggcatgtgcttggatgaagagacccatagacttagtcctcttagtgaaagtgagcagctaataggggtttttaagagtgctaaagctcagagcgaccctactcaggttagaattgttcttgcagtgtgtgccgtccagcagcactgataaaggtgcttggtgtatttagtgaagtaatgctcgtagtgctctgctctctcccgaagaagcagcaaaagccacccacctgcacagcagcacagcacagtagctggccactgtgattgacatttatcccaaacactagggtgctggcttctgtacctttgaaaataagatcttgagcatttcctaggaatccataaaggagaaagttaaaggtcttgggtggacagaaagaccttggacacccctcctttcataggtgaaatgtgcttgacaaacctggaatttccctttcttggcttcccaaaaaataccattatcagcaagctgattaattagtgtggcagtcaaccaggaagatggcatagcctgacagcctgaagttcagtgtcccaggcccaggtggcacagggagaaagccatttctacaagttgtccctttgatctctacattctcatgaccgcacacgtacacagcaaagtaaataaatgcacaaaatacagtttgcctgaatactacattgtataagcaggagggggtgggggaggaaggaagataaagacacctgagataaaaccctcagcaattagccatgtttttaagtatttggaagaaaatgaagcattttgtgtctatcagagcaagttaaagaatgttagtaaaacctgtattgtacacggtactcaggatgcctttttttttttttatcaattgacttcaattttctgataataccaaacactaatagtcagaatgtttgactgacaaccacagtaaattcccaaatatgatatacttgaaaacccattcttgccttttgaaattgctgtcacttttggttacaaatgctgtgacagcctgtgattatagtgacaaggacttttaggaattttctgtagaatgcatagcacgttagcaagtttgtgtgttaaagagctataatagtaggttttataaaattacagaaactgtcttcatggacttaaaatatgatggagatgaaaaatataatatcttgtactctgtcctggatagtgtaaagaaaagaaaagtgatttgcattcttgggcttttatttctctactttgttgtttgctgctatggcttgtgtttttatatttgctgagaaatgggtctaccaaaaaagaaagtctggcaattcctgttttgtttttattagaggtagtgctgcttgtatatgtgagagcccacatgggacagcactgaaagtagactgttgaacaagggtatgctttgggtgggactggagccccgatgtccagctgctcactagataactggctacacatactacagaatagtgtgtgcagtgactgagcactgtagcccagcatgcatgtgcacagtgaccacattctacaggttagtgtgtgtgtgtatgtgtgcagtgaccatacacgatagcccagcatgcatgtgagcagtgaccacatgctagaggtcaacgtgtctgtatgcccttatagttaggcaagggctgctacagtctactggaaaccctacttcccatccttatcctgccagtgcatgtggaactacatgtttgtatgcatgtgaacatgtgaaacatcaaatggtatacaaagggattatatagttcattatgtagtagttatactttattttaagactagaaaaactcctttgaaagatcttgacagtgatagatttttagtgagaagtaaagatacctctttcaaatacacctgcatttatttcttagtatgacagtttctcagttatgaaagtcagtaaatctaaggcagcaaaataaagtggacttagtcctagaccttcagcttatttaaatattaactccagcacacttctcatactctgcaagtatgaaaccatctattgtgttgctgttgactgaattcctgttcactcctgggagagggttctgctgttttttcctatatctttgaccgtggaaatgtatgttacagtggagctttctgaatctagaccacagccaccacaatattcagacccagttagcactgcaaatataccatttgacacgttttataaaataggcgtttctgcatttagatcatgttataactttaggtgtaaatatacttgtattgagagggttaaaatttgtatacctttgatttgaacaatcctatagacttttaggttgtacctcctgacagcaaatatgatgttttaatcaccgtggggagccatgaacaagtccttcctttggcagagctatcagggagagtgaaggcattgcatttctttggcattaaaaacctgcattgagctattgcagatcactcaggatatatctagcagagaggatatatctagcagagaggatatatctagcagagaggatatatctagcagagaggatatatctagcagagaggatatatctagcagagaggatatatctagcagagcaccgggaaaacaagcttcttgtgaggacaaagagcagctcaggggctggagtgaaatagccacttgaatccacatgtgtgaaggaagattgcatcgtaaagagtcagaaacagaatcccgtgtatgaaatgaggagctgagccctcctctatcctcttgctccccttggattgtgtgtcttgtcctcagaaccatctccgaaagctgttatcgaagctctacaaatagaggctcaggcaggtagacagcccctggggagccagaggctcactcagatccaccaccctgccctttctacgtaacctctgtcttctgccattggatccaccagtgcagaagcagcactttgtgtctttaatactctcagcagattagtggcttgtgcaaaaacataggactctagagacagacacttgtacctggattcttactgtggaaatggggcttgactaattcacaactgttgacttctagttttcacatgaccaaactttttaatatctagattgatcctttgatttaatgactaaagttacaacagtgggccactccttcatatgaaagattagtctatggagctggatgttgaggatgaggctcacacccagttctttctctgccccacagttggttccagtgctggggcacctcactacagctcactgctctcataagcccgagagcagctctgcaccttctgcacacgggtgccaggccatgggcgggctcctcacatgggtgggctcctcacatgggcgggctcctcacatgggcatgctcctcacatgggcgggctcctcacatgggcatgctcctcacatgggcgggctcctcacatgggcatgctcctcacatgggcatgctcctcacatgggcatgctcctcacatgggcatgctcctcacatgggcatgctcctcacatgggcatgctcctcacagctgacgtgttttccagagtccacagctcagtagcctgctacccagcagtgcttccagcccaagcgtcaggtttcaatcttacaatcttactgaaataatcttttctttaaactggcctccttgagattttgaaaattgaacagttcctatttatgcaatattatgttcagagtggtagtttacagtgtgaataaaaactctcatttgcatggagagagtgaatcttttttgttgttactttcacttttccagttaagactgctttctaatgaaaggcttgatgaggggatgagagaggggtgtgtgtgagtgtgtgtgtgtgttggtgtgttaatgttgtgtgtgtgtgtagttagttgagacagagtagttttaatgtgtcagttcgtgttaattctgtctcctttgaaggctgaagttcaggatgtcagggttatgaggaactggctgactcgtgcgctaatgctgcagactgttctgtgacatgcgctgttgatgtgatccatggttcctgtaacacatcacgtaaactgctgaggagaggctggggacttgcgtcccccttgcctatttctaagtcttgaaagctgtttttctaaacagcttttaataataaggcagtttattgatactaagttccactgaattttatttatatgtatataaaagtaaaccatgaactcattagtattttcattgctggtaatactttgttttctaaagagtagagttttcctatgaaatccaccatagtgatcagtaggaccacattttgatacaggaaaagtcctggtatagaaaacagcactatagaggcagaagttattattcacacactcacagtagggccaccttgcccctgaggatacaagtcagtatgggaatgtacaccaaaacagggagacctgtacttccaacagaaatttgctttctccattacaacaaaagctaattgtattatgtgatatttaggctcctttgtctgttatgccaatactgataaagtttctgactatctttaaaaaaaaaaaaaaaacaggcagtatgtgtctttagagtatagttgaatagatagtttacttaaaaagaaaaaaaaaaaaaaaacagcccaggcttctttcatgtaatgtttcagtttgacaattttaaaaagtacattgtgggatatttatagtatttttcgatctatttttgtcagtagactaggagtgctaactgatttagggcacaggggttaaaaacaggaaatgtggtgtacgaagtaggttgtctccagactttccaatttcttgaagtattacctaccggggagtgccgggtttcaaaacaacactagcagagaactttgagtttgtccatagagaagcaatgtctgttgtgccaggaagtggttcacgggaaggaaggtctgcattcttggtatggcttcacatggtacggcatgctttctgtaactccttttgagactccagacaggcagaggagtgaaaggcttggcttcgtccacctttacattttgcttaaaatgctacttgatttttttttcaatgaaaagttttgtcaaattgctgtttaaaagttttcaatgaactgttgagttgggacatgttgtagcaccaggcaacccatggttaaaatgcatggagaagcaagacctctgtttcctgtggccttttgaatgacagcttggcagaatctaccaagactgaaaaccctccaacgcagcagttccacctctaggttatcctattaaaatacatgagctaggtgatacatccctgtagtcccagcactcgggatgcgaggagggggattattgcaaattctggaccagcaggtctacaaagtacatctacatgtgtactatatgagctcaaacctatgacatttctggaaaagacagaatggtaggggtttgcggggagagaaagcaagcagcttcaaggttaatggagaaggagacatccatgagagaggcagcagtgacgtttcaggcacaaagactgtcacatcactgtagtggtgagcatattccactaagccgacagaatgtgcatctccagcagtggccctgttgtgggccctggcctctgttgctagggccatcagtgtatcagctgtaccctctagtgacgcgggtgtgtgtgagcggggcaggcagtgggaaagctgtacttgcctgggaggaatctgtcctgagtaggagcaggattgcatgggaggctgtgtatttcacttgacattactaaaggcccggcttgccctgaaaagcaggttgatttggtttgtttgttttgtttacatttgtttcttaaagaatgtgatataattaagttttaagaagataattgtaatctcttttttaaaacaaacaaacaaacaaacatattcctaggcaaaagtctgaaagaacataccagattgtcaggtgtcattctcaggggaaagtggtcaagacaacattcattgaatgtttagttgttattaaatgagcccatacttccatgtttatttctttccagcagacatttaattttgaaaattttaaaatattttaaaaagtaaggagaaaggcctgttcattaagacctgctcgttttttagcatattctttcctgtgggtgtgtcctcaggagctgttcatattagtaataaagagaatcaaatctggctgtgtaacacctggagcgtccccagacattgaggagagctcaaagctcaaatgaattaccttgtctccagccagccttaaacactttttgttaaagttcactggggggaggaagcattctaatgaaatgggcacacagaaacaccagtgtccattcaacaagggatggggtcattgtcaccgtggcgccattctcaggcacagcagccttgcctttgccaacccaggctttactgtttgcctggttaattttctatcatacagctattttcttgtttaagaataatttactttgccactttttcttatatgtaaggacagccgggccatttattatattaagcctgggtgttgcttatcggctgtaagctctgtgagaaaggtctctgttttcctcaggacctggaacggtgcttgatacagaacactaacatcagggtctcactgtgtatgtttattaatagtgtgcttatccctacaactttgtgactttcctgctcaaaaaagaagaagctgacaaaacgaccaagaaacttctgttttaacgttgtgtatacaaacactgttttccttgtgggagacttaggtcctacagcctcactaaccggaagcccaccatgctagcagcagcctacagggcctcgatcagaggagaggcgaactctgttctccttggggaatttccacactaggcttctagattaattgctcagtgatcgtctgggttcatactgtgtgggtggggacactttgttggtcacatatcatgacacattctaatttcatattcagagcagagaaggtcgatagtattctgaatgctcagaaactgcctctcattccctcacttaagtaacatggaaagttgtgggggtttatctaagtagggctcttcaaaacaacactcatgactacatcataagaacctgacacttccctgcaacttcaagcagcaagtcagttttcctcttaattactctccctccacccccaccccccacactgactaccctttcctaatcaggtctacactctacatggttactgccattggagtacaaactaaacccaggttctctaacacacaggctatcccaatgtgttcttacctacctgagaattgccatagtatctagcacattgtgggcactgagcaaaccagtgctgactgtctggggcaagctgtcccaagaagagcaaagctgtgtggaaatgcattggtcgagcctcagcagcactatcctgtcctactttctttaactgtattgttaaatagatcctgctgcttaatatcaggaagactgcccttcctgtcctgtgtcctaagaaaagtaagaggtgccctgccagagggcacatcctcataacaggcttgcttgtttctagtaaacagcctgctgaagggtgagactatttgactgtggatcttataagatgtacacgtggttcagttttcctttaattacttatccattcaccattctcttagcagttcatgtggatggtccagctctaaaaaatctagtggtcaaaccagacattgcagtctctcgaagtcatgctaatatgtgataaaaactgccattgtttttacccaaagcaaaatataactgacaaattccactagagcaccaccttcacacttagtgtaaacctgtacagcaggagttctgtcagaggcaaagcccctgtaagacctcagcatagccacattggatgtcatggcaagcttcctgttgccaccatgcattccaaacaacttttcagcagttaatcaatccctgagttgcttgctcaaaagaacctcatctgtagctggatagcagtcacagtgaattagtttgcctgtgtatacctggagtttcagaaaacacagctatagttagtgcattttatacccagtgtgcctgttagccagctgtttgtttttatctaaagctgtttcctctgcatgtgtgtccttcttgagacttaacacttcttccagcaaagcctcgtttctcttgggactacagactgtgcctgttctgtgcacttctcacagcacgtcggtgttcacacagggcaggcaggtgggcactgtcgaagaatgagagaataaacagcgcatctataatggcattgttagcaaagaactcactacaatcactgcctttcagggatggcagtgacttgagaggcaaactgaggtgtctgaggtcatgcagctggtgattggcaagccagaatttgtaccatagttgtgtcctttgtcacctcagtgaacataaaaaaaacaattagcgactgtcaatgttaataatattaaaatagaataaaatgtggcaagagaaaccaacatttgccaccagagtagactacagtatggctcctcccttatagtcatctaccctgtagaagtagcctcctcaccagaaatcaaattctggtcctgcccccaggcaccaaagccagggactttgaaatccatcctacagtacttcctaccatctacctctagagcccaaccctttgttgtaggcatctatctgcacagcttccccgggatcagcttctgctgcctgcctttcctttccgttctcacttctcattgatggaagagatggcaggctcagccattgtccctgaggccacacatgaggcccactctcctattcctaaactccatctgcccacagtcttaggaattaggtctccattcttctaccacagtttccacagtgccaatgccagtgtcccagatgcttggtccagtctgtgaaagggcacagagctgcacagagttctgcgtgtcttccattagctgtcaatcactgctaggttccttgtgatgctgaacacgggaaactgtttcagacctttttttagggaagagtgacagaaaaagtatgtttgtgttgatgctttcaatactcttcattggctgttggttgaatctgtgggcatggagtccctgcatgtgaaagcccaaccatgtatttcctttccctagtcagcaaaaagcacatttgccagctgcttgcccccacatgaaggatgaggcagagcggccatttccaaacataactgatacccaggctagcactttgccttaacttgttctgcctttgcttcagtactagagtttaaccaactgagagcttcaacagatgaagagagccagtaacacacttacagattattttacactggttttctttgcctcataaaaccctttcatataactgtcctgtatgaatttcttatatgtggctataaacacaaaccaactgcagtaaattgtaatcaaacttttagtaactgtggtcttctttctgggatcatcagcgtgttccacttaaaagggcccgatgtatgtaggtatgtacctagtagtttacctcataagagaattttaggaaatctgtattagcaaatgaatgaacatttgtagccacttcctttgatgaaatatgctagttcactcggcagtaaactcaacaggaggaagaccccaagagcaggcacaagagccctgtgtagccctggaactctagccctagtccctgtgcctgggctctaggattgctggcgtgctccgccctgagcatcttggttgtggagttggtttccactgtatgtatgcagtgctctgcaagagcaacactttgctttagcaagatccagctcaggctgtttgctctgtgcaggtcagcattagcctgtcgtttctgcctccaccgcctgacacactgcttaggcagaagagctgttctgtccatctctcccccagcatgccccatagcccctgaagcactggtttgttgttctgtgaacacttatttgtgggttttttctattcataaaggtaaaactccaagaactataaaactctctatcccaaggttaaggctgcttctgctattcatgcaaatcctgcagtaagctaacaggggaaacctgtagtttttcagagtgtctctcgaaatgttcttttggactaagtatttcttactggcgttcttacttactatttgctatcacagctgtgtctttagaattgtgctgactaacccagggctgtctctgctatggggtactttgttggtgatgcttggtgtaatgttcttgccagatgtcacagggtgagttgcattcatagtatgtggtcactgggcatgtgcctgcctaccttgagagaaagtttaatttttggcttagtagtcagtactggagctcccctgtgcatgcgcagtcatcgttgctgacagctgcactgcagtggcactgacagagcctggcttcacatggcggaggctaaggtttaaccctggctccttagagcatcgctgctctcatgctgggcttgggtttagtaattgtgcatgttaggagtatagagatgagcatgcacgagctgctgtccctcagtacgcagtcatgtgccccactctaacaccctagtcatgcccctcagtacgcagtcatgtgccctgcactaacaccctagtgatgctcaaggcccagccctacattcccagctgctgcaggggacatcagtaccatggcttttctttaactggagagctgctgtgttctgcaggtttgtacatttcacttttttaggtcccttttcagccctgcttcctaccctcggagttacacctgtagtcctagcacttcctgccctcagagttacacctgtaatcctagcactcagaaagaggaatcagagggatcatgaatccagagacatccttggctgcatagtgagttcaggatcagcttggactgcgaaagattctgcttcaaaacaaccgggcaggggaaaagattgtagttaatggtctctgcctatccaagctatgagtaacattctaacattctttagcctttgtagttaattctagaagatagtctataacattccactccaaaggaaagcagtcattttggagttataggaaaactatactgtgcttttgcgcttttgttataccacattggtgatgacttcgtaaagagcatggagaactgtaggacatgcacacgtgatcaccgttagtcctcactgcagtcagaggtgcaaaatctacactcactcgacaagtggaaagaaaggccttctccccagaggtcacagctaggaggtagttggttcagaaagctatgataacactctgcacccataagggtgctgctgttaactcaagctgtgctcattaattctggacccacagtctgatatcttttttatgtccagtctttaacttgttttatagaatcaggtacatggatgggcacatatggagtacacacctgtgtatcctgctctatcactgtttaccttacctgccttgaggcagagtctgtcactgaacctgaagttaggctgacatccaggaatgatcctcctgttcccccttctagccccaacccgccgtctcccacagaactggggttaaaggcacaaacagccatgactagcccggcactttgcgtaggtgtttgttttcattcatggtctttatgccttgcatagcaagcactctaacccactgggtgttctccaagaccttaaggttttctactttgaaagtcagtcatgggctggagatgcggctcagcagtttagggcacttactgctcttgcagtggaccttgttttggtccccagcatccatgccacttggcttacaactacctgtaactccagttccggtggatctgatgtcctctagcctcagcaggctcctgcacatgcatgctacacgtaaacacacacatgcacatgtgtgtgcacacatacacagagaaattaattaaagtgatgccttagaatcaaaatgtcattctgtataatgctatgatgtctaacatgagtcttacaggtttcagcactctcctttggtcctctgtgctttatctgatacacatgtgaaacataaggatgttttaaagtcttgattttgagaccaactgatagtaaattcagaacaaacagtgataggaatgaaaaggggtgaaagaccagttctcgttggagctgttttggtttttacctctctagaaatagtcctttcaccattttgatctctaaaggaaatggacagtaatggtgttattttcagtttcacctcagaccactttggaagtcacattctgatgctgctggggatttcattgagtgtctttccctttcctcatcttgatttcaggtgtcagaaactatttaaaagaagcattggtgaatataattgctgtgcatgcagaggtaagctgtcattaactgttcctacgaaagtagataattgagggggaagaaggaaagaagcaaattggattattattcacaggagggggatctcttttaccccttcggaatatatcttgggcatataagtaaagtagagcacagcttttgtgtgtttgtgtgtctctatttgtgtatgcatatgtctgcatgtgtgtctttttgcatgtgtctatatgcatgtatgtgtatgcctatgtgtgttggtgtgcaggtgtgtctctgtgcaattgcttgttgtgtctgtgtgtatgcatctgtgtgtttgtgtacatgggtatgagtgtgtgtgtgtgtgtgtcgctttggtatgtgtgatgttactgcccatggttcccacacctgtcccacacagttgtcatctgaggtttcattcttcctggacatcctaggagtgggagtcattctgaggcacactggaaaacaagctgccacctagtgtgccacagcgacctgcattgtcatacaatgatgttacagtccagtacacacattgccagcactctcaaggtggctcatagaagaatgggagccataaagtaaagcaaggccaacagggttaccactgctgctcaggtgctcctccgctgagctctagcttcatgtctaaggtttggaaaccatcatggtgtttggaaaaatacagataaggacagcaaaagcagaagggcggacagcagagaaagcagaggtcatgtctcctccttacatttgcacatgttagcagaggagtttgtgagctcctctctagaaagattttatgtgatttaactctggcaggtggtctcatagatccctgattttatttaaaaatatgagctaactcttgtgtcagtttcttttgagatgaaagcataagtgaattcattggtgggtaggagcatcctgtctgcagagagcagaggaactgcagagatcaaggtgtaagggtcaggctgggcgtgtccagaagatcggctgacagccattatcaacagctgtgatatcattgaagtagcagcctctcaggtccccttttattttagcccagtaacccaaagtagatctcaccaggactaccgtttgtgataaaatcttaaattgccaaaatatttgttgaatactcagattgtttgggacaattgttgacgcaaatgtttaattgacactagcacctcaaagtgggaacaggcaaagctaaaaagaaaacattctttaatttgtgaattagcaggataaaatactctactaaacctctagatacaactttgtcatatgttaaaatttgaaatgggtctaccacggtggctcagcagatagaggacctgctgccaagcttgataaactgagtttgattctcaaagcccatgcagtgggagagagaaccaattcccaaaagatgtcccttgacctccacatacatgcccaggtacactcacacacacacacacagaacgagagcaagatcgagagagagagagagagagagagagagagagagagagagagagagagagatattaatatacaatttaaataaataaaatttaacaatactgttgtttgtcaaaaaaaagaaatgtctttatagcacacagtaaaactggaatgctaatccagtacagaatagtgaaactcttaagtatttatatgagtttctcactgttttacccaagctggactcaaactcctgggctgacgcacttctctgctcatcggtttgagtagtcaagatagcaggtgcacaccactacaccagtaccctcctccatttaatctttctttaactgtggcacatatatacccagagggttcacacacacacacttttagaaattttgtttcatataaagaagatgtcttaaaaagacaaaaatttctttcttttttttttttttcttataaaggacaacatttaattggggctggcttacaggtcctgaggttcagtccattatcatcaaggtgggagcatggcagcatccatatctatttggggctgtaggagccaaaagatctatatcttgttccaaaggcaaacaggaggatactgctgtcttccaggcagttaagaggttctcaaagctcaccccccacagtgacacacttccacacctcctaatggtgacactgtatgggccaagcatattcaaaccaccacaattatattttatattccaacattttaattttgtttttttgagacttggtctctctatgcaaccctatcctgaatattgttacatagaccaagctagccttgaactcacagagatacactgttctgcctcctgagtgatgggattaaaggtgtgtgtcacaacagacagtttttaatttttaatgttccatctctattctgatattctttttgttttctcattaggaccatagttacttttaactctccaaatacatttgcagctgttctgaggtcttcaaagtgcaccttgtaggtgctagggattggttgctcctgactcctgtggttctttactatcctattgctaaggcctactgcagacttggtctgcatgtgcttcagactaacctctgataatagctacaaaagagacaacattttgaaagtggagctctagcaagtccaaggaatgtgggaaatctctaggcttccactggttgacataagtaacccttaaaactctccactctgtcaaaacacacagaaaacactcaagctcaagatagtcattgaatgactgagcaactgcctagagctaaaacctgaaaactgctcagaggaagaaagcagccccgagtagctctgtgtttataacttcactcccatagttcacgacaatgaacatcaacaaatcatcacatgtgaagacaaaattttcaaaacaatttttagtcgacatctgcaatgccttttagaaacgaagcttatttgtcattcatcagtaaatacaactaaagtatacatctggggcctggacagatggctcaggagggaagagcacttgttgctcttgcagaagacatagatttggtccccagtaccacatgctgactcatgaccacactaattccaggggatctgaggccgtcttgtgatttccacaggcaccagactgcatctggcacacatacatatgtgtaggcaaaacacttattcatgcacaataaaataaatcttaaaaatgaaggtttacatataaatgcgtatcttgttttttttattactttgttattgacatacacaagccagaaaaggtatatataatgtactgtctcttcttgtctaaacctcccatcaggtattcactatttccaaggaactggtgccacgggtcttggccagagtggtagaagcagtctctgaagagctgagccggctgatgcagtgcgtctcatccttcagcagaaatggagcactgcaggtaccaaaatcatccaacgtcatgaagaaattgttttaaatagggaactgagtgttagctaccagctttataggcacgtgttacaaactgtcctgtggaccatggccatcgtcctagctgtgcaaccctgtctccttctctgagctgtgatctcactttcctgatgatgtgttgctacatctcatcgagaaagttgtatgttacatactacatatctgtgcctccagggcaagctccccagtgctactcctgctaggccactcaatgctgccatcggcaggaggcagggtcagctttcctgctctcatgccctctcagccagctcacctgcccaagcctccagggccagattcaccgtgctgcccaggctaggtgcagggccagctctccagactgctgtagccagtgaggaggcagggctgggtctcctactctcatgacccaagggccagttctcctgattgccacaggtgatgaggtgggagagtgttgcccctgcacccacacaacctcacagtagtcgagtgttggggacacctatccctctcttttgccctttgtgttgccttatggagcctgctcgaccagggccagctttattgtactttctgagctgcttgagatatagggcctagtctcccagtgctgttccctgctgcggggttggtggtggaattggggttgaggctacaggtctccagagtactgctgctagtgaagagcaaggccagttctgcacgctcccagttctgcacactcccagttctgcatgctcccagttctgcatgctcccaattctgcatgctcccagtggctgccccagccagggtcatgtgtctagggataatatgagccacagacactgacaccaaccccagtggctttgtagccatggacccagacatggccccaggtggctgggctggctactcacaatatgttgctcatctccaccctggagtctccagttccatctctcttcataatgctcaagctgctccacttctcttttgagagcctgtctgtccaccacatcctcacacattgtgtggctcctctgcaggctgaccatgcagctggcaggctcctgagtggtatcctcctgcaggctggtgtccacagcctgcctgccctgcattgggaagggcagtctataggcagcatggccgtcatggtggtcaccaggtctctgtgttttatctcccatgccgtgctgcctgtatttcatttgatttgatgttcatatgttctgggaataagacagctttggccaccatgccaggtatcaagttaggatgttgtctttcttttacattaatttttagttatattaagggaggtttgggcttcatctttccgtatgtggatccagttgtgctgtttctgttcactgagtggatactttccccactgaacagtttgtagcccttgttgagatcagttggctctcattctgtattattgagctccgggtctgtcatgtctggtgccaccctaacgtgagagtgttggaaatgtgagacttccaaatgcattgttgttttctggcaccattttaacgtctctgggaactttgcgtttccatatgaactttaagattaacttatcaattttctttgcttttttaagcttattcacacattaaacagagactggattgacttcataaagcactgagaggagacagtgtatctaaaagggtatagtaggaagcgagcccagccactcaggccagggtttcaggtccgtccttctcactaccaaactaaaaggcaaataccagtcaggtagtaaccctcatgtctgggtggccagcccctgcccacacactcacacttgacagcagcgttaaaggagacactgctatttttggcccgttctttgagaagctgctgttgttctggcctgcaggaagcacgtggggctgtctcctcaggtctactgtcatttgctgcctgacaattgtaactcttgcctttttctcatctttaggccagacttgaaatctgtgctctgagggacactgtagccatttacctgacctcggaaagcaggtaagacacgaagtcttcctctgagattcttctttgtgatcagaattgccttacttgtgcattgtgcctcttgtcagaaaacttacaaacaaaatgctcataaatttgtgttgaaatagagttgctatttcatcagaattttttactaaaaagctcaagcctattgtaagacagtgactctcaaggccacctctttagagcacattataaatgtaattgtttcattcattacttacaaacctttgtctcataaataatatggccaagtatgacatacttttttatttaaaaaaaaaaaggctaagaaaattaaatttttatcagatttgaagaacagtttaagtgttgtaaatatcagagtaagaggaagcctgtggtttcttcacaaagttcctgtagtggaaagttgatggtaacttttagctgttttgaatgaaagtcgggatttcctactattgagacatcagtaggtcagatgcacagagttgcctgcatgcagagctgtttgccacagtcactgcattgcccaggaagcctgagctgtgccatgagcacagggacctgcaggagaccgctcatttccagtgtttgataacatggctgtgccatctccttacagtcaccaaaacaactgaaaactttcattatttttttaacaaataaaattagcttcctcctggtgtaccacaagccatttctagatgattcctatgatcgttgtttaaaaacacattttcccaaccactcttttttttttttttttttttttgtggaaaatgatagagacaataggaagtacccagtccatatcgcctaatatgagtgtccgtttatccccttaaacttaacctttgtgaactaggttccttgtttataaaaccaagatggtacagattgactatcctgtatcagaatacttgtaaacaaaagtatgttcaactttcaagtgtgtgtgtgtttgtgtgtgtgatggaaagagttatgtttgtttgcttggttggttggttggttggttggttggttggttggttggttggtttttggttttttaagacagggtttctctgtgtagccctggctgtcctggaactcactctgtagaccaggctgtcctcaaactcacaaatctgcctgcttctgcctcccaagtgctgggattaaatgtgtgcaccaccactgcctgacagaaagagttatcttgaagatggaactcttctaaacaaggagtgtagttatgtttcattacacctatacatatgactaaaaggtaactcaatagtttcttaatcattgagtgtttgagggcctggagaggtggctcagtggttgagattactggcagctctgcctgaaggcctgggtttaaggcccactacttatttggtgctttacaatctgcaaatcagtcccagcggacccagctctctctgctcccttccctctacacccatcagtcatgcaaacacccatgggcatgaaataaaatgatcaagacagaggagagcctgctgacccggaaaaggcaacgtagatgcccacacacactatccccgagaacactctgcctcgggctagggagaatggagattcccagaggcatttttgtgactctgcgggacttttcattcttttaacatgcccttagtttaagaaacattgttctgacattcacatcctgatcaactgaagagtatcattttaatacaaggtaagagataccctccccacctcccacccccaaccccctgatcatcagtgattacatttctttcttcatatccactagttcaataaaggacttgaagctggaaactgttcttaggaagagtcattattatcaaataagttctccattgtgatcctcattcctctcagtaactcttgtgatattttctacctggaaaaactgaacatactaaataggtagtttttcaattcattcaatttacctttctcatataaagatagtgttcaaaagtatatgtaaatatcttcctttcctgtccacattaattctgataagaactagatcctgtcccccacgtccactgtgaggagacatggctgtaaaacaggtcttgtccttgtggatgctgtgactgtcctgagtattattctgcacaccatctgtctctgcttactctcctcccatttgcaccattgctttacctatagcttgtttgtttttttttttttaatgaaaaggaagtttcctttgctcccctcccctgcctcttgagcatacacacacacacacacacacacctgtgtgcatggtcacatcaccgagcctgggtcagtctctggcgtgccctcagaaagccctgcccctctgcccacttgcttctactttttcttcttctgttgtttttcacttttactttttctcacacatctccacttacttcactggcctttgtcagtttctttacatttacaatgtgcttaggaatgcctacagtaactcctgtgaattccactcagagtgcagactgtgagctcctgtgcttttgtgtttcaggtctagttttaaacaggccctggaggccctgcctcagcttgcaagtggtgcggacaaaaagtaagttctgggtgttctcctcaacccaccagccgagctgagccagctctagcagccagagacccaccgaaagtacttagagtggctagtataaggagaacctaggctaccctgggatgtggtgtgctgggtcccctaggccaagggacagaatgaattctgtcttgtaggtctaacttaaacactgatggattttatagttttaagtgacaagcacacgggatatgagaaaggcaactcaactgcagcactggcttctgtaatgatgagagcaggatgcgtccatccccgttcctaccacccccacttccgcgcactggcttacatacactttggcttctataaagcatggagaattagactagttgcatacaaggcacagaacagctatgtcattaccacattaatgagctcagcatgcatttaaactttacttttcatataacaggaaattgtggcctgaggggaagtctgggccaggtatcttttgtaaatgccagtctagcttcagcttaggcagtggagaccctgtgtctctttctctgtgaccattcctagttaaagtctacctgactcacagtgctagactcggtggccaagcccagcggaatgctgtagagagaaggtacctggaccaactgtgcgcataaagagtgactaggcttgggagagaggggagcaggccggctttcctgctgtgctaccccagtgcagacccttatgtgggtgtctcagagtcaggcaagcagctgaagagtgctttgcatcactgagtgccttgcttccttccctgctttgtttttgccttggaagtcatccgttttcttgaaataaaagataaaaggtaaaaatagtcagcactgctcttagtacatggaacatgtttcaaaaggcatttcagcatcaaaaccaaccaataatcgactgtttgagctgacgtgctgttgtttcagttctgatatagtatatatcatatagtatagtgccagtactcgggagcaggcagatacctaccgtggaagtctgatgacctacactgtccccagaacctttatctgtagaaagacaggaaagaatcccctcctttaagttgtcctccaacctgcatgtgtgtttctgtgcccatccctgccatatatcctgcagacattctcttcactcaaaataataataaatgtagacgtttatttaaagttctagagcaacctgggctacagagtgagacctccacatatatgctgtggcatgcaggccaatactcacccccctacacacacacacacatatacacatacactaataataataaaatcaaatgaacaatttaatgagtagggtgagagatgaccctgtcttctgggaccatttccactgtgtgtagaaatcacactgttcggtaattgcggctccaagcccctgccacgagtatctgcgttcagttccccagcagtcgtagaactggaaaacaaaaagatgtttagtttgtcttgattgtttgaataatgttaaaagagtagatctaagtgttattctgttctaggaaggactctagagaaggagtgtaaagagaatgaagataaatacagacttgtttagattaataaataatatattctttgatcagcctctttactttttgttgagatatttctattgctgattagaattccataggcactggctttttttgtctttcttctaaacacagtgtggcagtcagacctgagccaccagctccctgaatatgtgctgagttgctaagctgttgtgatggctaatcttgactgtcaaattgacatcctggagaaaaggaacttctgtcaaggaattgcctccatccctgtggcctgttgcatgtctgaggggcattttcttgaatgctaattggtataaaaagaaccagtccactgtgcactgtactatacctaggcaggtagcctggccagtgtaaggaaggtggcttgctgtgagcctgatggcaagccagcagacaacactgctctgtgattgctgctccaagttcctgccctgagtgtcaaccctgggctctccagatgatacatggactatgactgtaatccaagtaaatctctccaagttgcttttggtcatggtgttgtatcacagcaacagggaaacaaactaggatggccacctgatcttagagttactatcactgatgaaacaccatgactgtgagcaacttgggagagaagggtttgtcttatgcttttacatcactaatcatcattgaaattagggcaggaatcacacagggcaggaacctggaggcaagagctgatgcagaggccatgcaggagttctgcttactggatgctcctcatggtttgctccatctgctttcttatacaacctctcggaccgccagccgagagatggcaccatctacaataaggtgggccctcttccatcagtcgttaattagaaaatgctctataagcttacctacttatggaagcattttttcaactgaggccccctcttctctgatgactggttcatgccatgctgatgtacagctcactagcacagctcactagcacagcccgtcactgtcaggatgtaaaaccctctcctccctccaggtcactggaagagctgctcaacaagttcaagagcagcatgcacttgcagctcacctgcttccaagctgcgtctccagcagtcatgaaaacataggctctgcaagaagagcatcagacatggcggtggagactgtcctcgtgctgtgcagcagagattacacgtcaagcactgcatttaacgtctcttttccccagcatggtggtgcagaaagatgcccatggatatttaatttcaatctatttaaactaccatagtttaaacatccaaataaacagtttttgttattgctagctttggtcctgaaaggctgtgtagcatactcttcaaaatgctgtgagtctggggatttctccatcatggtccagagcggcccatggtgtgtgtgtgtgcccttctcagtgcccctcttctaggcctactgttggcagtttccagcccaggtgagacatttgagaagagatttgaagtcacagtttttagagctttgtcctaaactttaaaataaccatttcatacaagtggttctaagctccccaccctgtttctgtaaagaaaaatatacagtctacacataaaaatgttaatatttggataaatttgtgatccacaagtcctcgtatgaactctgaatttcatagtctgactttcatttctcccagtgctaaacactgaagcttgtggttctcactcagccttaagctgatggatcactgcagtggtgtggggagggttcacaaggacctgtatgtggaggccctgtcacacccacaaggcctggggaaggcttgtggtcttcaatgcagcctaaagatgaagccaggctcctcggcaaggcagcactccctccccctctgccacttcccacgcggtgaaatgtcttgctccatagctggaaagaggctgctctggcatgggctgtgttttgtaaagatttgaggtgccccaagtgaccaggcactgagctgtgactcagtggtgagtggcttgcgcagtagagtcaggtcattgtgacctgcaggcagctttcacctcactccatccttccgtcagcctctgttgcacttcactcttcagaccgatctgtggataatgtaggctcctcttctagagttgacaaaactaattccagagcacagcatatgtaccctgtggattatttaaggtaaatgagtgtatgtttatttatcacagtgactggaagtagaaattgtaatcctttgttgcaaaataagtatgtaccgcattgtctcctccctgtgtgctgttattatatctgacataaacaaactaaattccaaagcagaagtacagaaccatttgttattttaaacacctaataaatacagtgcacaaagccagtagttgtccttctctgtaagacccctatctttatttcaccatttttattagctctgtaattgcttatattcctgattttaaaatccacaataaatagtggagttctctcttttatgttgtgtttgtgtcttcattgttaaacaccatgtatcaagtgtcttgttagtttcagtaggagtgtgccatggacactacttcattgcagacagtgctagggcaccaaataggcaggccaacagagagatgagttgcttctgagacgttaaggctgggaggcacctagagacccatgcttgcactcacaaccctggtttccctttaaggctgggaggcgcctagagacccttgcttgcactcacaaccctggtttcctggcgctgaacttcaccacaacccacttcttcctcccaggtcaacacagtttctgtcatccttcccctggggccacaactcagggagagcacatgagcacgagggttgatgaactccagcatcacaggacatggaaacacttagggtggagagaatggagggcggtgccataaaatcccagatcaaaatgaggggtttcagagacaacttccaacaagtcatggggggcttcttggaggaaggggctttcgaaagcttgagttagaggtgagtggtaagattggtggtaaagtagagacagagcaagaccgtgagtcagaaggaagttgagagccagagcagatctgacacaggacacagaggacgtgaggaagaatagaagtgctccagggcttccttcctagggcaacttctggctctagcaaggccatgcctgtgtggctcagtcagcatggcttcatgaaagttaacacattagtctcacctttagaactaaaggactactagaaataatttgcttttttttttctaagactttctgtatcaatgtaccatgaaactgccatgttctagaaatgaatgggcattgcaggttgcaaaacaagccccactggcacagacagctgcagctccccgactcccatctctgtaggcattgcatgcagttcttaaagacaatgcatggaccgtgtgacattacacttgtgctgtgagtgctaggtagaggtgtggacttctattttgaatgtgtgctgtagagtactttactattatgttaagagttctataatttacttcaattaaactgctttaaaataaagattaggagagtatgggtttttagctctgtccttttgattttctctttccttggtgtctgttatattgcctccttctacatctctggttttgttcatttggttaggagtttgtcagtcttgtttatcttgtcaaagaacaaaatctttatttcattaactatttgtgttgatatttattttttttatttcattaatttgagccctgattttttgatacctcttccctaatattattttatatgtagtgtttgttcttgttttccctgggctttcaagttcatcattagactatttgaactcttctctctgtctctgtctctgtctctctctgtctctgtctctctctctctctctatctctctctctctctctctctctcactctctatttctctctgtctgtttgttttaatgtaggcatttagtgctctaaaccttcctctggccatcattgtggctcatagattttggtatattgtatttttattttcattcaattctaggaattcttaaatgtccttgatttctttttgcctcagttatcccaatagtgtgttgctcagtttccgtgagttttgtacttagtttctgttgcttttgagatctggctttaatccattataggcaaatagaaggcagaacataattttaattttcccatgtttatatgtggtcaatttcagagaaagtcacataggctgttaagaagaatatactgtagtgtttgcatagaataatctacagatgccttttaggcccatttgatttataatgtcatttaacttcagtgttttcctgtttagtttttgtccagatgccctcagccccactgccactgtgtgggagttcctttgtaattttagatctaatagtattcttttatgaaattgcttgcacatgtgttgtgtgtgtgtcctcgtatgctttctatggctgtgataaacaacatggctgaaagcaacttggagagggaaaggtttggtctcattttgcaggtcgcagtccttcactggggaaagtcaagacaggaacctaggggcaggaactgaagcagaagcaggcaaggattgtgcttactaaggcttactccccttggcttgctcagcctgttatccacccagtaccacctgctcaggagtgacaccttgtgtcgtgaacctggcattcccacgtcaatcattaatcaagaaaatgctcccacagacatccccacaggacagtctgatggatggaggcagctcctctgttgaggttcactcttcctagctatgtctaggtttgtataaagtgtggggtttacatgaactaaccagcacagtgagtatatgtttagaactgaaatatacttttgatggatagaaaattaagtggcctttctttgtcttttctgactagtttgctttgaagtttattttacctatattagagtaactgtacttggcttatgtcctcattcttgccacatagaatgcctttttccatcctttttaccctcaggtaaaatcttaataaaaagcaaagattcactctactaaaataaataatacaacgtattaaaacaattagatttcaaatatgtatttttatacttgatgaaattattcacatctgtcaactgaaaattaaacactttcattaaacgtttatcagtagtattgtaatgattttcacacagatttatgaactggcctgaaagtctaaaggtgatactaaatattggaggctgcgcctcagcttaagcagttagactgagtctcactttgttttggctgcatttgaggaccattatgcttcccgtatacttacttccattagccaaccactgtaagttaggatgtgtgtcactcactgtttctgcttgatgagattgtaaatctataccagtaaatatgctgtgagcaggattcaagcctttaaaggacctgttttcactttggagataaagccagtagaaaggtaacatgtctttttttgcccctagtcaggaccagtcctcaagtggggagagaatgcccatgtgtgcaagcacacatggaggccagaggttggcatcagtaatcttcccccatcactgcctgcctgatttttgatatttgggtagaatagttagccagcaaatgcaggatgcctgtctgactccacagtgctggggttataaacctgagcccgcacagtggcttttccctggggactgggcacctgaactgaagctttcacgcttgtgcagctggctgttagtgacagccacctctccagtcccactccttatttttttaaccatgctaattttgtgattaatcactgtcaatattatcacagctattattgctatctttacttttttaaaacagcattcctgactcatctacctatataccttctagatcagtggttctcagccttcctaatgctgtgactctttaatacagttcctcatgtcacggtgaccctcaaccataaaattgtgtagttgctacttcatagctgtaattttgctactgtaatgaatcgtagcgaaaatatttgatacgcaaccaccaaaggagttgtgacccaaaggttgacaactgctgctctaggtagataggaattgctgaacaactactgactttttactgtcccaaaaggacatctgaagctctccaggaggtaagaagatagaaaaaggaaaaatggggtcccaagggatggattacagtagtaagagactgttgccaaagccagagagcatagatagcaaaagagtaaatcctgagaaatgaaaactataaggaaccaggatgtggctctgttggtagaggttttgccagcatgcatgaagccctgggttccatatccagctctgtgtaaaccaggtgttgtggtgcaactccagcagtcgggagttggggtcgaaatgatagatatttaaggtcctctttttctatatagtgagtgaggtcaaggacactctggactacataagaccctgcccaacaaaacagagacaaaccagaagaatgtactgtgtagatcacattcctgacaatgtaggtgatcttaggagtgctgctatttccttgagtagagaacaccttgcatccccaccacatacacataaacacacacctgccccaccacccacaccttggaggatgaagtagtcatctgttaggctctttcctcagtttcctcttctgggtatctgcccatacttgtgttcgcgccatgatgctcaagtctactggacctctacagacgtgaccgggccagatgccccgtggcggtgggtagtttttgtactgtctgtgttctagacacttgacctgcctcaaaggcctctgtgtactaccacagccagggtttcctgccttctctccatgccccactcccaggccagggacatacggttccagcactacagctggtgttgagaaaccctttggggaatagttgtgcattgtaattgatgaaatcatgttggcaggtgtgtccgttttgtaattttagctaacgacataacaagtcagatctgtatcctcctccctactccccttagatccccagaggaatccagtttgtttgtttgtttattgcctgtccttaacattttggtaatgacctttgtatcgcttgctaacagttttaaattgctctttctttagtaccttcagtttgagccactgtggccttcctacagtgggctataagaatttagttatctcctctccgtataacttccttcttgctccagtgctttggctttgcctagctctctgttcactgtctccgtcattaggcctgcactggacagagtgacagagcgcagtgacagagcggtcactttctcagaaactaacccatccccaatgcccctgccacagtcatcagcctgaattcactcctgcctgctcctcttctgtggtggctcagacgctttatgccgttgtggttcactccctcacctggtctggtcacctcctacagaaggagcacattggaagtaacaatgttgaggttttcatatctgaagaaaatctacattgttcccttctatggaagtagagttctagactggacatcatttttccttagtgttcagaagactgcccagttgtcctcgccctgcttgcagaatctctcctttgcttagtttctggaattcatgattccatgctggaccgttgttcttttattcctactagggagtagaatgtcgcaaattctgtgatttttttttttttctggaattgtttctataaatcttcagcagtcctggacggttggttaattcagttggttgtttttctgagtccttacatttacaactcttccttcttgttgtgttgattctgctttctgcgacatttttaacttgctttttgtcctcagactattctcttaggaccccacatacttactttcctggagatattcatagtcctctcttcaaggatcttgttttgtttctgttttcacccatctgcattgcagtaggtgctgtggatacataatggtatttgcgagtagggttctctaaagctgactgaggcggtgatactgtatggtggacagggccagtcaacttgcatgtcagtcttactgggatggacactcagtagggaatcttcagcatttctgtggggctgatcagattccaagggaaagatcttaagaatctcatgtgaggcaccccatgggagccaagtgaggaaggaatctctgaggtcattattgacaggcagtagcctgttcttcatggcatttctaaggtctctgcatctaatcagggaaagttaaaagtaaagtcctgaccctggcaggaggggagggtaaaggccaagatgtttgcccagctgtgtgggcaagagggagccccagggcaccaggctgtttattaaatgcccacagactaatcactgggttttgacccaaacctaatcctcccttgtggattccatactaggaattttgcagtggggatttcaagttttgtatatcttgcttgaaatcctgccagtgtgcaacctaacttgtctggatgctgactcagctcccagacacatgtgaccgttggaagctccccatccccatacctggtcctgtcatttgcctttggtgacactgttcctacattctatcttgtcatttgccttcggtgacactgagactcacatagttccagtctgtctgtagctgaaggttcaggttaaatttgattgtgacaacagcgttcctgtgtacactgcttggctttgtcctgagataggaatgaatattaatatggattcaatctctattcaaagtcaccaacagtatgaaatcagggtcagtgtgcaggaaatcgtctttgaactttacttagaaacaaggattagaactcgttgacaaagtagtctacttaacgatacaagaaattcaagacagggaaacatcctggtggccattgctggaaatgaaagcaaacaaccatggttcttcaagaagggaacacaggaagctgggcagtggtggtgcacgcctttaatcccagcacttgggaggcagaggcaggcagatttctgagtttgaggccagcctggtctacagagtgagttccagtacagccagggctatacagagaaaccctgtctcagaaaaccaaaaggagaaggagaaggagaaggagaagaagggaagagggagggagaagggagannnnnnnnnnnnnnnnnnnnnnnnnnnnnnnnnnnnnnnaaggaaggaaagaaggaaggaaggaaggaaggaaggaagggaaggaaggaaggaaggaaaaaccacagggataatttagagtatgaaagagggagcggctagatagatgctacacagtagaagatacttccaagatccgtcacctggtggtggtggtgtgaggacagagcttgacaatttcaaacaagaaattcttcacccataagtaaagcatggtaaatgctacctaagaagctggagagatggctcaacagctggagcactcttccagaagaccagggttcaattctcagcatccactttgcaactcacgactgactgtgactccaatccaaggggatcaggccaccctcttctggcctcatagtcactgtatacatgtggttcatagtcaaacgttctgacacacactccacacacaaaaataaaatttctaagcagtgttgatagtacattgtttatatttcaggtgtgtgatgatgtgtgactattagttttaagtcatttctaaaagtaagtaaattaataactaaagcagactagtgcccagagataggcctccaggaattccatcacatgacctgagacaatggaacaaaggtgatacagtgaagaagtctttaaaacaaatgaagcaactgagcatccaactgcaaaaaaagtgaatacagacacagctttctcagtcctcacaaaactggattcaaaaatggattatacatctaaatgtaaacaggaaaactagaaaactcctggaaaataatggaaacttgatgacattgggatcataactttttaagggcacaaggtacttaaacctgcatgacattttgtgggtagctggataaataaacggtccatccagacagtgcaagaacattcacacatatatcaagctttgaaaagacagccccaaatgtatatattgacaagccaccatgagaaggctctgtactgtgtgcttctaaccagtgccattctagaaaggaggcatgatgaagctctcaagcaaactgatattttccaggattagatgggagggagggggtagacagagcacagggtgtttaaggcagtggaactaactcttatactcacacagtgaaccatatcaccctcgaacatttctcaaagcctgtaggaagtgcatatctacctagtctaaatcctctgctgctgagtgggtgataatgagatgtcagtaggggatcgttatagcaaacatgctatatgacagagggtctgagaggccagtgtctatgggaactctgtatttaaagtgtgaacctaaaacatctctgaaaaataaaatactggaaaagaaagatacatagtagagagccctctgcatctcctggctccacactcagattcaacccactgcagactgaaggtattcacaaagaaacctccaagaggtttcaaaagcaaaactggaattggatgtgcaccaagccctatgctaagtgtacacaggaggagtgtatcagttccctgatgtcctgtccctgcctctgctgcccatctccctgcagctcttctgtgggcttcatccaatctggtcttcctggtactaggccatgatgctcacttctgtgcaaggcatgtacagactcttcttgtcctcactccctaagtaatacagatgacgactacttacatggcattgacacaggattaggtctacaagcactctatactgtgtcattttatataagagactcaaacacttgtacattaggatatccatggaggccctggagcaaataccacaaggggtcctgagggacagctgtgcatatgtatgtctttagtctttaaatgtcttgagtttgcttcaaaaacacagacgggtgaagacatcatatagattataggtgagggagcgttgaatagagtaggggaggttaagagtgagtggtccagagccagttttgtggagccttgagttacagcttacaatatttcactctgagtaactctgacttttcaattattctaaagtacaatcatttaaacacgggcaggtaatgagcctcaaatccttgcttagttggaaaagatgactgcagagccgctgggtattggctaccagcaagaagctaaggggtgtggaaccgtgctcagtcatcaagcagatgtgggccagcagcttacgatggttagtcttgattgtcaggttggcagggttaagtatctccttggagacacctgtggacactctacgggggtgatactagaaaggtttagcagaggagaaagactcaccttgaatgtgggcgttccactcctatgggcacaagaaacagaagaggagaagaaacgcaagcatttgtctctgttccatacctgtggacacggatgaccggccactgcattcagctagtgtcactccttcctgacatgaggggctgtgtcccttcttaaactggagccaaaataaacctgtctttcctgaagtcactttttactatgtatttggtcacagcaacaaggaaagtgactagtgcaggggtatttttaagggtgaacgctcattgatcaatgactcagatctgggctgagcagatgaaacatttgttcactgtattattgtcgggaacctatacaatcaagtttcagaaaagatagctcttgttactagacatagttttgtatagagataagtgattgctagaactagtgtattcactcattcattcattcattcaacaaccctgaagtcaataagggtctcatatatgtcagccaagtgctccatcactgtgttctgttaccaagccaggattggcattttaatgaatattacttgagtcagagtacaactcaataacagttcagaaagaactgcagagtaattctctttactggtaaaaccccatacccttgacactctgaggtgatggccataaactctgactgtagcacagtctacccaaagtcacagaaacaaagagagcacccacactgggaactcacaatccagatttgcagtgaggtccacgcttgcatggctttagcctacaaccactgcagtggacccagtgctgaaggggccagggtcccagaaaactgaatccagaaaacagcagctactagagtaaagtgggaaaaggttttcagaaaacacaaaagatcccccaaagtccactgacatctcaggacacctgaaagaaggcctgcacttgacagatgagagctgtga

SEQ ID NO: 372 - DNA, 3902 bp, Mus musculus
cattatggcaggtgtgcattgaggagcaacaccagttctctcatgttccagggagcaggaagaaatggaacatgtttgaaagcatggcccgtggcctaagggctaggcccaccttctgaagattccgagaggcaaacaagggtcttctgaaggtcctcggtaggagtctttacgttactggttgcttctataactggatcacgagtttgctgcacaaagtaccatgtctcgatcccggcagcccccacttgtaacaggcatctctccaaatgaaggaataccttggaccaaagtcacaattagaggggagaacctgggtactggtcccactgacctcataggcttgacaatttgtggacataattgcctcctcacggcagaatggatgtctgcgagtaaaattgtctgtcgagtgggacaagccaaaaatgacaaaggagacattattgtcacaactaagtcagggggtaaaggaacctcaactgtctcttttaagctactcaagcctgaaaaaataggcattttagatcagtctgcagtgtgggtggatgaaatgaattattatgatatgcggactgacaggaacaaagggattcctcccttgtctctccgtcctgcgaatcctcttggcattgaaattgagaaatgtaaacttcctcagaagaacttagaagtgttattccatggcatgagtgctgattttacaagtgagaatttttcagcagcctggtatctcatagagaatcactccaccaccagttttgagcagctcaagatggcggtcaccaacctcaaaaggcaggccaacaagaagagtgagggtagtctggcatatgtgaagggcggcctcagtaccttctttgaagctcaagatgctctctcagctatccatcaaaaactagaagcagatggaactgaaaaagtagaaggatccatgacacagaaattggagaatgtcctcaatagagcaagtaacaccgctgacacattgttccaagaagtattaggtcggaaagacaaggcagattccactaggaacgccctcaacgtacttcagcgatttaaatttctcttcaaccttcctctcaatattaaacggaatattcaaaagggggattatgatgtagttattaatgattatgaaaaagccaaatcgctctttgggaaaacggaggtgcaagttttcaagaaatgtcacccaggcccgcacagccccatgctcgacctagacaacgatgtgcgcccctcggtgttgggccacctcagtcagacagcgtcactgaagagggggagcagctttcagtctggccgagatgacacatggaggtataagactccccacagagtggcatttgttgaaaaattaaccaagcttgtgttaagtcagctgcctaacttctggaaactctggatttcatatgttaatggaagtcttttcagtgagaaaatgattcaagaagtaatgcactccctggtgaagctgatccggggagccctgcttccactcagcctccgagaaggggatgggaggcagctaacatatgaatcactgaccgccctggagattcccaatgacatgttacagattatccaggacctaattttggatctccgaatacgttgcataatggtgacattgcagcatacggccgaagagataaagagattagctgaaaaagaagactgggttgttgataatgaaggactgacttccctaccatgtcagtttgaacagagcattgttcactccctgcagtccttgaagggtgttgtcgattgcaaacctggagaagccagcgtctttcaacagcctaaaacgcaggaggaggtttgccagttatgcatcaatatcatgcaggtttttatatactgcctggaacaactgagcaccaagcctgatgcagacatagatactactcatctttctgttgatgtttcttctcctgatttgtttggaagcatccatgaagacttcagtttgacttcagttagcatggcatcgctgaaagaactggatcaacgactctttgaaaattacattgagctaaaagcagatcccattgttggatccttagaacctgggatctacgcaggctactttgattggaaggactgcctgcctccggcaggtgtcagaaactatttaaaagaagcattggtgaatataattgctgtgcatgcagaggtattcactatttccaaggaactggtgccacgggtcttggccagagtggtagaagcagtctctgaagagctgagccggctgatgcagtgcgtctcatccttcagcagaaatggagcactgcaggccagacttgaaatctgtgctctgagggacactgtagccatttacctgacctcggaaagcaggtctagttttaaacaggccctggaggccctgcctcagcttgcaagtggtgcggacaaaaagtcactggaagagctgctcaacaagttcaagagcagcatgcacttgcagctcacctgcttccaagctgcgtctccagcagtcatgaaaacataggctctgcaagaagagcatcagacatggcggtggagactgtcctcgtgctgtgcagcagagattacacgtcaagcactgcatttaacgtctcttttccccagcatggtggtgcagaaagatgcccatggatatttaatttcaatctatttaaactaccatagtttaaacatccaaataaacagtttttgttattgctagctttggtcctgaaaggctgtgtagcatactcttcaaaatgctgtgagtctggggatttctccatcatggtccagagcggcccatggtgtgtgtgtgtgcccttctcagtgcccctcttctaggcctactgttggcagtttccagcccaggtgagacatttgagaagagatttgaagtcacagtttttagagctttgtcctaaactttaaaataaccatttcatacaagtggttctaagctccccaccctgtttctgtaaagaaaaatatacagtctacacataaaaatgttaatatttggataaatttgtgatccacaagtcctcgtatgaactctgaatttcatagtctgactttcatttctcccagtgctaaacactgaagcttgtggttctcactcagccttaagctgatggatcactgcagtggtgtggggagggttcacaaggacctgtatgtggaggccctgtcacacccacaaggcctggggaaggcttgtggtcttcaatgcagcctaaagatgaagccaggctcctcggcaaggcagcactccctccccctctgccacttcccacgcggtgaaatgtcttgctccatagctggaaagaggctgctctggcatgggctgtgttttgtaaagatttgaggtgccccaagtgaccaggcactgagctgtgactcagtggtgagtggcttgcgcagtagagtcaggtcattgtgacctgcaggcagctttcacctcactccatccttccgtcagcctctgttgcacttcactcttcagaccgatctgtggataatgtaggctcctcttctagagttgacaaaactaattccagagcacagcatatgtaccctgtggattatttaaggtaaatgagtgtatgtttatttatcacagtgactggaagtagaaattgtaatcctttgttgcaaaataagtatgtaccgcattgtctcctccctgtgtgctgttattatatctgacataaacaaactaaattccaaagcagaagtacagaaccatttgttattttaaacacctaataaatacagtgcacaaagccagtagttgtccttctctgtaagacccctatctttatttcaccatttttattagctctgtaattgcttatattcctgattttaaaatccacaataaatagtggagttctctcttt

SEQ ID NO: 373 - protein, 772 aa, Mus musculus
LDHEFAAQSTMSRSRQPPLVTGISPNEGIPWTKVTIRGENLGTGPTDLIGLTICGHNCLLTAEWMSASKIVCRVGQAKNDKGDIIVTTKSGGKGTSTVSFKLLKPEKIGILDQSAVWVDEMNYYDMRTDRNKGIPPLSLRPANPLGIEIEKCKLPQKNLEVLFHGMSADFTSENFSAAWYLIENHSTTSFEQLKMAVTNLKRQANKKSEGSLAYVKGGLSTFFEAQDALSAIHQKLEADGTEKVEGSMTQKLENVLNRNTADTLFQEVLGRKDKADSTRNALNVLQRFKFLFNLPLNIKRNIQKGDYDVVINDYEKAKSLFGKTEVQVFKKCHPGPHSPMLDLDNDVRPSVLGHLSQTASLKRGSSFQSGRDDTWRYKTPHRVAFVEKLTKLVLSQLPNFWKLWISYVNGSLFSEKMIQEVMHSLVKLIRGALLPLSLREGDGRQLTYESLTALEIPNDMLQIIQDLILDLRIRCIMVTLQHTAEEIKRLAEKEDWVVDNEGLTSLPCQFEQSIVHSLQSLKGVVDCKPGEASVFQQPKTQEEVCQLCINIMQVFIYCLEQLSTKPDADIDTTHLSVDVSSPDLFGSIHEDFSLTSVSMASLKELDQRLFENYIELKADPIVGSLEPGIYAGYFDWKDCLPPAGVRNYLKEALVNIIAVHAEVFTISKELVPRVLARVVEAVSEELSRLMQCVSSFSRNGALQARLEICALRDTVAIYLTSESRSSFKQALEALPQLASGADKKSLEELLNKFKSSMHLQLTCFQADAVMKT

SEQ ID NO: 374 - DNA, 225587 bp, Homo sapiens
  misc_feature (1)...(225587): n = A,T,C or G
ggaggctgaggcaggcagatcacgaggtcaggaaatcaagaccatcctggctaacatggtgaaaccccatctctactaaaaatacaaaaaattagccaggcttggtggtggacacctgtagtcccagctacttgggaggctgaggcaggagaatagcttgaatccgggaggcagaggttgcagtgagccgagattgcaccactgcactctggcctgggcgacagagccagactctcccacagaaaaaaaaaaaagaaagaaaaaaagaaaaaaaaagaaagaaaaagaaaagtgcagtcatgggatttttgagcttaaagggatttttgagattctcctatccaactatcttacttttcaaatgagacaactggaactctcaagaggtcaaacaatcagggtcagtatcaggcaggatccagaatgtaaggtttggaattttcaatgtaatttttttttcaaaccaacagtcctatagtcaactcttgatttttcaggggctgtggatattttcatttcttcatttttagtttctcactgctaaacatttttattattttcttcaccaggtgtgaaaaaataaattcaaactcaaattaactggctatgttctatgttctcatctttgttacaagggctcagtcaggaagaacaaaggttcaggctgttggctaaagtgtgtcctgaaaattatcttcaatcctgcatgtactcctcgtcctttagtaccacagagagttcaaagatgagctcacaggaggcaactacctgcagggggcaggacatccagggacctccactggagtgtggccaggacacaactggtgggcactccggtgcatgccatcaccttcagaaattatagtgtgtgcctgagaggggaacgcagctcagttggcatcttaggggaaacctaccaaacacaaagggtgagaaatctgctgttaaggagtgaaaaatattttactgggtttgtgcaaaaccaagggagcaatgaaaaactcagataaaattcatgtcatgttagatcaaaagaaatgaggtataaaggacaggctttataccgcgtttcatatgcaaggcgatcctgatgctcctgggcagtgggaagccttcataaatgagtgtcagcaaggctcagatcctgcagcaaaggccagaggccagcaccgtgtctccctccgacgtgcagctgcagctagtgcttctgctccgggtggggtgatatgcctggacagcggaggtgcagagtggcaagccagcggctgctgccctaagactcagtccacactgcacaccatcacatcagtgggtaaaactgggaagatggtgccatttcccatgtctttcctattactgctgacatcactgacaaaatgcaaattggccttgttcccactgaataaagaggaccttcaaatggagaattccaaaagacaagacaaaacaaacaaaccaccccaaaacaaaaaatcaaccacccactcccagctagcaatttaagttaaaatgctatcatgcggtccgttagaaatccttcttttagaacataaagagatctaaatcctttttcacagaaaatcacataattaggttattcctgccctctgcagcacagggcagggctggcagggccgggagagaacccaggtcctcactaagcacagacattttcacattctgactgagttgttccctctctccaggtactgggctctcatatctctggcagtgtgtgcctctcctcaatttctcctttccttctggaccacctacagacacagcccactgccagagacgcccagatataaacacaggtgcaaaacacatctgcattattgtgctggatggcagcacggccatatggttggagtaacactattgtaataccatatccctgctgtagaaccagctttatttacaattttcttattaaaatatgcaaatagcaagtaaatagaaaaccacagagctctgttttgctgtaaaattgattggagacgtttgactattttaaggacttttgatatacagagctctgaatataaaaagctctgaagccaacataaaagaagatggttaagtccacttaaaggcatttgctaggagcacaccatagtacgattaaggttaaaacaaaaggatgtaaggggcttccttaactaataggtccaatccaggaattgctaaaacagagttgaaacttgcagtcctgcagaatttcaaattgtcctgtaatcctaaaacacagaaggctccagcaaagcatggcaatgctgggtggtatttggtgaaacatctcaatcgtccatttattgtcaagatgtgtacatatcaaattttgctgataattttgtgtctttaagtggccactcagcatattttgaactagacaactggacacaggcatctcctccaactctgttgctatcacaatgtactgtattcttatttttgtttttgaggcaacgcgtatttgttgagcatctattatgtgtgaggcatggatgagcattacagcatccctcctcttaagtttacattctagtgaggggagagaaacatttttagaaaacaaatagataatactgtatttacaggttgtggtgagtgctgttactgaatgggcagcctgatgtattgaataactgtgctaggaagctctgtggtatctacaacagtgaataaggcaggaatctgcaagcatggagttgagagcctgtgaataacagaagaccaaataatcattagtcttcagtaaaaaggatgtctaagatacagcaaattacagtagttttgagggttaggttctgtactaattatggcttaccacacactgatgtgccacacactacagaacacaaaaggtgttgatttaacattaaaaaaatctaagaacagggaattgtgtctctcctagtacttctaaagactgtttgcaaagggatttcatgcttcagagttattctttctctccaggtcaaacaaaacctgagacagaattgaaaacacaaagctatgcaacgatattcaatcgctctaacagctaccactgcaattttaggtttaatgattttatttgctgccaacttctgcatatactgcactaatgtttgctagctggctttggaattaggaccagaaatgtaagaaaaaagaaagaaaacaccaccagtactctttatgttaacaaaagagtctctttcctattctgagtgtttttgtttcaggaatacagtgttatttatttttttaatccaggaaaatctgtgtgttctcaaggcccatacatcctggcttaatggcaggatcacctaacctgggaaacggcaagtcaccgagacccagagggtttggtttcactgtaaagggggcatgccgctgccagggatttctcactttatttttttcaaatgctgccgccaagcctcagattcacatttcctagcttcccccttgctctttataattgatgacgctggggacagtcaagtgattgcatactggctgcacttcaacacatcctctgataaaaaggagaggaaaatgaagtcatgctagattccacatcacttttttgttccaggatgtacttccctaaaaagtgtgcaattcagcacatagatatttgaggctgggtgtggtggctcatgccatgggaggactgcttgagcacaggagttcgggactagcctgggcagcacagcgagatcccatttctacaaaaaacagcaacaaaaattacgcaggcatggtggcacgcatctgtagtcctagttactctggaggctgaggaggagcatcccttaagcccagtagttcaaggctacagtgagctaggatctcacaattgcaacccagcctgggtgacagagtgagaccctgtctctaataacaaatatatatatctttgaattgtaataagtataggttgttttagtctgtgataataacaaccttgactggattcccccagaagctgatccagggctagcatttcacttgggaggtgacagcaggaaagagcaggaggggagtggggaggccaataaaggtgtgctatggggcacttccccgagggagactggagcagctccctgggactctgccatgcaatggggcacgtgcaaccagccaagctacccccgccagggcatttacacaccaactctttgcctgccattggccgaggccttcttctgaattaactctctagggcttccagcttgctctgctccaaaaagaaatccctcaagcacaaagagagatgcaggtgttcccagaaagcagccttcagttgggggaatctggatgggcactgatggcctctgttaccatcctgcctggtatggcggatccacggctacagatctctgtcctggccctgattcctcatgatggtgtccagtcatactttactgggggaaaaaacccacctcaggagggtcaataggttgggctataatgcccactgctgcagttagttctaaggctacagtgattttcatcatcttcttccttaatcacccggctcggttctcttcacctgcagctagcacttctgtggcccaggctgcttcctcaacgaggtgacccagaccttcttccctgtgaggtctgagcccttggttatcattccttgtcaggccagggttgctgcattgccagtttactggtatcaccagccaaggaaaagatgcccagtgagtcccctgcattccagaaataatcctccctcccatttcctactcataaccaggaccaaattttgttgcctgggatccatgaggatcccaaataaggagaggcttttagatttagtgaaccctgtgtcacccaggagagcatcttcggcacatcccaggggccaggaccctggctactggggatgctgtaccatacactgatattaggctctgaatatatactgcatcccacagcacagcttccaactctgctggagcgttcgctgtgcctttgtggggccatgctgatgtcctatcagggtggcagtctggggtgtgcgatctatggtggaaccagtggagcttgcggtcacgtcccctctgtctgcctctttcgctcttacaagggtgcttggtccaaggtggtattatgggaaatcctgtgataaggcaagacattctgtaagcaattgggtagtcatgcctggaaggctctacaagcaaggaagacaaacccaaacccaaacccagaatatgcatctgggcctatggaaatcaacttgccaccgagagacggcagccaccataccatgggctgcccattggcctctacggctggagagggcagaggcattgtctagatctgcctttttctgtgggtccctgtagcctccaaccctgtgaatggccattccattcacaggcccattgtgcagagactgcctgacctgccctagctgaatcatcccatttgctctgtgctctgctgcggatgctgtctgccgggcaggcattcgtgtaagacacatagatgggccaaatactgtttgtgtgaggagcatgtgtgagttcttgagctgagaggctgtgatatccacagcatggttgtgcagctgcttcctggccaccctcctctccatccagctcttatgtttctccagcaggtctcctacctttgggaatttctgcaccaaaagcaggcacatactcttggtcacatatagtcctgagggcagcccaactccgccaagaactccacactgatgctcagctccactctgacagcagcaagcacaggctcgtgggtgcctcgagccaacaggtactaacccagattaaaacagctgagtgaattcctcataagctccaaaaggcatctaacccagattaaaacagctgagtgaattcctcataagctccaagaggcgtctaacccagattaaaacagctgagtgaattcctcataagctccaagaggtgtcttacccaattgctgggggctttcttttcttccttttcttttttttgacagcgtctcactccgtagcctaggctggagtgcagtggcacaatctcggctcactgcaacctccgcctccagggttcaagcgattctcctgtctcagcctcccaagtagctgggactacaggcacgtgcaaccacgcccggctaattttttgtatttttagtagagacggcgtttcaccatgttagccaggatggtctcaacctcctggcctcatgatccacccgccttggcctcccaaagtgctgggattacaagcatgagccaccgcgcccggccagggggctttctctatagtgcggggagactttagggtgaccatatagcgtctaaaaggaacacttttgacagtaaaaagggcactcaataattaagccatcctaacagacacaaatcagtcatcccacgcaaagtggaacatgtggtcaccttagttatctgccttctttgccagttcaagtggccaattccaggataaccagaaaaacccatctaaatatcctgtcacaccagcttaaaccccatgatcctgtctgatgttatttctctgcatagaacccgaactcctctgttccctgctccatcttctgtgtcaaactccaatctcagctacaactaattttctaactccctgcctgcactagagcagccaaaacaacacaagcaggccgactggttccatttgagacttaagaccacacatcccaagtgggcattctgccctccctggcaatctggctacatatccttaacaattcgccttacaatgtctaagttaacaatctcaccccttctcagtcctccctcgtccccaccccctgctcacagatgatcttgttggttcctttgttaacatagaagcaaccagaagagtattttctcactttctcctcaccatgtctaccaacccacagctatagcttcacattccgctcactctcctactacacagctcaactctggtggctcctaagaacaacctctgccctcgtgcaacaggtcctaccctctcttacctttctcaaagacttgctctgcagttgctccctctctcctgcatcagcggttccctctttacatgttttgttaatagctcccatcttaaaacagactttttccttgataccatgcctctctagcaactaccgcccatctctgctccctttgtcacacaactcctcagaggggttgtcaaagtagccagatgaaaatacagaacatccagttaaatgtgaatttcagatagtaacaatttagtatacgtatgtcccgtgcaatattggggccgtacttttactaacaaatactaaaactgtgtctggaattggtaagttcttggtctcactgacttcaagaatgaagccgcggacccttgcggtatgtgttacagttcctaaaggcggcgtatctggagtttgctccttctgatgttcagatgtgttcggagtttcttccttctggtagggtcgtgatctcgctggttcaggagtgaagctagagaccttcgcggcgagagttacagctcatagaggcagtgtggacccaaagtataaacagcagccagatttaccccaaagagcaaaaaaataaaacttccacagtgtggaaagaaaccggagcaaactaccactgccagctcgggcaggctgcgtttattctcttatctggtccccacccacatcctgctgatgattggtccattttacagagagccgattggtccattttacagagagctgatcggtccattttgacagggtgctgattggtgcgtttacaatccctgagctggacacaaaagttctccacctccccacgagattagctagacacagattttggacacaaaggttctccaagtccccaccagagtagctagatacagagtgtcgattggtgcattcacaaaccctgagctagacacagggtgcggactggtgtgtttacaaaccttgagctagatacagtgtgccgattggtgtatttataatccctgggctagacataaaggttctccaagtccccaccagactcaggaacccagctggcttcacccagtggatcccgaccggggccgcaggtggagccgcctgccagtcccgagccatgcgcccacactcctcagcccttgggtggtcgatgggactgggggccgtgaagcagggggcagcgctcgtcggggaggctcgggcgcacggaagcccatggcggggggggttggctcaggcactgcaggctgcaggtccccagccctgccccgcgggaaggcagctaaggcccggggagaaattgagcacagcagctgctggcccaggtgctaagcccctcactgcccagggccggcgggttggctggccgctccgagtgccggcccgctgagcccacgcccacccagaactcgcgctggcccgcaagtgccgcacgcagcccgggttcccaccagcgcctctccctccacacctccccacaagctgagggagccggctccggccttggccagcctagaaaggggctcccacagtgcagcggtgggctgaagggctcctcaagcacagccagagtgggtgccaaggccgaggaggtgcccagagcgagcgagggctgtgagggctgccagcacgctgtcacctctcaaaacaatgttttagtagaagtatatcccatgcaacattagtttagtgataaatatatctatactacaaattacttgttgtttatctgaaattaaactttactgggtatttgtatttttattgctaaatctgccaacctaggttgttgaaacttacttttttccacttcacttaatattcttttcacagtccactctgacgagatgtagcttccccacactcctttgaaactgcttttgtcaaggatgccaatgactggcatatgccaaactcaattgtctctggagtcttggcctcacagtacttctgaacattggctatcaattcctccttcctgaaactatttagcttccagaatccgctacccccactttcctgattgtccttcctccctggccatagcccctgaacccgagcttcccccaacctagagcatcccctgaccctaagtatccccccaaccctgagaaccccctgaccccgagtatcccccgacctcgagaactccccgaccccgagcatccccccaacccccagcatcccacgaccccgggcatctcccccgatcctgcgcatcccctgacctggtatggcgccctgacccagtgcagccctcaaacccctgcagccccctgaccccatgcatcctcctgacctagggctgcccctgactcaatgttgcccccggaccccagtgcctcctcctgacctgaggcacgccccccaacctggtacagtcccctgattccagtgcatccttctgacccagtgctgcctcctaacctggtgcatcctccttacccagtgtcgccccctggggatgcacactccagtgcatcctcctgacctgatgcttcctctggtctcggtgcagcccccctgacctggtgcagccctctgattccatgcattctcttgaccttgtgcatccccctgttccggaggggtcctctgacccgatgcagggcccatcgttgtgaactgtggcccacaaacgcactatcatcccacagtctccctgagatgacccgagggcacggggatggatggtgcacccggcctgccccttgagcttgtatccttctttccctccctcaccgcttcccgccaccgcaaagacgcccagcaaaaacctcctactcgtgtccattcaggcagctgggtccctcggaacccaaggcattccagcgtccaccgcccacggcccctgctgacctccagcacccgcgccggtctcctcccctcctctaccctcccctgaaggctccgcccatcgaggactcggcgctcgactgccaggcggatctacacgctcggcgctcgcggcgggcggaagtgaggtgccggcggctggcggccgcggagtcttcggcgagacctaccgggccctgtctgtgccggccgtgagctgcggcaggacggctggaggtatgtgtgggaggctggagggcctggccgaaggccagcgggacatggacgtcagctgcacggaggtggccgcctgcggcgtccgtccaggcctcagcggtgaagggacagccgcgcccactggcgccgtcggtcacctgcggggccccgcgaccccccgcggttcccagccccgcagcccccatccccgccgtcagccgcctgctgggctccccgcccacccccgccagttcgcacccccgcggtccccacctgcgccggtgaggggcgtgggctgcagagggctgactccaggccccgcccgctggagctggcccccgactgcgccgcttcgcccttgcgcagttgccactccgtgagatttgagaatttctccggaaaagtgaacgcgaggcgggtgttacctgtctgcctaggcgtgcatcccgctctggctgtcctgagcgcttaaaaggcgcctgccgctgttgtcagcgtttgcgtgcacgtacttgatcctcgcgcgggtgtatgtacgctgccgtgtgacccattttacggataggggagcggcggctcagagtgcttgagcaaagagcctgaggtcctgttgtagctgccattgagaccttgcgcgccggctccaggtccgcacaccagcagcctggaagcctggtgatgcgtaaccctgtatcccaagattgttaagaaaacactttagtaattccgagaaatagttcttgaaagaactcgtctttgaatggaagtaagttatttttaatctgccaaaggtcaacatactaataagtctgagaaattttaagtctgatgcctttatgaatctgtgagtaaacttacaaggaacacttaaaaaatattttttctaagttagccacactttaattaaatctttttgtgtgcactatgcaatattgaaaagttacttctgagcttatgtggatctgtcttctaatgcataataatgttttgtttatgaatgttagtatgtactggcccatgctttgtgtaactgactcctttaatgacaaatcaactgaaagccagaatcttctcaaagatgatttttttgtgctaaaagttggcgattcccagagtagtaatagaaagagggtgatgtgtgcttagtacttacatgttcacttgtttgtctaagtagaaacttaataaattaaagcagagaagcagagttcccccagtgtgacttggaccaactcttggaagttttagaaagtgatctttttttcttgtcaagtatttaatttcctgtattgaatgccattttgaactacagttgacccttgaacaacactggggttaggggtgcccacgcagtcaaaaatttccatgtaacttttgactttcccaggactttactaatagcctactgttgaccagaagccttactgatacataaacagttgacttacatgtattttgtatgttatacgtattatatactgtattcttaaagtaagctgagagaggaaaatgttaaaatcacaacaaatgtatttactcttctttaaatgaaagtggagaatcatgaaggttattatccccatagtctgcatgagtagattgtggaggaggaagaagaggagggattttctcaggaatggcagagatggaagagatggaggaagtgaaaggggagtgggagatgcaggcacactcagtgcaacttttgttgaaaaaatccgtgtataagtggatctgtctcattcaaacccatgttgcttaagggtcaactgtattacttttctaaaagatggttattaacttgctaagttcttgggagcccattatgtaagaatcatatgggaaatgaagttggtactgaaaaaatagtcttctagcaaagaacttttaatatttctagtgtcaagcagcagcaagattaggccatacaggaagtgctggttacagaggtgtcctctcagttacttttccactcattctccagtttacgcatcttaatccagcctgggttcctagtccagcgtctgccacatagtaggtgcttaaatgtttattgaatggatgaattttaggtcactgttgagaggattttgaaactgggaaataacattcattgatcactctgctaagcggtgtactaggatgttgattgtactcagatcctggggaatatgttcttggaccttctggactgcctgctgaaatcacatggtgatagtgtggacttctaatcatatgctttagagtatgtttatattagtcaaaaattattattgatatgaatacacaaacttaaaagtaattgtaatgaaattatgaatcttttttgtatttttaaagacagagtctcaccctgttgcctaggctgaagtacagtggcgagatctctgctcagtgcaagctctgcctcccgggttcacgccattctgccgcctcagcctcccgagtagctgggactacaggcgcccgtcaccacgcccgactaactttttgtatttttagtagagacggggtttcaccgtcgcgatcctcgtgacggtggacctcgtgatccacccacctcggcctcccagagtgctgggattacaggcgtgaacccctgcgccgggccgggaaattatgaatcttaaagcgatgggtgacacacgcatcggcatccttcaatctcagtttgtttattgattgaaagggggtcttgttctgtcacccaggctagagtgcagtggcacagtcacaacacactgcagccttgagcgccatgattccagaaatccttctacctcagcctcccaagtagctgggactataggtgcgtgccaccgggttcggctcattttaaaaattatttgtggaggtgaggtcttcctatgttgcccaggctggtcttgaactcctgaactcaagtgatccgctggcctcagcttcccagtgctgggactataggtgtgacccactgtgcctggctgatctcaatttgaaaatcacagagtcaaaaggtatttttggcttaggcgtcaaagcaactatacactggtccttggtctaatctggtctgcttcatagtactggctgagttgcttagatgctttggactgtttccttttttgtgtattcagagaatacatgcagttagattatctctgaaatccttcctgccttgaaattttccaactcagtgaatcctataaccacctagcacttgtcttatagcacttgtgttgtgttagggacaatattattaatggtgtttacatacaccagtaaaagactaagctcattctggatcgggattagttttaattatttttgtatcttccagtcttactgtatgcctgacacatatattaaaaatcaaataatattagcctggattcataaggggtatttttgccctctcaattaaagaatagctaagaactaaactctgtagtattgagtgtaagtccagcagaagctcagaggtaggaaggatccattggggctagagtaattgggaagctttgatgataagagcttgatgaaggaaggcgtgtgaacacctgggctgcataccaggagcaaaggcccaggggctggtaagtgagtgcattttggattatgggtggagtgccttgactgacaggcagaagagtttggaactgatttgttagacagttcttttttgttgtttgtttttcctggaaagttttattaggccagctcaaaagcttcctgaacatcctttaccttaattcccttggtagcatttcagattaaaaatacatcatccagtttgctttatttttgtttttgggtttatcagtttttctatgtaatattttccacagtaaatcttggtgccaataatggaacgaacactggacacaggactggggaagactggatttcagcttaggagaaggtgagctgctcagggtggatccagagagcttcaagactagtgcccggcacatcttaagcactcagtgacaagtgcagcgttgaaggcttttttccctttactgcttgctaacagtgccactttgcacaaggctgccccttcgtttcatttgtaagcatggatgaatttttaaaggccttttctcattttaaaggtttgtgattttggagggcatatgatttaactttcattgtattataattttagcaaaagacaaaacgagacaaaaggccatgtttggctttagtttaattttaatgaaaaccccatgtgaatgataatgatgtatgtctcagcaggaatcagaagtcatgccagatagctcaaatgaagaaaggtgcagaggggattagggaatatacaaggagtggtgaggagcaaagggaagctaacagtaaccagaaaggacagaaggagaaagtagggctgtctggaggaggatccgactgttgccagagaagtagtgctgggggctggaagagtaacaccgaactgcctcagtgttggaactggtccacttctgaaatccaaagtgcaggcctcccactgtttgcttatagtccctcaactttctcagtctcactcacccccactgcatctatcaggcgcttctgtgatcttcagtcactgtcatgccagtgtgctcagttgtatcgttgttgttctgtagcatctgcctggcagcttctcagccttgggcagtctcaactctctgcctcctgtaatgcttgacctgagttgctggggccagctgggaaaatcacagtatccagatctgtgcccctataaatccatggtcaccagctcagctgggccatcaaggaatcttccagaattttcctcatcagtacccgcttcttatctctgcagaatgtacttttcagcattttcacgcttttcgaacctttcatcctttcacatcatttacacacactcttagcaagcggtcttgccacctacatcataaatgaaagagatgtaagtggagaatcgcaggggcttcctgccaaaaactgttcctcctccccagtcacagtggaagaggttgtatttatgctaagaccaatctcctacctgggctgtggatcccatctaccccgcctttgtgaggacttcactcaggtgttcatgtcttactaaagccttccttctgttggcctttatacatgcttagagacagacaagaataaagtaaaacagaaaaaactagaatcctcccttgatttcacattgcccttttaaaattcctctctttttcactttcctgccacatttcttaaaatagttgtttgtagccaacttctcacccatcccagtgctgtctggtttcagctacgatcactctactgaaggccaaagtcattcttgagcttctggtcacaaaatcttgttcctgtcatttcttcagggtaatgcctgggacatagcaagtgtataataaacatttatttgactgaataaatccaaggatgtttccttttcacagccctagtttttctgtttttctggggtataggagtccaatactgtcatcttttgaggatctgggtgactagtcattgtatcgcaaatcatcttgacggactaggtaaagatacaaataaatattatttgaggataagttcagtggctcaatgcctgtaatcccagcactttgagaggccgaggtggaaggatagcttgagcccaggagtttgagaccagcctgggcaacatagtgaggccccttttctacaaaagttacaaaaaagttagccgagtatggtggtacatgtctgtggtcccagttactcaggaggctgaagtgggaggatcacttgagcctggatcacctgaggctgcagtgagctatgattgcaccactgcactccagcagcctgggtgactgagtgagaccctgtctcaaaaaaaaaaaaaaaaaaaaaaagaatattatttgataatgacttcttcaatcttgttcaggtgatctgtctttctgggaaaataaaaccctgacatctttttttctgaaaaactatacttcctaaaatactaagacttactgtttttatctatgcatatagatctaataagagtagtagggcattgggtactactggcaatagatttgtgaataaataatgctatgctcttgtatgaaactcttttgttttcctattaagtagtgtatcttctttgaagtttttgtcttcatttatttgttgggggtggatggagggggatgaatttgcactggcctggttcatttttgacatgtcatcaatgtccagtggcatcggttggaagtccagtcacctttagacctgcagcctttccctgtgcaacatagtgacagtccttgtcctctaggaggagacatggcatgctaaggcagagggctttatggttcctgggggaataaagcagacctctaagtaacttttccaattaagatagaatccagtgcttgttttatgagaacagctgagtaatccggtatgtatataacagatctcttttatgggggctctgagagctaagttgtcaggcattccctatatacttgtctggcttccagtattccttcctagtcatctcatgcacattctcgtccccttaatctctcacctccaaacattatagagggagggaaggcctttattcccattcccaaaataaataaataaaaatcaagtgtcatttatcagttatatggtttaaattattggattattttcccaaaagaattaaaatataaacaaatatgctttcatttgaaaccatagatagtagttcatgtatttttttgtttgtagaggtagagaaggaaaagaagtataaaaagaggtccaggaggccgggcgcggcggctcacacctgtaatcccagcactttgggaggccgaggagggcgaatcatgaggtcaggagtttgagaccatcctggccaatatgatgaaaccccgtctctactaaaaatacaaaaaaattagctgggcatggtggcgcatgcctgtaatcccagctacttgggaggctgaggcaggagaatcgcttgaaccaaggagtcggaggttgcagtgagccccactgcacttcagcctagtgacagagtaaaactccgtctcaaaaaaaaaaaaaagaggtccaggaaagcaggatacattaatacattacttcttacctgttcagtccaacctggcgacagagcaagactccgtctcaaaaaaaaaaaaaaaaaaaaaaaagaggtccaggaaagcaggatacattacttcttacctgttcagtcctccccttctgcaaatggcccttctgagacccagcgagtcttctgcccttatcaggccgtaactctatacaatttggcccctatgagttctttcagatctgtgcatgcttgtatttttgttaactatgatttggggatggagcaggaggagcaagaggattaatttggaaaactggattacagagttcatgaccctgtctctgagacttgtcccactgtgtgctgttatatggtagaatttgtggcagtgctaatgtaacttgcacttgatctcactcaggaagtgtggagtctgtgtttatagagaactggggaagaaaatcaccattttcccgaaccctttccccaatatctctgggcaatccctttgggtccagcccaacccagcccagcagggacaagtctgtcttaggttaggttgggcctgactctagaaagatttggtgaattctctactttgattatattttatggtgccctgagagttggctgagcctaattttactgttgaaactcactaggcagctctgcaacaggattcttctggggtcctctggacccaaagtggttctggacagctaaggctactgagattctgcttgatttgttccctggtgatgccagtgctgccaggttgaggcatatatggggaagggtggacgtttgggagggttgtgtgtgtgtgtgtgtgtgtgtgttttcaaatgattgtggggaaaatcacctttctatagtctgatctgttagcgaaatagtgttttcacatcatgaggccttccgtggcctgttgagtagaggttatcctagtcttcagtgagtcagaacttctgtatttttctggttcctggccttctctagctgagaagaacatctgggagcatgacaaggtgagaccgtgatcactcattttgttcagatttcttgtctgctgttgaaatcagcgaaactcttcattactaaatagtaaaaagtactgcttttatgattctaaaactactttcagttgtggtttcatttctgatttttttctttatattattactgctaactttttctgtgtatttttagtctgaagttctgtgaaaaatgacaacttactgtctttttttctagtagtaaatattttggaaaattaaaattgtgccacagttttaatttgagaaattaaatatgggaaaattatagaattaaaattttctgacttctgttgcagaaaacactttaaatccatccctgtgtgcttcattaaaggaaaagaggcagatggtttaaaattaatatagtatatctataaggaaaatgtatttacttaagtgtacagtataaattgtaagaaaatgtggccttttgtcttgattttagtgaaatgcttttgtaatagtaattttctcttttgacctgtgatggataggaggttaattgatgttaaatggatgctttgttaatccttcatcagctactaaattggtatgggggagtacaggtcaagactacacaaggccatgaccagcttgttttctcagggaggtttatggattccacccctcccccttctccaaaccacacatcactctctccagctgcacatagggaagactctcctgtctcccctccccctcttcctgcggtcctgtctccccctccctaacctcatccttctccctctctgggctgctgcagagtgacagcttgtagatgttgcgtgcgagggagttcagctggcgctgtgtggtccgagtgtgtggtctcccgctcagccgagaggctgctaacagggtggatgagagagagagcaacactgtttactttaatttatttcggatgccggaattgtgcccagagtttctcctgagcttgattccatagctagcagcttcaatccttcgcagctgcggtgcgttctgaactctgggctgtcctttcctgacaggcactttccatagcatctgcctgcttaatccctcacggctcagaaatgttaacggcactgttgagtgctgtgattattttgctttcactatgtcaagatttatggccttcgagaagcttcttttgagatagagctagagaaggaaagcagaatttgtaagatcagtgacaaagttgatgtatttttggaaattggaaaagctattatacaaaatttgggtcaaattaatccaactttgctcatataaaagaacctgggagttagcgacatcctgtcatgtttaacagttttaatgaaattaaccaatttaagctgacggttttcttgaccttttctgaaactctgcattgattttggcatgcctgtttaccatagttattatatttgtcagcggtgatattggtttatttcatcctaaagatttgacaagtcgagacaaatgaaactttgtttttatgtagtagtataaatttaggagaatatctttttatccaatcctttcattatgaatagcttagtaatattttcttgattttgttcctctctcattcctgaacattattgttgagatggtcaagtattttgttatttgaataaacatatgtagactcttgatatcacttgggattttgcattgtttagcttctttattttcatgtcttcctggcagtcttgctggaatggagttggtggtgttgatgtttgtcaaggattagaaagtctaggccactcacatcttcccgcaaggtcagtctgtttagcttggagttgttctgctgctttatttgctactcttcaccctgggtttcaatacctgagctctgtttccatcactgcgagggtaaagctttctcctaccctcctggtaccttttcactcctcgccctggtgtacctttgcctcaactgatctggaatcagacttcaggaatttagtcatgttgggcactttttaaaaaatgataccatcctgtatttctttttgtgttcagttttttggggttctgtgtttatggtgctaatgatgttaaactaatgctcagaggaattctgaagcacagttattcacaaagttgtacaaccatcaccattatctaagtccagaacagtttcatcacacccggagaaaaccctgaatccattatcaatcctttcccactttctgcatccatggatttacttattctgaactttcatataagtggaatcatatatgtggccttttatgtcaattatgacataatatatgcataatattgttagtcattactgtatgacttttacctaggaagtgaaaattctttggagagagagagagaggaaaaaatactgataaatgatggttatagttaagtaatcatgtgtggaaatgaacttgtattttagaaactcggggccgggcgcggtggctcacacctgtaatcccagcactttgagaggccaaggcgggcagatcacgaggtcaggagatctagaccatcctggctaacacagagaaaccctgtctctactaaaaatacaaaaaaattagccgggcgtggtagtggttgcctgtagtcccagctattcgggaggctgaggcaggagaatggcatgaacccggaaggcagagcttgcagtgaccccagatcctgccactgcactccagcatgggtgacagagcgagactccgtctcaaaaaaaaaaaaaaaaaagaaactgggaaatatttaataggaactgcggaatggtcaaggcttgtgttggatagaagtgccctatgtgtgactggctgttagtcaccagcacttttctgcagtgctgtgtcatgcaggttcctgttcccagcccttctggagtttcaccaatgccggtgctaattggttgtttaaaattcgatgtagaactctaaatgaataaatcctgactgaacagattccctccatttctaccttagcttttactgggcaaaatcctccaggagttagcagtgagcaggaaaaggaccagggttttgctctctggtaactaaagggggaattatcctccagagcagttgattctcttgcaagggcagagaagcaaagtatctgtagaaccacagtaccttgacagcactttaaaaaccctatttccaagtgcatttctgtgaaaacaaggttatctttaagaaaaagattactacctttatttgcacttttcattagaactgaaaagttagaattgttttatatattctcagtactatcccattctcttttatggctggattttttaaatggaaaaatcaagcttaaatgagttttggcctagtttttataggactaaaggatagttgaaaaacaagtttctctggtaactttcattataaatatcttagtaatattttaaaatttattaggggcaaaattcattttggtttaaacatttaaaatacttctttggtggggggagaaaggagacacagcattaaagatctgcacctacaaattagaatttctggttttcgtgtaattctgtgtggaagcagtaatagaatatcaaacttttcacctcttggacctttcagttaaaggtcagatttgaactggacctcttgtcacccagaggtgaccgatagaaaaggagttgttctgcttagatgtttggttaatttggatttatctgattgttttccttagcatgaattgtattgaagatcaggaggagctgtcacaggttgattgtgaccttttaggatgtaattagggcactcaggttttatagtggttttggcagttgctcttgtgaccagatttattggtttaaaagacagtgcatggcacacagtacagaatcaaggaatggcatctgtcctgtgaaacaaatctagctgacacccctctcagaagccgcatcttatagcttcttatggcaggaatttcacacagccttttgaggtctctgctgctgttgttgaggagatgaaagaagagcccgtgcatccccagatctggtcagcccggccaccgtttcactgagtgtctggcactggactagacactagagtgaagaaagaatatgatgacaagcccaggcaagcccactgaagattgctggcagagagcttggcacagtaactttttttcatccctttttctttaatgtaaaggatactatcatttgttataatcactttcttaagatagttaatttacaggagaaatgagcaccacccccagcccaaaaaaatgcatgtaactcagagctgccaagaggaagcctcatgtggtcagcgttcttaaggagaccctctgctgcctggatctccagccagcagctgccctgcagggctctggaagtgggctattctgtgtggtctaaggcctacctacgtttctaaaacatgtatatacatgcttattgccacagggaaggcaatgtaaaaatatttaaaggcacaatttccctggcccctccacccttctccaatctcattctcaggataattgacccctggtgtgcatccttctagccctttctctgtattcatataagcataggcccttgtttgtataaaggtagcttttgttcttcttttttaaatggaaacattgattgggtcctgattctaacacatcaactgcaaaataacttttagaccatatgaaaaaattgacctggggctgggtgcaatgtcatttgtagaggtacaaactaagtcatttatggatgaaatgatacaatgctttaaagagctccctcaacaaacaacatgaaagtatgttgaaggggagaggcagctaaaacaagacacagaatgttgaagctgggtgatgggaacttggaggttccttatgctagtctctcttatgtatgtttaagatttccataataaataaaaaaaaaaatagtcatccggagtatagcatagagcaagggtctggttttgaatcccacctctttcacttaatagctgtgatttttgacaagctattgaatctctgataatcctacccttgttaataaaccatttggcattttagaatacttccttctaggaactttttctgtacatctgtctgttcatacctatctgcctatttatttattcgtatgtctttctatttcgctaatttgttgtaagtattctcttggtttcgcatgtttttcataatgtttcactggctgcatagtttccttgactgaacctttacattttactggatgttttggtggatgtttccgttttttccccgtcttgctgtaatacatttttgcagttatgggaatcttcatgcctaatagcaatccccatggtttgaattattttagtcattgttcacttttcaagaatacattttgagtcaaactgtggaagcatgtctaaggctttgacacgtggccgaattatttttcagagtattggaacagttgtgctgctgccagcgatccgtgggagctgtgtacagattcagccgacaactatgagccttcgagatcatcttaaatatcttgtgttgttaataggccagcggtggaacctcttttagttgatgtttctctgaggttgggttttgtctttatgttccttggttggttgcatctcctctcttgtgaactgtaagcttataccttctcaatttttttttgaagctcttggtgttttctggattgatttttgtgagctgtttatataataaagttatttgtattttgacattttgaatatatttgcagacttcctgtttggctttcaaatttcttatcttttatttattaacttatagaagatgtatatttctttatggctaggaacttagtgtgttcaccgttgtgatttttctgtcaagtccaaatgttgtccttccaccccaacagctgtaatatacacttactttatgttcttctagtttttttaatatacatataattaaaattatatgtatatttgactttttacatcaccaggaattctttaactctatagatgtttgaagttatgtaagcaagaacattatgcttttggagtgtaactgaaacatttctgggattggagttaatatgctaaaaattaagaggcaagaaaataaagcagtagtttgtttagaataaaattcagcttaatctttggctgtcctgactacggcccatcatcagtgtttggaattttcccaccgtgttatgtagtgcagtgctgtggctttaaagaagcacttccccctgttgccctggagccccatgccctggttctgggaggtaatcacgattgtgtactgttactatattgtgtcagccctctctgcctgctgctttcatctttcttaagttatgcagcacaaatcttagaatgtttctctattttttctaattaaaatactttctatcctaaaacaattgaggaccattctcctagaaggttgctcacccagtctctggcgtgtcagcgcagctaatgacgcacctggcccacgaattcacttacagttggtttttgatgcatgaatggtagcaatactaggttacttttattttggcctttaaagtttgcagagatctttggtacacatgattccatttaatccttacaggattcctgtgacattagttattattcctattttaagatgagaaaactgatagaaattaaagggacctgaataaatcatatagttaggatttgaatttctgccttctgactcttggttaagtgtcttttctccctctccatggctgaacaagttgatttgtctggcaaaagtgtgctgttaatgacaccagtgttctttaccccatattggtcaatccactttgcactgattaaaaactgttggtcatgtccttcgtgccagttagcatctctcattgcgtgctcacggtcacactgaagaactggtcagggagggaggcactttggggaaaacagttcttttgggggacccttttcatatgtgagtgacaacgtgaagagtgtgtgtgtgtgtgtgtgtgtgtgtgtgtgtgtgagagagattataagcacagcccctgatgcaaactgcctaggtgtgattcctgctgtgatagttattggttgtggagtattggacaaagtatttaatgagccatcctcataggagagttctgaggattaaaagttattgcatggcaagaacatagaaaagtacttggataaggctgggcgcagtggctcatgcctgtaatcccagcactttgggaggccgaggcaagcggatcacaaggtcaggaattttagaccagcccgaccaacatggtgaaaccccatctctactaaaaatacaaaaattagtcaggcatggtggtgcacgcctgttatcccagctactcaggaggctgaggcaggagaatcgcttgaacccaggaggcagactccatctcaaaaaaaaattaagtacctggataaaataagtcatcaatgtttgcttaatatctaagatatattatctgttgattgatggctagttgtgtcctaatgtaattggtattgtttctgattttatattgaaaaatattttaaataaaggcaagagccatgtttattcctacatataccacctcaaatgctaactgtgcactaaacacaaaaacttcaacccactaatgaaggggtcaaaatccctataaagtgtaatatgggaaaccacagagtcgccaggggaacctgtcctttccgtaatgttgaagagtatggggaaccgcagagtcttcagaagaacctgtcctttctgtaatgctgaagagtatggggaaccgcagtcgccagaggaacctgtcctttccgtaatgttgaagagtatggggaaccgcagagtctcccgaggaacctgtcctttccgtaatgttgaagagtatgggaaaccgcagtctccagaggaaactgtcctttccgtaatgttgaagagtatggggaacctcagagtctccagaggaacctgtcctttctgtaatgttgaagaggtttaaagcaatgggttgatggggcgcccatttcttttagaatggagaacacgtctcttcatgtactcctgcatgtctgcgcactatcactgaccttccttgatcatttgaataaatgaaaaagaaaagcaaaaaacaatgctattaccatggccagttccccctaaagtacttaaaggagttgagaatttctaaatgttttttgctttctttcctccacccccagcctgagagtctcttttttggtgaagagcgagaattagtattgagtcacagtggctcagaaaggttgaaaagggaagacttttaaaatgtaggttttattatcaacaagcaggataagattgttgttgaaaattgtgttactcacagttccaagagggtgggcaagccgcaccacacaggaagcactgggggtaggtcaggaggcagagggagccagggaaagcatgggccagaccctttgttatggttttcccgggaaggaatggctaggcagggtaggcaagctgagcaagtttaggattggatcatctgaataattttttggagggctctgggctgtaggagtggtccctagttggctggcacctggggtatgtagggctgggggcagtgtccctgattggaggagcctaattgaagggtattcagaccaggcaagtagtttgtgacctctaggaattagccagttctcagaggggcagtcccttccctggtccacaggctccaaaatgtcaaagcatcataaagcactgacaacaaacaaacaaacaaacaaacaaacaaacatggttaatacaagggccaggactttttgtaccacagctttaggatttagtagcagagaggagaaaagatcagtacagtagtgtttcttattgccaaggagaagaggcataaatttgacctagaaaagagtatgagaaaaagcctttacaatagcttactcatttctcccagcaatttttgaaattattgtgttttgcacattttctttgtttccaacatagcttaccctcattattactgcaaggctttgagaagtgttcacagttcatatttagtacaaggtaatttttttttaacagggtacatgaacttttttgaggaaacatgatccaaatgctagctagctgaaagagtaaatagtcacttccaaggctaaacaaattctgtctttatttttttttatagaattattgagggaaaggaagtaatcatgtcagcagtcttcatcattcatttggaaccaacacttgttctgtaattatcatggcaataaaaaactcattttggccttatgtattttggtataatgattcaaatttggctaattgcatgagaattatgatcaagttggtatttttgcttaatttctagctcagagtttgttagttttgttattctttgaaccaagcatcgtaatataaaatttgattgaaagtgttggtagttctcaatttctcatttttggattattaggggtttggagagttttcagtcataactcgcttaattgcagttcgctttattgtgccttgtagatactgcatttcacagataatactttttttaaaaaaagcaaaatgaaggtttgtggtaaccctgtattaagcaagtgtctcagcatcatttttccaacagcatgtgctcacttcatgtctctgcgtcacattttggtatttcttgcaatatttcatactttttaattattatatttttaagttcatttgtgtttcatattgggaaggcaaatacagatgagagagatccctgccaaaatagtaaaaagttatatattttttgagttttgaagtgtaaatctgctttgtttggaggtttcctctaggcagaacccctccttgccgatggcatctagtaaatgaggccttggtgcattatgctgtacttctgaaaacatagatctcaaaatctgtactgttagaaacgttttcgctcctcctcaccctaaggaatctgttattccaagaaatagaaatcttttctgtttccagatagtttaaaaattgcactttatatttctgaataaataaaatatatgactatacactgctgcagtttcatagcttaacttctgttaagccaaatactgttgaggcttaagtggtactaatttaatggaacactaaccagtgcaaataaaagacaattgtattgttatcttttttcttagataaatgtgaattttttttttttttttttttttggctatggagtctcacttttgtcacccaggctggagtgcaatggcgcgatcttgcctctgcaacccagattcaagtgattctcctgcctcagcctcatgagtagccggtatcccaggtgcccgccaccacgcccagctaatttttttgtatttttagtagagatggggtttcaccatgttggccagggtggtctcaaactactgacctcaagtgatctgcccgccttggcctcccaaagtgctgggattacagggctgagccaccgcgcccagtcatgaattttaaaacagagtctacaaacttaatgaaatttaccttatcgtttagatcacatacactaaagctctgagtaaattgtaaaatgtactttaattttataagaatgcaacttacttatgtaaatattgaaaacaaagctcttgcagtttctggtcagagatgtaggagcttggaagtcaccactcgaatcctcacaataaggaaaaagctaaacagactgaaaatcagcaacttcccttatatccctcagaaaattgaggccacaggataaggaaaaagctaaacaaactgaaaatcaacaactttccttatatccctcagaaaattgaggccacagggtaaaccactgtcccctaaatgggagagacaacaggcagatacagagcatcccaacttcttagtgcagaagcctaggaatggaagtttctgtgggaaaccagtattgagttgctttaaccaatacagcatatccagctttgaacaaaaaattacacggcagaaatgaaagacaaaaaccacattttgaagaaacagagcaagcattagaaccagattcaggtatggtggaggatgttagaatgatcaaaccagcaatttaaaacaactatgattatatgctaagggtcctaatgggaaaagtggggaacatgcagcagataagtaatgtgcacagagagatggaaactttaagaaggaatgaaaaagaaatggtagaaataacactaacagaagagaagagtgccattgatgagcacatcagtaggccagacatagctgaggaaagaatcagtgaactggaagaaacatcaatagagtcttcagaaactataatagagaaaaaaggtggaagaaaatggaatggaacagccaagaattgtgggacagttacacaaagtataatgtatgtatagtgggaaccaagaaggggaaggaaaaaaataacagaagaaatatttgccgtaataatggctgagagttttttgtaattaatgatagtcccagatctggaaagctcagagaacagtaggcaagcaagtaccaaaaaataaataaataaataaaaaataaaaaatctacacttagcatattgtattcaaactgtagaaaaatataaaaaatactgaaggatactgaaggaagctggggttggggatgagatggacaccttacataagggagacaagaatggaaattacatcagactttttttcagcaaccatgcaaacaagtaaggaaaaaagacccacctacatagaattccgtatccagtgaaattatccttcaaacgtgaaggagaaataaactttttccagacgaaattgaggggatttattgccattagatttgccttaactattaaaagaagttaaaatgttaaaagttgttctttagggagaagcaaaatgatataggtcaaatacttggatctgaaaaattcaaggatgaattttagagaaggaataaatgcagtggcttctgggttccctcccctcaggtcctggcatctggcaccatgcccagcacctacaccccacattcatgctgaatgatacggatgtggaatgtaatgaattgttggcttaaaaaacaaatagtttttctttttttgttttttttttttgttgttgttgttgttttgagacagtctcactctgtcacccaggctcggctcactgcaatctccacctcccaggttcaagtgatcctcctgcctcagcctcccaggtagctgggactacaggagtgcatcaccaagcctggctagtttttgtacttttagtagagacgggattttgccatgttggccagactggtctctaactcctgacctcaagtgatttgcctgccttagcctcgcgaagtgttgggattacaggcgtgagccaccatgcccagccttaatttttttttttttttttttttttgagatggagtctcatgatgttacccaggctggtcttgaactcctgggcttaggtggtccttctgcctcagcctcctaagtagctgggactacaggtgtgcaccactgtgcctggctgaaaaagacttactttcttgacctacagttgcaacttctacatttaaagctaccccaatggactcatggaagagaggaatttattccagagacttggcaaaactctaaataagaaatgaaaatatgtctttctctcagctctatagatgttaataattaccttattgtgtcttatgcaacagaacattttcttatgtgatgcgagttgtggcatcatttttgagaccaatcattcagagattaaagagaaaggaattgaatattttcagtgtagacactatgagtttttaaaagtcaaaaattattacagattttcagactggaaatgaaaggtcactgaagcattctgtggatttaatttgccatattgaaaagtattgatcactttaacctatgtgaacagaaagctgtttgaagtcctccttcccttttttttttttaaattaaaaaaagtaaagagttcttcagaccaaaaatgagaaaaccacagtggattatcctcagctgtgattggtccatttcttgctgtgacctcagtaggagtcattattgtaaaatgccaaacacttattttcgtccctggctctgcctaaatttttggcccaaggcagaatccaacagatagtactgccaccagaaggggatcctgcacagggacatacagccaaagaacctgcttgtgtggatgctgaactgaacctcacgtttgcagactttggctttagcaacgagctcacctttggcagcagggtagataacttctgtgtcagtgcttcttacactgtcctggaactcttctaggcaacgtacgcaaaagtacgatggctctgagatggatgttggcagcctgggagtcattctctgtgcagtggtcggtgatcatcaggtttctgtcttacaatggacagaactatagcagagcttccaaagtaggtatatatcacattccctttacatgtctatggagtatgaacacctaaataaattcctgctcccaaaccccagtaagagaggcactgcagaggaaatcatgagggacccatggataaatgtgggctatgaagaggaactaaaactacatccagccactccctgactccagggatccctggcacactgagttaatgctgtccttgggctacatgtaagggaaattctggactcattgatgggctacaggacacctcagctggagggccacaccatcactgtgaagtcctttccttagctgatcccaccaactgttgccatccttctccatccttccaggtacagcctagggtctctgccagcccaaagcagcgagcctgctcttcccacattttctttttcctctaatagaaaatcagtggcttgaggaggatcaggagtcaggttgaaaggccagcagaacagtcaaagtgcctgccagtcttctgcctcaccttgagatgaagactggcccagcaaagcctccagcatggccttgtggcctccccctccacccacagcaccagcagcagtggtggaaccccagacagaatcaactgttcctagggtgtgtcctccaaaggagaactcccttcatactgtgcagctttggttaggaccggcagaatttgccagaatgtataacctcagccattccctctcgcaacattcagggctggcagggggccacaggaggttccttatcttcatccacagacacctgtgtttcaggttggctgggaagatctggcatgtagctggaatgtggggagttcaagctgtgctcgctgcatttcacatggagcaggaagatcctgagctccatggagtccaaggacatggtgcaggagatcagccgggtgtgggatgcagacagttgcaggtggtaatacttgtcctcgaggagcaaacataccagttggaggttcattcataagcgtttattccgcaccttcatgtgcctagcaccaagtaagtaaaaaagaaatacagtcagctctccatatccatgggttctgcatggacagattcaaccaatcacagatggaaaatattcagaaaaaaacaatgcagcaataaaaaaacaacaaaaacaatacagtttgataacttacattgtattatgtattataagtaatctagagatgattagtaatctagagtatgctggtggatgtgtgtgggttatatgcaaatactatgcaattttatgtagggaacctgagcatccccagattttggtatccacagaatgccttaggaccaattactggtagatcccaagagaccatagtatctctacttttactggctgaatggtagagataagtatacagggggtacgattaatccaacctggggctgagggaggttaggttgttggaagtgaggtgagggaaggtgtagcttcccacagaaagtgatgactgaatgggtgaatggtggaagttagttggctaagaagcaggtgggatgggtgttgagggacctaacgctgagtgtgacagaacgcagatttcagcagtgagcacagggctgtgcaggcaatgagaacagcacttctttcacctggaaggataggacagaagaattaagttctggaatgctggaggccaacagagggagaaagcatgcgtcacccagaagacagtgtgggagacaatgaggggactgtaggagagacatgatggaggcacagcatggctgagtatcttcctgggcatgacttaaagcattaatgcctaaaaattttccaaaattaataataggcaactatccatagatcctgggagcccagagaacacggagcaagacaaataccaaaaaatctacactcagacatatcctattccagttgcagaaaatcaaaaaccaatagaaactcttgaaagaagcacctttctataggggagcatagatcagagttatatgagatgtctcttcagaaaccatgcaaggaagaatagagtggagtgaaataaagtgctgaaagaaaaaaacccagtgtattagggctttccagagaaacagaatcaacaggatatggacggatggatggatggatggatggatggatggatggatggatggatgggaggggatttattaggggaactggcttacatgactatggaggctgagaagtcccatgacaggcgtcggcaagccacagaatcagagaagccagtagcatggctcagtctaagtttgaaggcctcaaccaggggagcccgcagtgtatctctcagtctgaggccaaaggcctcagaacctggggggcaggggtcactggtataagcctgggaatccaaagctcagaagaccgtggcattctggtgattcaagagcaggaaaagatgggtgtcccagttccaaaaaggagagaatttgccttttctctgcctttttctttgatcaagaccctcagcggctttgtggtgcctgctcacaatgggtgacaacagagctttcttacttggtccactgattcaaatgccagttacttccccaaacaccctcacagacacacccagaaataatgctttaccagctcagctgtctgggtatctcttcttccagtcatcacacttaccactgtcaaatcctgtatacaaatgaaattacccttcagaagcgaatgagaaatactttctcagataaacaaaagttgaggaaatttgttaccagtaaaccttccttgtaagaaacactaaaagatattcatcaaaaaacaacaaagtgataatgatgtagattagaaactcagatatacatgaagaaaggaggagcattatagatgaatgaaggtaaaatacagtttttagtttttcttattaattgatctgacagacaactgtttgttctgaagaataacagcaacaaaacttacggtgattatagcttatagataattaaaatgaatgacaccagtgttgtaagggatgagaagaagaaagtgggaatactttgttataaggtacttccactatccatgaatgggaaagtgttatttgagagtgaacttggtttagttgtaaatgcatattgcaaactctaagatagccactgaaaaaaaaattaaaaaaaaaagaacataattgccatgctaagagaagagggaaaatgggacttttaaggcagtgaaagtattcagtatgatactgtaatgttggatacatgtaatgataagttatacatttgtcaaaactcatagaatgtaccacacaaagagccccagtgtaaactatggaacttacttaatagtatatcagtattggctcctcagttgtaacggctgtgccacactaatgcaagatgttaataacagaggaaacaggagggagtggtagtgaaggggtatatggaaactctaattttgatttaatttttctgtaaacttaataaaactgctcagaaaaaaaagttgtaaagtgccaaaacaaaacagtaaagcaccaagtttcccaattctaaataataatgttaatttaatagacctaaattttctggaaattttctggaagggatgctgaccagtttttgaaattcctgttgtaaacataagtaacatttgaatcatttgctcaattttgcatcagtatgactgccgtggtgaagatgcctttacatattttccaatggttttgacttttcctcctagtttttgatatattccagtcaatatgaggaaaataccagtgctggaaacaagagaagtgtcttctacatctgaaaattaaggagttacagctaaaaatgtttcatgtgagaatggagaaaggatgctgacttgccatcacctaacggattggcacactctttttgtgaagggcagtgtagtagtttttggccatgaggtctcagttgctattactcagctctactcttctagtgagaaagcagccttagatgacatggaatcaaatgaatgtggctgtgttctgataaaactttattcacaagaataggtagcagaccacatttctcttgatgactataattttttgactcttatttttatttttattttctgtaagttattggggtacaggtggtatttggttacatgactaagttcttagtggtgacttgtgagattctggtgcacccatcacccaagcagtgtacactgcaccacatcctgtagtcttttattcctcaaccccctccccctcttccccccaagtacccaaagtccattgtatcattctcatgcctttgcatcctcatagcttagatcccacatatcagtgagaacacacgatgtttggttttccattcctgatttacttctcttagaataatagtctccaatctcatccacgtcactgcaaatgctattaattcattcctttttatggctgcatagtattccattgtatatatataccacagtttctttatcagctcattgattgatgggcatttgggttttccacgattttgcaattgtgaattgtgctgctataaacgtatgtgcaagaatcttttttgaatattcagttatttccttctgggtagatacccagtagtgggattgctcgatcaaatggtagttctacttttagttctttaaggaatctccacactgttttccatagcagctgtactagtttgcattcccaccagcagtgtagaagtgttccctgttcaccgcatctacaccaacatgtactggtttttgatttttcgattatggccattcttgtaggagtaagatgctattgcattgtggttttgattggcatttccctgatcattagtgatgctgagcatttttttcatatgtttgttggccatttgtatatcttcttttgagagttgcctattcatgtccttagcccattttttgatgtgattgttttttttcttacagatttgtttgacttcattgtagattctgggtattagtcctttgtcagatgtatagattgtgaagattttctccccctctgtgtgttgtctgtttactctgctgtttcttttgccatgcaaaagctctttagtttagttaggtcccagctatttatctttgtttttactgtctttgcttttgggttcttggcatgaaatccttgcctaagccaatgtctagaaggggttttccaacattatcttctagaatttttatagtttcaggtcttaggtttaagtccttaatccaccttgagttgatttttgtataaggtgagagacgaggatccagttttattctcctacatgtggctagccagttatactagcaccatttgttgaaatgggtgtcctttccccactttatggttttgtttgctttgtcaaggatcagttggctgtaagtatttggctttatttctgggttctctattcttttccactggtctgtgtgtctgtttttataccagtaccacactgttttggtgactatggccttatagtatagtttgaaatcaggtagtgtgatgcctccagatttgttgtttttgcttagtcttgctttggctatgcgggctcttttttggtttcatatgaattttagaattgctttttctaattttgtgtagagtgatggtggtaggattgcatggaatttgtagattgcttttgacagtatggtcattttcacaatattgattctactcatccatgagcatgggatgtgttttcatttttttgtgtcatctacaatttctttcagcagggttttgtagttttctctgtagaggtcctccgaaagacctgtttttggttaggtatattcctaagtattttattttattttatttttgcagctatagtaaaaggggttgagttcttgatttgattctccacttggttgctttcgctatagagaagagctactgatttgtgtacattaatcttgtatctggaaactttgctgaattcttttatcagttctaggagctttctggtggagtccttagagttttcaaggtaaacgataatatcttcagcaaacagtgacagattgacttcctctttaccgatttggatgcctttctttctcttgtctgattgctctggctaggacttgcagtactatgttgaagaggagtggtgagagtgggcatccttgtcttgttcccgttctcagagggaatgctttcaacttttccccattcagtattatgttggctgtgggtttgtcatacatggcttttattacattaaggtatgtctcttgtatgtcagttttgctgagagttttaattataaagggaagttggattttgtcaaatgctttttctgtgtctattgagatgatcatgtgatttttgtttttaattctgtttatgtggtgtatcatatttattgacttgtgtatgttaaactacccctgcatccctggtatgaaactcccttgatcatggtggattatctttttgatatgtcactggattcagttagctagtattttgttaaggattttagcatctatgttcatcaaggatattggtctgtagttttcttttttgttatgtcctttcctggttttgatattagggtgatgctggtttcatagaatgaattagggagggttccttctttatcttgtggaatagtgtcaaaaggattggtaccaattctttgagtgtttggtggaattctgctgtgaatccctctggtcctggacttttctttggtggtaatttcttaattaccatttcaatcttgctgcttgttattggtctgttcggggtgtctatttcttcctgatttaagctaggagggttatatttatccaggaatttatccatctcttctaggtttctaatttatgtgtgtaaaggtgttcatattagccttgagggatcttttgtatttcagtggtgtcagttgtaatatctcctgttgcatttcttagtgcgatcatttggcttttctctcttcttttgttggttaatcgtgctcatggtctgtcaattttatttatcttttcaaagaaccaggatttgtttttttttttgagacaaagtcttgctctgccacccaggctggagtgcagtggtgtgatctcggctcactgcagcctccaccttccaggttcaagcagttctcctgcctcagccttgtagaaccagctttttgtttcatttatcttttgtattttgttggtgttttttcaatttcatttaattctgctctgatcatggttatttccttttttccgctgggtttgggtttgggtttggtttgttcttgtttctctagttccttgaggtgtgaccttagagcatctgtttgtgctctttcagactttttgatacaggtgcttggggctatgaactttcctcatggcaccacctttgctgaatcccagaggttttgataggttgtgtcattattgtcattcagtttgaagaattttttaattcccatcttgattttgtttttgacccaatgctcatttgggagcaggttatttaatttccatgtatttgcatggttttgaaggttctgtttggagttgatttccagttttattttactgtggtctgagagagtgcttgatataatttcaattttcttaaatttattgaggctcattttatggcctgtcatatagtctatcttggagaaagttccatgtgctgttgaatagaatgtatattctgcagttgttggatgaaatgttttgtatatatctgttaagtccatttgttccaaggtatcatttaaatccgttgtttctttgttgactttctgtcttgatgaccagtctagtgctgtcagtggagtattgaagtcccccactattattgtgtttctgtttgtctcattgcttagatctattagtaattgttttataaatttgggagctccagttttagtgcatatatgtttaggattgtgatattttcctgttgaataaggccttttaccattacataatgtccctctttgtctgttttaactgctgttgctttaaagtttgttttgtctgatataagaatagctacccctgctctcttttggtgtccatttgcatgaaatgcctttttccacccctttactttaactttatgtgagtccttatgtgttagctgagtctcctgaaggcagcagattgttggttggtgagttcttatccattctgtggttctgtatcttttaagtggagcatttaggccatttactttcagcgttagcattgaaatgtgaggtaccattgctttcatcatgctctttttggcctgtgtactttttttttgtttgtttttgctttgtaacgtgtatttttgttataggtcctgtgtgatttatgctttaaagaggttctgttttgttgtgtttccaggatttgtttcaagagttagagctccttttagcagttcttgtagtggtggcttggtaatggtgaattctctcagaattggtttgaaaacaactgtatctttccttcatatatgatgcataggttcaatggatacaaaattctttgttgataattggtttgaggaggctgaagatagggcctcaaccccttctagcttatagggtttctgctgagaaatctgctgttaatctgataggttttcctttatagactacctggtgcttctatctcacagctcttagtcttagctctttccttagtctgaactgtgtataacctgatgacagtgtgcctaggtgatgatctttttgcaatgaatttcccaggtgttctttgtgcttcttgtatttggatgtctgggtctctagcagggctggggaagttttccatgattattccccatgttttccaagcttttagaattctcttcttcctcaggaacaccgattattaggtttggtcatttaacataaccccagactccttggaggctttgttcatattttcttattcttttttatttgtcattgttggattggttaatttgtagaccttcgagctctgaatttcttccttctacttgttcatttccattgctgaggctttccagagtattttgcatttctaaaagtgtgtccaaagtttcctgaatttttgattgttttttctttaagctatctatttccttgaatatttctccctttactttttgtattgtttatttgatttccttgcattgggctccgcctttccctgatccctccttgattagcttaataactaacctcctgaatttttttttcaggtaaatcagggattccttcatggtttagatccatagctggtgaactagtgtgattttttcaggggtgttgaagagccttgttttgtcatattaccggggttggttttctggttccttctcatttgggtagccttgtcagagggaaggtctagggctgaaagctgttgttcagattcttttgtcccacaaagtgttcccttgatgtagtgctctccccatcttcctgtggatgtggcttcctgtgagccagactgcaagattgttgtctctcttctgggtctagcacccagcgagtctacccagctctgtgctggtactgggggttgcctgcacagagtcctgtgatgtgaaccatctatggtctctcagccgtgaatgtgaatatcagcgcctgttccagtggaggtggcggagggtgcaatggactccctgagggagggtccttagctttggtggtttaatgctctagtttggtgctagttggccttttgccaggaggtggtgctttccagaaagcatcagctgtagtagtgtggagagggactggcagtgggcggggccctagaactcccaagattatatgtcctttgtcttccactaccaggttgggtagggaaggaccatcgggttgggggggatgggtgggtcttgggggatgggggtggagttctgtacctagggggattatggctgtctctgctgagtcatgcaggttgtcagggaagtgggggaaagtctgcagtcacaggcctcacccagctcccacgcaaaactgaagggccagtctcacaaccaccgtgccccccgtgtcccccccccaacagccctgagtggcaagacggcttgaaaatctgccccaggctacctgcctcccagctgcgaactaaaaaggctgggttctgtccccgcctgtggagtctgcacaccagatttgcgtcctctcccaagttctggccaggaggcttctcagtcccttgaaattgttacaaagttcagttagagatttccttctccctgtggagttgtaccccctgctcctcaggccaccttccagatggatccctgtggtgccaggcaggaatggcctgcaaggggacacagtgagctcccagggcttttctgctgcctctacccctgtgtttcgctcacccctccagattgactcagctccaggtaaagtcggaaacttctcccgcaaacagaccttcagcttctccagtgggagtgtgtgttcgggagaggaagggctccttttcccacttccacagttggggcactcacagtatttggagtgtctcccaggtcctgcaagagcagtttacttccttcagagggtctgagattgctggtttgttcttgcagtctatctggggctaaaattcacaatgcgagccttcgcatgctgctctgtctggacctgtgatctaaaattccatggagggcagttagggaaaacacctaaaaagactcttgggggcgctaatgacagtttgggaaacactgctctagaggattcgtcattagttacaaataagacaaagatgctttctggcaccactgttattcagcagtgttttgaaaattacagcaaacgcaatgtcagttaaataaatgacataaactttgaagagtaaaagccataattacagtacatgaagatagtaagattttctacattagagacataaaaggtcaattgaaaaatgatttcaggagagctcagtgacttgactgacttcaagatactgtatattatgtgaactccctaagaacagaactgaataattcattgacagtcataaaaaatggtttgaataagtgggaggatttaatgtaaatattttaaatatcttggctgggcgcagtggctcacgcctataatcccagcactttgagaggccaaggtgggcagattacctgagatcaggagttcgagaccagcctggccaacatggtgaaacctcgtctttactaaaaatacaaaaattagctgggcatggtggcaggcgcctgtaatcccagctactcgggaggctgaggcaagagaatcgcttgaacctgagaggtagaggtcgcagtgagccgagatcacgccattgcactctagcctgggcgacaaaagcaagacttcgtctaaaaaaaaaaaaatatatatatatatatatatataaaatatatatatatattttaaatatcctgaaattatcttgaaatttatacatttcatacattcatttaaaaatttgtgttgaacaccagttgcatggcaaatactgttctaaatgctgggtgtacagcagtgtatggaacagataagaactcctctaacttacatcattgtggttagagctagacggcaaacaaagaagtctaagtatgtactatatcaggctggtgataattcccatcagaattccaggaagattatttttagactctgacaaaatattttagaattcatctggagcagtatctgtgagagaatgagagaagttctgaaagattgtcctattcgatattgaaatataatacagaaattaaatcactggtacaggttcaagatagggcagtgggagaaaatatagagagggccaggaaacattcaagcaaaaatgagaatttttgtctaaaacaaaattgacatttcaggttagtggagaagtggattgtttagtgaattatgtgtatcagctaggcattcggtactccaaaaaagatttcaactgagtcaaacaactaagtcataaaaacagataacattaaagtaccagaaacaggactttgaaagcatgaccctagaagtagtagagaaaaggtcaataggtttgacatgaaaatactcagtatttcccaagggcaaagaataccaaaaacagtgtgaaaagtcacatgataaactggggaagatatttacagtacatgtaatggacagagggttaatgttcttgctagatatcttaaaatcaagaaaaataaactcagtaaaaagatgcaaagggcataagatggaattcacacacagtgcaagttgaatttttttttttttttttgcctgccagagtgctacaggtaaaacagattgctactacccagtgttgctggtgggctagagtgttcatgtagctttctgcaggccagtctgagaatatttattaggattttaaaagtgcattcattgaccagcacttcacttctgaatttaatgcaaggaaatagttgggtaaatgggcaaaactattttgtacaaaaatattcattgtgttcataatagcaaaaaattggaaatcatccaaatgtcatttgtgttataactccatacactggaaaagtgagcagccatgaagatggtgtagatttgtttcaccagcatggaaaggtgcctgttacatatttaagtgtgaagatgaggttgtaaaatgtatgcctggtatgctatgatttcataagacacgtggaactatatcttcttatatgccgattgatgaagatggaatcagtgtatataccaaagagattaaaagtggttctttatctgagtgatgattttgtcttcattgtgtttagaatactaagaagtttcagcagtggaatgcctactcttcttataaccggagtggaaacggaagcattttgtgagagggctggagggaaggtgagaacgggcgttgggaggcccttccgtggctccaggcctagggctgcggaacccacaacagaacccgcaaccgcaaccgggaacccgagtgcctgcctagctggggggccggagggagggcggggagggcagcgccacggaccccagcggaccggaagggcttgtggcacgcggaatccccctcagaggcccccagctgccttccctgtggcatcatgaagtttcgcgccaagatcaccggcaaaggctgtctagagctgttcattcacgtcagcggcaccgtcgcgaggctagcgaaggtctgcgtgctccgcgtgcgccctgacagcctgtgcttcggccccgcgggttccggcggcctccacgaggccaggctgtggtgcgaggtgcggcagggggccttccagcagtttcgcatggaaggtgtctcggaagatctcgatgagatccacctggagctgacggcggagcacctgtcccgggcggcgagaagcgcagcgggcgcgtcctccctgaagctgcagctgacccacaagcgccgcccctccctcacggtggcggtggagctggtctcgtccctgggccgcgctcgcagcgtggtgcacgatctgcccgtgcgggtgcttcccaggagagtgtggcgggactgcctgccgcccagcctgcgcgcctccgacgcgagcatccgcctgccgcgctggaggacgctgaggagcatcgtggagaggatggcgaacgtgggcagtcacgtgctggtggaagcaaacctcagtggcaggatgaccctgagtatagagacggaggtggtgtccattcaaagttattttaaaaatcttggaaaccctccccagtcggctgtgggtgtgcctgaaaacagagacctggagagcatggtgcaagtgcgggtggacaatcggaagcttctgcagtttttggagggacagcaaatacatcctacgacggccctgtgcaatatttgggacaatactcttcttcagcttgttttggttcaagaatatgtctctcttcagtatttcattcctgccttgtaaaaattcagccagcttagattttttttttaaggttttgatcttttcaaaactaaaacagaccctgagttaattgggttgaaaatttggaccttcactgacttatgcagggcgtatattttgttgagcccttcctcctttgcaaaatttatattaaagcattggtaaaacagttgggtagttcatgttttgtttattgggtttgtcaggtttttttcctgcttaagattctatcaaagttattcttcaactctttttttcgggggggaaaaacagggttgtaatgaaataagtatttttgaatcctgaaacaattgcatcagtattttattataaaatgctgctgtgtaaagcgggaaagttctccttttaaaatatgtatgaatgttttccgagggcatttcttatgtagagagctaaatatatctgcaagataaaaggtatttagcatgtgtgtgcattacatattctttgttaagccgtgttctgtataggatatgtcaaagaatatatcagtgtacatggtttttagatttattatctacatagtttgaattgcttattaggttcatttttcacatgtatcatattcacattagaaatcaaggaaatataggcatgtctcagagatactccaagtttggttccagaccactgcaaaaagcaaatattgcaataaagacagatgagttttttggattttcagtacatataaaagttatgtttgcattatactgtagtctgttgagagtacaatagtactatgtctaaaaaatgtacacatcttaattttaaaatacttcattggtaaaaaatgctgctgctcatctgagccctcagcaagtcataatctttttgctggtgggaggtctttacctccctcttgatagctgctgactgattccagtggtggttgttgaaggctcaggtagctgtggcaatttcttaaaataaagtagttaacttgctggatcgattgactttcatgaaagatttctctttagcatgggatgctttgggtattttatccacagtagaacttctttcaaaacagtcctctcagaccctgccactggtttatcaaccaagtttatacactgtactaaatcttttgttgttgtttcaacagttttcacagcatcttcaggatgctgtgattccatccaggagtagattctatctcaaaaaagtcactttctttgcttatgtataagaagcaactcttcatctgtttgttttatcttaagagtgtagcaattccttaaggctctactttttttttttttttttttttttttttttttttttttgagacagggtcttactctgtcacccagactggaatgcagtggtacaatcatggctcactgcagcttcaaacttctgagctcaaacgatcctcctgccacagcctcccctgtagctgggactacaggctcatgccaccatgcccagctaactttttaatttttcttttgtagagagggagtctcactatgttgaccaggctggttttgaacttctgtcctcaagcaatcctcccgccttagccttccatagtgctgggattacaggcatgagccaccatgcccagcctctacttctaattttagttctcctgctacttccaccatacttgcggtgacatcctccaccaaagtcttgaactccttaaagtcatccgtgctggttggaatcaacttcttttttattcctgttaatgttgatatttttacctcttcccatgaatcatcagtgttcttaatgccatctagaatgatgaatcctttccagaaagttttccattcactttgccaagatccattagagaatcagtatccatggcagctataaacgtacaaaatttatttctgaaataataagacttgcaagatgaaattactccttgatccatgaactgcggaatggatattgtgttagcagtcatgaaaacattcatctccttttgtatcttcaccagaactcttgagtgaccaggtgcattgttaatgaacagtgatattctgaaagaaatcttgttttctgaggattaggtttcaacagtgggcttaaattattcactaaaccagatgctgtaaacagatgtgctgtcatgtaggctctgttgttctattgatagaacacaggcagagtagatttatcataattcttaagggccctaggattttcagaatggtaagtgagcattggcttcaactgaaaattaccagctacattagcccctaacaacagagtcaacctgtccttgaagctttgaagccaggtattgacttctcctctctagctatgaaagtcctagatggcatcttcttccaattgaaggctatttgtcttcaatgaaaatgtgtcgttgagtgtagccaccttcatcagtgatcttataatagctagatcttctggataacttgctgcagcttctgcataagtactcattgcatcaccttgcatttttatgttctggaaatagcttctttccgtaaaccttatgaaccatcctctaactacagccttttcttctgcagcttcctcacttctctaagccttcatagcattgaagagagttagggctttacactgggttaggttttggcttaagggaatgttgtggctggtttatcttcaatctagatcactcacactttctccatatcagcaataaagctgttttagtttgttatcattcgtgtgttcactagagtagcaattttaatttccatcaataatttttcctttgcattcacagcttggccaattgtttgccacaagaaggcctggctttagactgtcaggtcattagacatggcttccttactaagcttaattatttctagcttttgatttacagtgagagacttgaaactcttgctttcacttgagcacttagaggccgttgtaggattatgaattggcctactttcaatattgtcgcatctcagggaatagggaggcttgaggagagggagagagaatgctggttggtggaacagtcacacacacatttatcaattaagttccctgtctcatatgagcatggtttgtggtgccccggaacagttacaatagtatcatcaaagaacactcatcacagatcaccatgacagatgtaatgataatgaataagtttgagataatgcaagaattaccaaaatgtgacacagagacatggagtgagcacatgcttttagaagaatggcactgataggcttgcttgatgcagggttgtcacaaaccttcaatttgtaaaaagtgcagtatctgagtagtacagtaaagtgaagcacaataaaaggaggtaaactgtagtcaagttcatgttaaccaaaatgttgctttaagggtaatttttggataaatcaggtttccattcatcctcttcccttccccacccccagccccgccagtattccagtactttacttagaaaataattcttaatgtttcattgttttgagaaaaacgaagagaggttataaaaggatggtatagtgatgaacagtctcagggagaggagtagcttatattcttttatattaaattttagtttagtttttttggtggcttatgcagtaagataagccattaacttggcaacctttatgtttacatagtaaattcccatgactacatttttatcagtaatgaagagtttcctactagatttggtgataaaacacttaaacttgttaatttattttgttttggtgatttctaaattccacctgtggtagtgtggaaagaacacacaaacattggacccaggcgagtcgcttgaaccctctggcttactaagatgtgtttccgttgggctagattctgatttaatgctattaaagttataacatgggaagtttaaacagttgttttcaaaagtatttctgaagtagtctttaaaaattattaataaccactttggaggtatagtgtatgctctttgaaactatttacttcatatcttctgagttacgtacaaaaatatgtgaattattttgtttggtgagtattttcagagctgtttgtgaagttttttttttttttttgagatggaatctcactctgtcgcccaggctggagtgcagtggcgtaatcttggctcactgcaaccttcgcctcccgggttcaagcgattctcctgcctcagtctcctgagtagctgggattacaggcgcgcaccaccgcacccggctagtttttgtatttttagtagaggtggggtttcactatgttcatcagactggtctcgaattcctgaccttatgatctgcccgcctcggcctcccaaagtgctggggttacaggcgtgagccactgtgcccggcctgtgaagatttttaatcaagccattttttggttcatttaaaaaatcttctgccctcatgagcacttctgtagactttattttttatttttttattatttatttatttatttatttatttttctgagacggagtcttgctctgttgcccaggttggagtgcagtggcacaatcttggcttaccctaacctcggcctccgggttcaagtgattctcatacctcagcttcccgagtagctgggattacaggtgcccaccatcacacccagataatttttgtatttttattagagatggggtttcaccatgttggccaggctggtttcaaactcctgacctcaagttatctgcccgcctcagcctcccaaagtgttgggattacaagcatcagccactacacctggccttttgtagactttaaatgcaagataaaaatggagaacacggccgggcgcggtggctcacgcctgtaatcccagcactttgggaggccgaggcaggaggatcacaaggtcaggagatcaagaccatcctggctaacatagtgaaaccccgtctctattaaaaatacaaaaaaaaattagctgggcatggtggcgggcgcctgtagtctcagctatttgggaggctgaggcaggagaatggcgtgaacctgcgaggcagagcttgcagtgagccgagatcacacgctactgccctccagcctgggcaacagagcgagattctgcctcaaaaaaaaaaaaaaagaacacatgccttactacagtgaggaagttataagatctgcaggttttgattttgacataacaaattgcttatcgtgtttgtttcaggcatctcttccaaattttttcctttttagaaaaattaaatgaaaattttcaagctataataaaagatattttttactagtttcatactctctcctcttctttcctccagttgtctgtctctagttctgttgctttgtcttgatgtacttaataataccaacagaaatgaaaaatctaatagtttgttttagaacataaataattttacagtttagtctttcatgaattattatggtttacttttaataattcattaacagggagtatctatcaaaagttttatagcctagttttgtaatgtagcttttgaaaatggaaaagataatttattcttctacttaggttattccctaatctgcagagatacgttgcctataatattaaacatcaatagaccatctaaatataatgttttaactaatattgtgtaattatacagtaaaaacgttttacaatacagaaattttaaaatgaatagcaagctattattaaagtttttagtttaattgtgaaaaactagagagtgcccgtttctatagtcatgcattagttgctgaatttaaaagctttgtaaaggactctcctaggaacaagagctcagagatgccttagagctgatctcatccaatcatcttgtttatagataagaaacgtttcacagtgcgtaaaagtgaacaagcgtttttatttcctaatgccagaactcagtttagaacccagtctccagactgttcataaatgtttcaatagacttacagcttggatatacttttgttcattacaataaatctagagtaccatatgattgttttacttaatctataaagataaaatttaaatttaaaaaatctcaaaccttttggaggggcattgtcattttgtccttgtttgaagatgtcctttgctcttgcaggcaggaaggaatttatttgccacacaaaatgataattcaatgaaaataaagtcttacattaaaaaaagtcaaagtctcaagtttacaaattatttaagcatcttccattgtttctcatagggagactactgagaagcaagaaaacactatgccttttatgtttcactgtatctgtagaaaataaatcattggaaaatgtattaaagtgctttcttatatccagaatttattgtcccactagataccatttgctgaaagctaaactggcttattcatatgacagacttgtactttttaaacattttactgctaaaaagaaattactcttgcgtgtatatttattcagtgaataggttgccattatcaaaagaaatcagacaagtgtctctttccacggttaatttccataaggaccctcctagttctggttatccccattcgggtccaggcatttgagaaatacttggtgaattaacatgagtctggaaacacatcagaattatgatttttttttaagcaaaccagtaattctctttggtaatggatagtacgtaagtgtgtagtgtggttcttaggctaggagccagtaagtaataatttgtagcccatcttatatacctgtgtatatatgtgaagttcccagtaagtactcccattcccccaacgtttattatttgcccatttgcattatttagtactttgtatattattagttttcttgtaccagaatctgacctaataaaagttcctgattctcatctgtattaactttccttacatgagtaataatagctgttatacctctttatccctatgctttccaaagataaaattagtttgtggccgggcacagtggtgcgggcctgtagttccagctactctggaggctgaggaaggaggatcactggaagccagaaattggaggcagtaatgcaccctgatcgcacctgtgaatttccacggccctccagcatgggaaacacaacgaggctccgtctcttacaaagaaaagagttagggcccagtgcagtggctcatgcctgtaatcccagcacgttgggaggcggaagcgggcagattgcttgagcctaggagttcaagagcaagaccctgtctctattaaaaaaaaaatataacaaaaattaggcaggcatggtggtgcatgcctgtggtcccagctacttgtaaggctgaggtggaaggattgcttgagcccaggagttcgaggctgcagtgagccgtggtcacgctactgctctccagcctggttgacagagtgataccttgtctcaaaaaaaaaaaaaaaaaaaaaaagagtttttaaaagtttgtggtatgtgcttttaggataggcttattcactttattccttagtgctttcttaattgtcttaaatggctatgaagttaaaagactatatattgctttagttaaacaaatgaggtttatgacaggcaaagtcagacttttgttgacctccgtttagtgtatttatataagaaagagcttatgacacatttttgatgtcattgttttatggcaattggaatatttgtgaggaaaatttgtagacaatgacaactgtagactagagcgttcctttaaactcaagggagtctggcatggatcgtcaaactgaaaatgttcagaagctgaattctgtttccttaaagccttagactctttcctgagagtgataagaaattatttcttttattagagattttaaacataagagcattacttattgataagaacatatcaacaaacataagaacatactatcttgtagtatgtttttaactgaaggcaggttgagaagagacatctcttcctatagttcattcacaaattactgagtgtatattatgtcgcaggcactgttggatgtgctacggatactgcagtgtgaaaagcagatatgttcttatatttgtaaattaaatgacaggtcttcctggcataatggtctgttctggtttggatatatgtaggtaattcttcatggtaaggaaatacgattgttgcaaatgaaccagtgtaatgcctgttggcttttcagttgtctgctttgtgcgtctggaagacacctgcctgtactcttcagtcataaataagaaagtagatcagactttttgattcatggctatccatggtggcccagacattaccttttatgaccagacattacttttagttggacagattttgagggtaacatagttaagattaagagccctgtgtaaatgacctcaaaatggatttgaaatagtgggagtaaattggaattgccctgtcctagttttttagttttgcgttctttgagaccagaggtattctaattgcagttatgtttcacaccagagtgagccagagccccagtcactggagacacaatgaaggttattagaatgtgagcggtcacattcacaaatgacctcacaggacatatggtggtacagaaggaagaggatactagactcttacagatccggtcaccaggaatctggtctgtttgacaactcatcaggtgtgtgctcttgaaaaagacactcagcatctctaggttacagtgtcttcaggtgaagagactagataccagttgtgtcagctctcctttggctctgattctgtgaaataccacccctgctgataatcaaaaccgctgaggatctctgacagtctgatgtttgtactaatcatcttttcagtaacattaatgtcaacggtaattattttcattaagttttaatactactgtttttctggaaacaaggagagcagcatatttctacttaaaaatttggttctttatgtgatctagaccagaatctgaaagtactcacttttaaccacatgcttatttaatttgtgctgtaatactgaggacataccttaatagtgtcaagaaaataattgaatcaccactcagtggagcctaattttccatgccaattgaagaaagtattttcctctcacaaattggtttgtaagcattaattaatgtggtgggttaattatccacatttttcttaatatttgctctccctgcagtgttttggtatctttggagcaacatgatgtctgtttattgaagcagttgttgaagaactttgtgttgaaatatgcctttgctgtcctataatttttattaatatgctaccatactaaatctcatgtttatcagtttataatagttttctagcacattgtcaaaacaagctttccacacttttgtctgcgtttagaagcatgtttaaagaggtagcaatagtgtattccagtaaaataataattctgaaacatacaattttatataaacgtaactattaaattacctagtatctttatgtaatatcagtttattcattgcttatttgtgcattttgctgatgtcaaatgtgaaaataaatatctttcaattttcaggaacaatgagcctaatatgttgtgtagcttagcaggctaatgttaatgggatgtgtttgtgtttaatttcaaaatattaccaaagcattatatttgataactttttattttgctataacttcaaacttacagaaaactttccagaatagtaaaagtaactcctataaaccccttacttacttccttcattttggtgactagtaactccaggaagccctttaaccacgcccaccagttgtttcctttttccccaatttctgtatcattctgtccatctgtctgtctatgtttttgtgaaccatttgaaagtgggatgaggcatcattccttgactcctaaatacttcagtatgtagttattaagaataaggacattctcttatattataatacagttaccaaaatcaggaaataaaatattggtaccatactgtctaatccaaagttgaaacagacaaacatgaggagcctttcttgatatgaatcactgagaaggatctgtgaagtccctgtgaaagatacataacccaaatcaaatcaacagggatgatcagacagagccaaattgataggcattccataaaataacctgtactctttgaaaatgtcaaggtcaagaaaatactaatttttggttctcagattgtctggtttggacagtgggcactgcttcagtctggctctgtggccttttgacatacacttccttagtggtacagcagaatctttcaggcttaccttgtccttgccctgcctcagccctgcatcagccatttctccaaggtcactggttcctttcattgaaaaatggtatttgggagttagatatgctcatcgctactgttgtattattgcttctagcctctctcaatgtacaaagctagaaaatacacacttgcacacacacataaatctaccagtacacttctttgtcacataccatattaaaaactgagttcatatatctgcctttatgaagagtctcctcaaatcttttgctcaaaaaaaaaagggttgcttcctttgttatcagattgcaaaagttctttatgtgttgtttgtataaagtcctttgtcatttgtatctattgtgaatatttccttctaggcagtagttgcctatttattttctcttgataagcagaagattttaatttggatgaagtcagaaaatttagtgtttttcattgtacttgtgtttgtcatattgaacacaagtctttacctacgcccaggtaatggagataatctcctatgttatcttctttatagtttataattttagtttttatgtttatgagccattttgaaataatttttgtaagtgatgtgaggttgcagttaacattcctttttttttttttatgtagctatccagttttttcaacaccattaaaatatttttcccattgaattactttggtgccttgtcaaaactcatataatcatatgtgtttgtttctggattctagtctatttcattcgtccattagtttatcctaatgtcaacaacactgtcttgattactgtagatttctaataagtcttgaagtcatgaactgtgttacaacttttttcttcctcctaagattggtttggctcttgctagatcttcgaatatctactggaattttagaatgaccttgacaatatctctatataagcttgcatgaatttataatcagtttggggagaattgatactttaacaacattgagtcttctgatccatggtcatgatatagatcttcacttatttaggtctttgttttgtctctgcagtatattgtagtttttaatgtagaagtcttgtacatttcttttattaagtgtatttttaggtatttggttttataatggcattttcaaaatttaaaaaattttattttctaatcatttcctactaaaatatgtaaataactgatttttatatattgaccatgaatactaagtctttgctaaattcggctattagtgctattagttgcttagtagatttcttaggattttttatataagcaatcatgtcatctgcaaatagatgtttacttcttcctttgccatctttctgctttttatttctttaattcgccctattgcactgctagaacttctagaacagtgttgaataggcaaggaaagagaggtatcttttctatgttactgttcgaaaggggggaaagcattctgtatttcaccattaagtaggatgttaggtgatcctccccactcaaatagttctttattagattgaggagatgctctgtagtcttagtttgttgagagtttttaatcatgaatagtttttaatcatgagttttatcaaaggcttctttgacatctatttagggtaacatacggtttttcctttacttttaatatggtaattcacagtgattgatgtctgaaaaactggccttgcttggttggaataaaccctacttgatcatgatgtattcctcttttgctttttgaaataattcatataggcttgatatttcttcttccttaaatgttttatggaatccatctgtgaaggcatctaggtttgagttttctttgtaggaaagttttgataatgaatttaatttatttaatctttatgaagatattgagattttctatttcatcttgtttagtttgggtaacttgtctttcaaggaattcatttcatctaagttgtaaaatttatcagcataaagctgttcattgtctttattgctatttaaatgtctttagtatctatggttattccctctttcattactgaaattgataatttttgtttcatttctagagagtttttttgaaacatcaattcattaattgttggtgaagaacttttggctttaatttttttcaaattctttttacttatgttattggtttccactgtttatttttttcctatttctgtcattctgcttccttttcctgccctccttcccctttactttgagtttatttagcccttatttttctagttttttttttaaaaggtggaaacatagattcttaattttaaatattttttctctaagattttaagttactgctttggtggcattccacaaattttgataaatgtttcttatcattcatttcaaaatattttgtttccctcttaatttctactttgaatgttgggttatttagaagtgtattaatttccaaatacctggatacttttctggatattgtgtttctattgctaacgaagattcctttgtaatcttcggaatttcggtctttggaattgcctgtgacttactttatggcccagcatatcgtctatcttggtgaacattccatgagcacctgaaaaggagttttataaatgtcaggtcaggatgaccaacagtgctgttcatatcttctatgttttttgtttgttttttaatatctagttattaatattgaaagggaatattaaaacctcaaactatgattgtgtatttatctctccctatcaatcagtttttgtttaatgggttttgaagctcttgtattaggtgtatacagttttgattgttatgtctttctgatgaatttgtcctttcatcattataaactctcctaccaaattgctttgtggtatcacttccccttcagattgaagaacttctttcagcatttcttgtcatacagatttgtttgcaatgaacttttttttttttacttgaaaaatgccttttacaactttaatttcagactttttttcttccagtactttaaagaactatatatctttagataaatctatttctataactatattgatctataatcatgttcactgactgtttcttcaaatatcttctacctactgtgcagcctaatcagtgtatttttcatttcagacagtatacctttcagttctagaattcgcattgcatttctttttaaaaaataattttataattttaattcctctatgtagaacaaccatctgtttattcattatgattacatatattttaataacatttgttatagactcttttaagttcttatctactaattcttctgtctggttcatcttggggtccatttcggttatctgcttatttgcttataaagagataggaaaaaatccaagtgtttttcctactttctatgttcacacagccactaactcagtacacactcctgataccaggtgtgtgtgaagttttccccacacaccaagcaagcagctctccagcggacaccagctagatgtcctctaattcagttcagtcctgacatgagcatgtcagatcccacagcttgagaagtggggatataaaattgattaaagatgtgttttcaaagaagaaacaaataaaatatctaaaatttaacacagtgaatattaacattatgtagtagaagtttaatagaaggagggatcagggagactaaaataacatttgagcatgacttgaaatattggtaaagatttaataaacttggaaatttctctttggtgcaaagaggttgaattacatgaatacaagcatgtggcaggttcgtaagaggtgaatgggctcatgtggggaatgtcagaggagaggagtggtggagatgaagtaggcagtgtggacgggtctagctgtgacaggctttgaacgggatgtggaggaggttgtgggctgtgcagaccacaaaacagtggatttcatagaagattattttaaaggtagggataatattgattagctccatattttagagaactaactggcatttgctgagggtggattgcagtggagagaaaatggggcagagttaccagttatacgtctgttgcagcattgaggggagaagacgaaggtcttaagtgggagagcaacaggaggaaacagtaggattgagaggaatagttgatttttgattcagacaaaagatactgattatttgattcagggggtgccagagggaaggagaggaactcaaggtaaccttgagttgtctcattgggtttattggatgaatgataatgtttttctggacttccttttttgttgttttgccattttatttgtattaaataagttacgtaggcatgattgattaagtcgtgttggactgaacctaatctgcagccccgcctctccacaggaggttggtttgctggtgctttgctcaaaaccctaaccctctaatcccatggtctttctggaatggccagtcctgctgttgagtcatcttggcctatactagggcgtggtttgagaggatcatgaataacaaagaccctcctattgccggaaaacaccaaggatttaagactcgctcccagaaaccagggacagaggtcaaatactctattatacaacataccccagactcattccactctctcctgccatccactgcaacatttccagattcttctaatctgccatttcttggtggtccgttttagacattagctgtcagcctcccattatgtgagagaaaagatggtcactccctggtttacctgtcttgcctgcccccaaacacacatccgccttttgtgccttatttcaattttgtttaaaccggtggtcagttactacattattatgactgtataagtcatgtgtctttggacctttttgaaaatttcaagagcttttattcttggattcatttattttcatggcatctagttcttttaggggtaaaaaatttctctcgatattaatttggtatcaaactttagaatgatttcgaagtttttttttttctgtacctgctgttagtagtttggtagggctgttataacaaagtatactagaccgagtggcttaaacaacatacatttattttctcacccttttggaagctagaagtctgagatgagggagtcagtggggttggtttcttttgagggccgtgaggaatgatctgttttaggcctctctccttggcttgtagacagcgtcttctcatgagtcttcgtatgtccttccctctgtgtgtgtctctgtccaaattcttccaataaggacaccagtcatactggattaggacccacccatgtgacctcgtttcacctttattacctctttaaaggccccctttctgaatacagccacattctggggtactggggctgggtttaacatatgaaatttggcagtggcggagtgaggtgggtgggcataattcaggccatacaacacctgcaatatgtttgttctgtgtttttttcttgtttgtctttcttccatctctgtcttacatatctttcctcattccctttggctgtccaatgttgggggtcagaaaacgataccctaaaatatggtgctttgacattctgcgctaaggaagcagcctcaagctctccccgcaccccttctgtctctcccaaagcacagaatgaggctgtttatctgaagttcccttacctacggagaaactagaccaaccaaagaagaacacatttgccttcagtttcctccctgaaatttcattaatcagagaagattaaaactcatatcatagaaaaagagactgaaaatcaaacactacacctggagcccagatgggctttgtccaaactgttgtctgttctcaggtcccatttaattctcagaattatttattaactaccatctgagcattgggcccattcattccccctaaaaattatttactacccctccaaatggccacatttcgcctatcctccctttccctttgaagaagggtctgtaagcatctggacctcaccggtttgttgggtaaccatgctcctgcgagtccatgcacattaaagaaatgtgtctgccctttgctcctgttaaccagcctcattcatctccagcgaccctttagagggcagaggggaagctttcactcatggcctgtacgcctcccacatcttagagtgagactattaaccgctgatttgattgagtttgtgtgtgggcagtttacagtgagtggctgtacaggtgatgggcggacaagcaagcggcccttccctttttgcagggaagacactcaggtgtcaggatctttgggtcttattttcctaggactcttcagtttctgcggggaataatgcttcagttgtgtggacagggtgggattggcaggaggggcttgcacacctgctcacagtggcaagggcaggaggggcttgcacacctgctcacagtggcaagggcaggaggggcttgcacacctgctcacagtggcaagggcaggaggggcttgcacacctgctcacagtggcaagggcaggaggggcttgcacacctgctcacagtggcaagggcaggaggggcttgcacacctgctcacagtggcaagggcaggaggggcttgcacacctgctcacagtggcaagggcaggagaagggaggcagcctgagtcccacggctttgctgcacaggtttaccccaaatccctggtcagcctgcccccaagtttcccacacctctgctgtgctgggggtctctgagtcctggtgctcttgcttggtttcttaaaagactaaacttctcttctccagactgtgaaggatggaggcaggggccagggaatctaactttttagtccataaagatacaggtcaccagcaagtctcactgttctgctctgagcctcaccccaccttctggggcatctgaagccctgagcacttgagttctcgggtttattagtaaaattttattatttttattattatttgagatagagtctcactctgtcacccaggctagagtgcagtggcgcaatctcggctcactgcaacctccgcctcctgggttcaagcagttctcttgcctcagcctcctgagtagctgggattacaggcgtgcaccaccacgtcggctaatttttgtatttttagtaaagacggggtttcaccacgttggtcaggctggtctcaaactcctgactcgtgatccgcccgcctcggcctccgacagtgctgggattacaggcatgagccaccgcacccggcaaacttttattatttattgcttgcctcctgtatgccaggtactgggctttccaaggattatcctgtatgttctttacaataaccttatgaaatgttttctgtttctagctccactttacatacaagaagagggagatttagaacagatttagtaaatgggagcagcagtacttgaacacaagtctacctggtctcagaaactacacttttccctcctctgttatactcacaacagctagcaaattcatgcttctgcctgtatctacgttctaggttttgtagaaatgtcagtatattgcattgatttgagcatattaaaaaagagttgctatactatataaacacaaaagtaaactgaaattcagtacacctgtgggaatgtaagtgtgtttttatttttatgagtatagttaatcagaatatctcctttaaacagccctgggggtagaacagtagaacagttcctagtatcaatttagggttcagcagaggtagtcatggagctacgtggtgacattagtttctctctgcccttgtgctgaaagtttttagaacccagggcttagcattctgttattcttatgtctttcttgcaatactaaccagagtgtccttagtaacttaatgttcagtagatgttggctgattggctaaatgacccctaaaaaattcaaaactctgtgtttaagaatactttttatattttggtactgactgtctagcattcttatattttcagccaatgcttgtctcagttggtactaatccttttttctttctcttttaacagattacttctctaacaggatcaccagtttgctccacaaagcacaatgtctcgatcacgacaacccccccttgtgaccggcatctctccaaatgaagggataccatggacgaaggtcacaatcaggggagaaaatctggggactggccccaccgacctcataggtaagggcagaggccctgcgacgcaccctgctaatcggatttttatgtggacaagggagacaagatatgtaattttcaaacagtgaaggtgatagaacaaacatctttgtgatctctacagaatgctccaaaaagacgaaagaattatctggctttctgagttttgtgtgaaaatcattattttgtcaaatcttgccttatattgtctttcaaatccttcagaaggtttcccagggctgagatttgcctctgaattttctgaagctttgatgtcttgattgtcaaaagagctgcttttatagttttgctctcattagttttccttcccttgtctgacttgtctgttgcttctcaggggctctgtgaattacaccttttctgttccttattgctcttcaaagcaagtctcagccccatctcctggtgacacgggcagcagttggctctgtcttcactccacctggcgggcatgtgtcctcatcgtgatctgtggatcctatctggagcgagccaaagtttagtttttaggggcagtttatgttttttatcttttctagcggagtttaagctcaaggtcatgaatggttaggacaccacacctccagctggtgtggtataaatatttctggatgttggcttgcatggtagccttcctccttccatgatgtggcggcctttactgatggcctgttcttgaagctctcaggtctgcgagtgcttctcagccctggcttttctgaatctctctagaactttaaacgtaaatcatttggcctactaagtttcagtctctaaagatggagcctaaacattatttttaaaaatatacacgggtattagggacagccagggtagagagttttaagtataattttatggccagttacgattacttgcctgtgaactgctcaggtgggtatacagatgcattcagaatgaggaagggaaaggcccctctctgtgctactgaatgaatattctggcttcccatttacatttcttctggactcagacattctcttgactcatttctgcactgatgacggagctgttactaaggttctgaaatcacgaattggaacttgcttttcctgcattatgactgctggttgatagattggtttttggccatccagaaaactctttaaaaagaaaaagtgaacgggagctcagcactgtgtttagtgactgagttttgcactgcctagccaattctttttgctagtgttatgtctcatttgatattgttttctctaactgtgaccggcatctctccaaatgaagggataccatggacaaaggttacagtcgggagaaaacctgggtagtttttgattgtttagtaaacatcacttcaatttattcctgcaaaagtagtcttacctaatcctatgccttggtttttgataaagctcattccagacgtttctttacctaagtgtaaaaatccccagaatgcatagaaatctactcacacaggtgggggttccgtccagaattttcgctggcagtcattgtgcattcccaaacatgacaatagtctaggtaaattttaatcttgtttgagcttcaggcaatgctattcttacttgactaagcgtgtattacttttctttttgttgctgttgttttttgttttgagacggagtctcgctctgttgccaggctagagtgcagtggcgtgatcttggctgactgcaacctccgcctcctgggttcaagcgattctcctgcctcagcctccccagtagctgggactacaggcgcatgtgccgccatacccagctaatttttgtatttttagtagagatggggttttaccatattggccaggatggtcacaatctcttgacctcgtgatccgcctgcctcggtctcccaaagtgctggcattacaggcgtgcgccgccttgcctggcctgtgtattacttttctaaaccatgctagttcagctttcaacctgccttatatattgccaagaaaccattttttaaaaaagcaaacttaacctgctaaataatttaagtgtttttaactcagatgatatctacactagccaagcaaagcactataaaaagtactttacttggaattctatgagttacttttttttttctaaaaggtgctattttatttcatgaagcagatttcttagcgtagcttagcaaacgtgcttaagaaatcaagaaataggtcttaacgatcttttttcttttcataacatttaaaatgatctacttgaatctgtgtttgaattatttgctgattattcatttttttggagtaaaaatgcacaaaagatattaaatcagaggaatcgtgaaagcagctgagacccaatgaataagctattgttctaggggcacttttgtgccaacgtggacctccatgcatatcattcaggtttgctcatgtgaacatgttttaatactttatatctgaaatttgctcttattcctcagttttaaaaataaggtagttctctagcaaggaaatttcattagggatgacttttttcctttaatgaagatactatttgtatttttacattgctacctgacgttaattgttgggttattcttcattctgaagtgggttaatatttaaaatcacaaaaatctgatattaaaatacttaaaaatattaagttgtctgttgacctggagtgataccaaaatatctactgtcaataattaagcaggttatacattgaaacagttgtttaaaaaacatatagactggtttttatatgcacagaatcacttgagcaagtgaacattgacatgttagcagtatttctctcgcgaggtggagtttggagaggctttcaatctcttaagttatttaagtttttcataacaaaaattattagaaaaaatatcaaagacatgcccattttgaaaaaaataattttgaataatgaatatatttaaaaatgtgttattataattaaaatataccaatagaaaccatagtcccgaggaaaccttttaatgccattattagaaaaacaaagttgcagacattagtgaattataggtattttagagaaacccctaaaattcattatttcaagcaatgtatctttaaagcatagttgcttttattcctttatggtttaacattcttactaaatagttctttaagttggaacaaaagatgatttgactttgtgcctccattttaaagtcagatttggcattaggtgatatatttctggtatctgaaaaaaagccgaaagaaaacattgccattgctaaaccttagtgctgaacattatagaaagttaaataatgagaaaaagtgtgaagtgtctgccgggcatggtggctcacacctgtaatcctagcactttgggaggccaaggcaggtggatcacttgaggccaggagttcgagaccagcctgaccagcatgacgaaactgtgtctctaaaaaaaatacaaaaacaaaacaacaacaaaaaaactagccgagcgtggtggtgctcaccggtagtcccagctgcttgggaggctgaggctggagaattgcttgagcgtgggagatggaggttgcattgagccaagatcacgccactgcattccagcctgggcaacagagcaagaccctgtctcaaaaaaaaaagaaaacgtcaagtgtctgtgtctgtgccacatacattctggtttcttttctccataaatattaattacattggtctctgttttgtggaaatggaaaatctaaaggaagtaagttggaaggctagctgaccagtgtggtgccatgctggtattccccctgaggtgtgtgccttactcactgcatctttcagtgcctctctgtttggttattacctaaattttgttttacatggtatgagggaggtgacatcatgagttgaccttctgggagtgtaggtttactgtaagagcagaatgtagtgtagtgacagtttcattaggaaagcactagggcaggaggaactactatgccagcagctgacacaccgatgtaaaagtgagatggtaatccagtaatgcctgagcacacttcactagattacctgactcttggttatgcttaaataaaaaacctactttagttcattctgtaatgccatgtataagtgaacactagaaaaagcacgtgaagatttgtctcaggaagatgggtgaatgtagaatgtttttagaaaatgatacatacgtttattaatacactttaaaattctatgttaataactgagacttcaaataatagcagtagtttcccttttattacctctgaaagcattttaagattctcgtaatctaagtaatctggaattcctgcaacatagttgttgtggtgttcgttttctaattctacggatgtttgaagaaactcaaatgtagcctaaaagaagtcttaaatattggagaaaaaaacaggtaagaggaaaagtcaatagagataacagtatatctgcaaataatattgggtatattcaataatgtcattattgaacaagactagatttaaaaaatgtaatctacacgattaaggtcttattgttcttgtctttgaattttgttatgcacatgcgtttattttcaggcttgaccatttgtggacataattgcctcctgacggcagaatggatgtctgcaagtaaaatagtatgtcgagtgggacaagccaaaaatgacaaaggagacattattgtcaccactaagtcaggtggcagaggaacctcaacagtctctttcaagctactcaaacctgagaaaataggtaaagtctttcatgggtttattctaaagaagaaagtaaaaatgagtttgtcttttaagctgtaaagctggtagattcgtgtaaaacctacctacttgcatatctcaacttagatttagtttatgtttattttgacaggattgggatgttggttaatatttgtgttactttcgggaaggcagtgtgctgaggtaacagtcagtgaagcctaaggatgacggtcgtatgagaactactcttctcagttcttaaaatctgttcgttcacttgatataccagttttggttccttgatcttgaatataatgacattgctttaaactcttaaacaaggtttgaggtgaaaaatcctgatttggccaaattagtaataatatatctaaataatattcccttttccttcattttatccatccttcaaggcccagatgatacatttcctagcttggctgcttttaacgcccctgttagtaatactcactcttctttgaaccacatagcactttgttttccttctttatgcgctgaccacttgctgccttccgttagcagtgttaggaacttgctgccttacgttagcagcgttaggaacttggtctgagaagtcatgctctttgaattctaacctggactctcttaccatgactgagtatgtaactttaataccttctttatccatgagcaaaagtggaatatattggctacctcataggattgggtgagttagaacataaatgtaaagtgcttagcatagtcccttacccagcaaattaataatttctgatgatctttcttgtagctatttctgtgcatgtctctttccctttttagaataagagtaatgtcagattcatctttgtggtcctgtaatgtcttgcacctggtcagcatttgataaatatttgtataatgtaggaatatcagaggcgtaattaaacccagccagtacttctctttataaagaaaataaataattttgcaaattgtttttttaatcttagagcatagaggctttctgcagcattgttctccacaaattcctagattatttttataaataaaaattcaaggaatttcagggaaaattcagagtggactttatatatgtacatgtacgtgcatgtgtacatatatacatatataacatttctatttttgtttactctttttatttagtgtcttcaaaaactaaactgaaactaaagcaggaacttgttgtacagttttctagagggacttaaacattttgataaaaatctaatatcttatgatctatttatatagcagataaagaaaacttaggcaaaagtggtaattttattattctggaatactcattccaggacctagcacatagtaggcttagtaaaggtttctttttttttttctttttgttttgagacagagtcttgctctgtcgcccatgctggagtgcaatggcgcgatctcaatcttggcttactgcaacctccgcctcccaggttcaagcaattctcctgcctcagcctctgcagtagccgggattacaggtgcgtgccaccatgcccagctaatttttgtatttttagtagagatggggtttcaccatgttggtcaggctggtctcgaactccggaccttgtgattcgcccacctcggcctcccaaagtgctgggattacaggtgtgagctactgcacccggccagtaaagctttcttgaactgaactcaagagtgcctggacttgagcagaagcccctgttgcatgctggcagaaccacgagtgctgagagaatgagtgggttcatagagggccttgcagctacaggttgcctggtattcagacagccttctcccatgaagccttctgatcctcgcctggggaggcaggcacgctttgtctgtgctccctggcacttggctctttttctgttgcagcccagggccttggaggcctagctggtaagccctgtgctaggttgaatgataacggagttcagtcccataaaggaagatgctgtttttagagcttatgttgtcttgttcacagggtccacacccagtcagttttccctgaataacctggttatttccattatacaagccatgcgttccttgaaaggtgtttgatttaatcgttagatattttattgaatttaccaaattgatttcagcctaatacggaaaaaaatccctgctgtttctaccatctaggacatttccagcactgataacagcaaaaagaatgagaaatagcaagtagcatattatttttgcataactattcatgaaaacatgccagagtttgtagaggaaaagaaaataaaagatatttcttgagagctttcaagaaccatttaaaaaacatttggttttcatttgtagtgaaatgtccttaggtagcttatggaacccagaagcagaaactcacagtattaaatataaaatcatatatgcataatggtttttcggcatttatcataaaccagaagctttccactgagctaacattttactcgaatgttttgtgcttggatatttcccagacattttccaagagtttacatgatttcagaatattctcttgaataaacagatattataggtcatattatttcatcttactgactttctgaattttttgtgcagatttaatcagctacatttaacaatgtttaattgtagtgtttattatttgtaaaatatgtttgttattgcaaaactttgtctaagcagcttaatttgtcttctctgttgagtaatgtacaatgaaaccataagctgagaggtgtaatttttgcctttttataaatttttttagtgcttataattaaactactagtcattttttaaaaatttagctgttatgtcctcaaatctcttaaagattatccaacaggcattttgtattaggtctttaagaagtcagacaataggccagacgtagaaggtgcctggggtaggcttcatcttattaagcatatgctcctcatttctgtaggcattttggatcagtctgctgtgtgggttgatgaaatgaattattatgatatgcgcactgacaggaacaaaggaattccgcccttgtccttacgtcctgctaacccgcttggcattgagattgaaaagtgagtaccatcttgctttcagtcttctttatttttcagttcctgaaaagttttatatacttacaggaaagggactcaaactccagaaacatcccaggaaacacagttgaagacacctcagttgtttggagatgggtgttatttatgaagccttgttagctatgctgcaagtaaactttgcagttagttaaaacttgtggctaaaactacttttacctcttcagttttttgattttgcattttgtgaaaaagaaaagtctttagtatgttgtctagagatggttaagtttaaataggtagatggcacctgaagtcaaaatagcatacataatctgtttttttgatttttctagaagtattttagaatagccaggtctaatctggtctttaattttgtctataatgtctactcattcttgcttaatccagacttatttaactttaatcatcagaattctgccaggtaaatgatatctttcaagatgccttataactgaatctagagtttttttctgaattcctagtacagtgttttagtaacttttataattagtgcctttctacttaaacaattcacctaatgtgttaatcgcagctaatttatcttctggccttagtgcttctgcttatggaattgtatactgagtattgctctgtaaactcttaccaaaagtgacaaattagcactgttaatactttaaccatggttttagtttagggttttctaggaatggggaaaattctccaataatctctctatatataatcttcaagcctactcttgaagatcattagtttcattttcacctgctggggtttgcccctggctgaggggaagtagcatgtttgtcttgggaaagtagcacgtgttgaaaaagtctggggcttagcagcttcacgtgagctttgactgttctaggtaacatctttgaaacatttttgcagtatgggtcattctagagccgtttaaggattccagtgcctccaaaattaagagttcaaagattgagaaggtttagaaaataatggtaacagttgggtatttatttgagcacagttttaagcatgaatagacttgcagttgatagtaagccccttatgggtgcttcaaggctctggaaagccagtctctttccaacctgcctgagaagtgtggagcaggaggccctctgagctgctcttcataaccaagagccagttttatacatgggcaaaaggaatatggagatatacaaaatatatttagtatgagacttggacaaaattatcagttagggttcattcagacgtttactatcataaacgtgatttcttcaacttctgttttggtgtttacccccacccctgttctctctacctccccacaccttctcagcctttgactctctttattattcctgttgctgctgcccacagtgtggtttggcctgaactgcgtctaacagcagtgttcctaataagtgtcaggttaattatttgatgagattggtaatggcagtgaagaataatggcactgaaagtacttagctttcttaaaatgttcttttcttctctgagaggtagtttgattttgtgtggggcaaaactctctcaatttgaacttgggctgtgccacttactagcaatatgacattgagtaagttacttagattccttttgcctcagtttcctcaggtgtacaatgcagtacctgttccttagggtcgatgcgaggaatcaggaagtgaggaggtaaacaacttggagcatagcaagtgcctcacaagtgttcatccttacaggattctttgctcttcttggatatatactattcattgttctgccacataggaaaagtttttgtttaatgacttaagattccagggtactaaagtgttttaaaattttaaaataacattatgtacatttatccaataagtacttcagtgggaataaaattaacagattttgatgttactgtacagattgttacttaagtttcagaaatatttgctcagccatgggataaagtaaaatattaaaggataatttttgaaaaagggaaaatcatgattcttatacaaatataaaataaatagatgtcagagcttttatttaactcataattaaggaaagaaccaataagatgttaaatccagcccaaaggaaagtccagaggggagacatacgcaatgagaaatgccgaaagatgcaagaccgtcactccgtctcggaggagccagtggtatcctcacctgatgtgcatttctgtggacaggaatccctggcatcgccattagccctccacaagccagctctgtctttctaatagagactcagaatagccaatgatcagagaaaggcgcggatcctgtagcatcagggaacacggggagggccctttaggccgtgaacagacatccagtcatccttctgtccgtctgaaagtgtttggcaaaagactttcaaaagaaagagaggctagatgtagagattccaggaagcaagaaaatgaaagatgaaagtaagaataggtgtagaaaccaagagaagataatgcttttggccagaaaaatgcttttccaggcttctttttttttttttttttttttggatactgtcaagaaagctgtgtttatcttactgaattctttgacctctgttagataaatcttgttttagagaaagataaaaggaaggaaaggcagactgtagaatgttgatgtgggttttattttgctgatttacttactatttttcagatgaaggctttggtagaggatggtattgtactcaggtcaggatccctactgtcttttagttctgtttattaatgtcatttggggcttttaaaaaaataattaaaaacctagagagcacctactttttgaaaatgtcagtattgaaggaataatagggttttagtattatttgtttgtggaaacatacttaaaaaagtttgcggccgggcgtggtggctcacgcctgtaatcccagcactttgagaggccgaggcgggcggatcacttgaggtcaggagtttgagaccagcctggccaacgtggtgaaaccccgtctctactaaaaatacaaaaaattagctgggcgtggtggcaggcgcatgtaatctcagctacttgggaggctgaggcaggagaatcacttgaactcaggaggtggaagttgcagtgagcagaggtcgggtcactgcacttcaacctgggtgacagagtgagagtctgtctcaaaaaaaaaaaggtttgaagaatttgtgagtgctgtggtcctagtgagttatcagattgcagtggggaggcagccttcaggagagaagtcagtttgtggtgataaattctcgacagctgacggtctagcgtgcacactgggaacgtgaggggccctgcgtgtggtgtccggttcagctgaagatggcaaagccagtgagagtaacacagtacggttgccttgtggctctttggggtgagtcagagtttaataaatattttaccggtggacccaggctgcatgcttttttctttcagcctgcaagtttaacaacgtggcatttgttggctgtctttgactgttaagacccttcatattcctaaatttttaactgatgtttttgcacacagagtgtcatgatacttataaaaatgttactaattgctcagaaaaaataacttcactttgaattgagactaggatttgcttgtaaaaagtctatatttctgctttacgatggcagttgtcacaaatatatgtggtctttgcatgacttcagttgtaatgctgacaaactatttaaaccaaaaaggaaggtaaaaacaggttcatgttaagtaagaacctttgctaggctttgtttcttgaaatcaatactcaattgcctaacaagagggtatttatgggtaatgtgtaggagacggtctgtatatgggcgcaggggcagaagtcaggagctttgtactgtttttatatgatctcaactgtttttgtgacttattacctgggaatggctgtctagaagagtcagttgttgcaccactagtgtctgttttatttctacatgggtgttatgggcgatgcaaacctgattttcttcgaatcggcctggcttcaaacagaaagaaaagaccaatttcaattttcccaccacatttagaagactgtattttaaaacaggaaaactgacggcaaattaattcttaatatgagtgcagaagaaaagagccttaggtgactttacctttagaacttgtgtaaaaatagatgggcaatgagaacgccttcaagtccagaaactgggtcagacaaaaaaaaaaaaaaaaaaaaaagaacggaaacaaacttataatacgtaatacaacagagtgtaaacaatgttggtaaaaattgaaagctacgagagatatgtgtagcatgcacacaaagaactagcaatgcccactttcactgttggcctcccccctccgtcttccatccgccaaatcaagaaagtgtgttctctttgccgcaagcgcggaataacaccgctgcagccaggcctcactgtgtgtggggtggctggggctgtctcagaaggaggcccattgatttgcatgctgcatgggtcattgctgcagagagtcctcatactggaaagcaagtgctgaagtgtgaagaacgtgcctgtttgtgtctcttcgctcagtccacaggcctgtgtcttctcctggcttggggctagctgttttttagaaggtttaaatctgaccttacactgccatctaatggaaaacatatctgttcagggtggcaggaattgtccgtgactgaaactgtgtgtttcgattcctcgatgaaaacatttcgtgagtttacacagtagggtctctgtcactttcagtcctaactctgtgctagtggatttaaaatgcaggcttggtttgaagtactcagagcgtatgttgctttttctgatgtgtctgagccgggacttcacttggaaatgtagaatccgaaatccagttattctgaacaaacgtaagagtttttactccgtgcttcattagctgtgttgatatactacctcttcctttcctgttactgttattaagggcattagcaattctcttcatttgaaagcagctcccctttcgcactctcctgcattgtcatctttacggatttgtagttgtgatcgtatttcccacctaaaaccctctggttctctgtttgacagtagaagtaccaggttcaaatctcgactgtttacatataacctctcagaggccatttcctcatctggaacatggaaatatttaactcagttattgtcatgggaatcaaataatacttaggaaattagtctgtaagatataaataagtataaataataaaaataatagcaaataacatttttgagcatttatcatgtgtcagaaactgctaggcttccacaagcattatctactctgatcttcaaaacattcctaagaggaaggtatggtgatccattcataatggaataacttctcgagattatacaggtggattgagcaaacatcgagattgaacccagagcctgtgctcttagccactgcttattactgctgcttcccgttgggaatactgagatgagccacctgtacttttgcagctgtgttacccatggagcttcatggactctggcattggtattcattttttgttttttctaactcatttatttcacatttttgaggtgtttgcataaaagatcagtatatttaggcatatattttgcaatagaatatggaatcaggatgccttcacctgcaattaagattgatttaaacaaaaataaaatctactttttcataatatacaatattcattgatggcagactccaaaggttggttgagtcagtcatgtcaccaagatgtgaggagcctgggtttgctggctgttctgttgcccttagcataaaacacatttccttagcaattgtggttgaaactggacataatgatgttctcaggcagaaagatggtgtctcttcttggtttcccttcttgaaagtatggagacctttcccagatgtgctccaacagaccttcctccgacatcactgttcaaaaacaagtttatccaatcaagagcagggggaatatgacaagcgcggttggcttatggtggttgatctctccccagttaaggggcaattggggggctgtgtttcagcagagagggtccagggtgattggtgggtcatagccaacagtgtccactagaaacaggctctgtgtgtccgggcaaggttagtcctggccttaatggtgtgatttggggaagattatttgacatctgtgttagaatttcaccatcttgaaaataatgtctgtcttgttcttgtaaggctgatttctgctataagtctcaatacatgtcttccaattaagatcagtgaaagagttttaatgtcttcagtaagaactctcagaataatcagctccgtcttaggggaggtggtattttgaccaagagatgtagtgcttttcaaattgtacctggcccagttcaggggcctgaaggaacgacgcatccgggtaggggtgctggcgggtgggtggggctcgaatctcagaatccagctccaggggcttgggcctccctgctcactccaatgcagaagccaagtctcaggctctgccacccgtgtcctcccagcggcctgtggtgcacgggatgttcatggctgaagagctgggagtgcagggccagtggggacctcaccagacccactgctttctggccaggggccccactgctagggactggctagacccatccctgctccttctgaggatgagggagggagggactcctgggggtaggagagtttcttaaaatcttaacagtccctctcctggagccctccactagacatcaggcctttatgttatgatataactgagagcagtttagatttgtaaaaataacaatttagtaatgcattgtaagtgagatgttaccagagtttaagtatcaggggaattttaaaaatggagtacagaatggaaagctctgagctgctggtttacattgttcagtaccatcagtaccaccaatttaagcattgtaactgtttaggacagagccttttctgtatgtgctgtgtacattctgttttttaaaacattttttattttggctaaacacgtggagtatgacgtagctgccagacccatggggactgtgtgttcttagccgtttctccagggcatgcagctgctgtatttttgagttttgtgtctgcattttatactttcttgcgttacttgctaccattgtgtcacagatcctttcttcacatcatcagctcttaacgctagcaactgccgttcattccctgttcgattatgggcagagaaacaccgaggcacagcgcagcaccatgggcgtgggggaggggcacagaagctgtttgacttctcagccttctttcgtttcttttttctcagctgtgtccttaggttacttggacttgatccctgctggatgaggatgtcttgtacttaaatcaggtgtgaagactgttgttagtaggaacttagttgataccagtagcgcattttgattctgttcagaccatttaactctctgaccaagtgaagtgtgagacaccacattgaatggccgtgtctagaaggaaggtcgacagaaacatggtctgcagccaccatgacttctgcccgcgatgacacgccttactaattggtcatgtcattctttctagctgagttgagacaaagcccgtgatccctcacacagtgctccaggcagatgctgcctgccggttagagcaggactgcagaaggaggcacttctgggtcacttagccggggttcagcatgtcacagcttagcctaagcctccactcagtctctatattcccccaaagctctaacttggaggcatggggtgcagataaataaagtgagaaaaacttccaaaggtgaaaggattttcttactaagtaaagtatgagaaccagcatgaagaatccaaaccaaaataaacttctaaaaactcaaagttctccacctccctcccagagactgctgaccggtgaaaaggaccagcaagtaatgaatgccacatgcatgtatcgggaggattcagactataaatcttttaactcgtgaagctagtgagaaaagatgcacgatcgactcagtctcggtggaagtggtgccacctcccaaaatctcatctgtcttcttttctgttatcatcattctaagcaaggcatcccccacccagtcaaaaaaggaacatagtgaagaaggacagtgttaccgaatgtgaatgggacgccctgtcctggctgagatgctcacgcagtaggcattagactttggagtgagtggcgtctcgctgtgcagggttgatagaggaactcctcgagatctggttttgcagctcacattccctgttcttctagggaccacagagggagaggatgtgtagagaggcaaggagggtttgtgcagagatatctgtggggagagctggggtaggccatgaagtgggaggatgcagagcatgtgaccgtcttcactgaggcctggtgagtgggacctccaggtgacagtgttccctgcagctgtgagacacagagcctgcatggacagtagaggtggctgcattttaggggtgttctccatgtccaggtgtgcaagcaccttgctagagagagtgggctccaggccattggaagttgtgcctatgggcactggtcacctgaacgtggaggggctccagcagggagtgtctgcggtaagactgagaccactggaggctgaggagtggcaataggaagcagatgcatccatgagtcatggctggaggagtcctccagagccctttagggaacccgtgaaaatgcccccaagactcaagtaggttcgaatacctggcaggcagagagcacagaccacctatggcagtaccaggcacaggccccgaaggacattccattcttgtctctctgtccatcccacccttaacctctacgagagagctgccatttttcccccaaacgagtaagcagcctattaactattgaccttggctgggaagagggaagaaaaaaatgttacctttgggtgaagttggagtgtggatcacgaactaagctgcctaatttctgaattgaggctgtgtttgtaatgaggagacagcaagactctcccagagaataccaaagtcatcggacctacccacattaaaattcttttggggtaggagtgttttccccactgcgtaactgttaaagagatactaccctatcaaatgatctgtgtctggtttataccttatgagttgggcttgtccagtgttttggggtaggggacacatcttagagggggcggcaaatcagacgaacaaagtaaaccccaagatggtggagaccaacatgcgagacagtatagtccctttgaggctgccgaagcgtcaggtttcatgcctagagtggcagaaatgagccctgagggacaagcagattcagttcatagacatgcttggatttcatcctgcaaatggggcagggggcgccagcaaaggctgccacgttgtgagcctcggtgggtacatctggcatcccagcatggaacctgatctattgtcgatacttgattaatagtcgaacgaatatataaatgaattgatccagaagtcagtcttaaacatgtaggcaagatgagggagcagcagattatgtatataccctgttgttatcacaagcttttcttaaagtcattctagacatggacgcaaatgtgagtgctttgtgattagatgtggttttattagtactttgatgatttcttagtatgtcttaaaacaactttcatctaggttttaacaaaaatcattttaacaaagtgatttaatattttagaatttcactgtattcaaattttgatttttatacattgaatggggattgatgtcatattttgataggtttaataaaactgtcaactcagccagatgtcttaatcctctttaaaccttatattcttttattgatgtaatttctgtatttcaactagtttcctatcttttctatataaaatcaaagtttaagtgatagaaaaatcagccatgatgtgggaaatatattttgtacatatatacaaacatgttctgggtaatgtatgattaatatgtattgttgtaatggttagtattcatatgtgttatactggatacttagtgataccttttccatttttgtcataataaccattgaaatatattttaaacgttttttcccctcagaagtaaattttcgcagaaggacttagaaatgctattccatggaatgagtgctgattttacaagtgagaatttctcagcagcctggtatcttatagagaatcactcaaacaccaggttagtggatatgggactgtcaactgtgaagggtttcactcagatgctaaagatggaattacacggtaactcgagttttaggtctggctctgcatacagttacatggttttaggtctgcgagctctttgactttgcgtttacccgtgaacatctcagggtgtctgtttccctgtttgtgcaatgggatgattctttagaggtctctcatttcctactgtcattttatgttcaatatatttcattattgatgcaggttattaaaaatttatggagccttagctggggacttaaactgacatgtatgaatgtgatctctccctactcaaataacataaaaattttaagttctggggtaaaacatggaacacactgccttctctgaccatagggcaaaggaagatgagttggtttatcatcatgtaaggacctggcttaaaattagcaaaaaagtagacaaggtcatatatccaatttgaaggttcccttctgtcttctaattacattttactctgtacaagagcaagtttgtagcttatttgcaagattgatttaaaataattatattcagcaaaaaatgtttggataaatcaatggtttattgcttaaaacttaaattattgataaattagtgtgttaaaatataccttaatataaatgtttcattcatttattagggtgaaaagcattactagaaaacatcaggaaaagttggcattttaatacacaggataaatttaacctgattgctttttaaagcaaatgtccaagatgaggaaaggttggcattttaatacatagggtaaatttaacctgattgctttttaaagcaaatgtccaagatgaattttttcattgtagaagatgattctgattttacattacagatgtagaatttctattattataagtcagaattgagctctgtttcttgtgtaggtctatcaagaatacgtttaaagttttatagccggattttcttagctcaaatggacataaaacttctgaaatacagaggcctgtctttagttttctctgctttagatattgagatgagatattgtggtcttcctagttatttaagttgtgaatcgacccacaggattcatgtaattttatgactaaggacagaggactggatactgataagtataacattatgcttagtgttccacaatgcttcagtgaatgtacaaagcagttccatctttgaaatgttgtctatcactggatgatctgtgtcttcttacctagtacaggatgttcaaaactctttatctggtaaattgtatatattatatataggttataaaaacatctacacatttacttcttaggggtctaatgtatttggaattaccatcgagggctccgaaagtcttgtagctgttgtaatttaggcattcataataaataaaaggtttagatctacgcaacaatttgaaagctttttgatttcatctggcttcgtatgatattaatctgtgtgctacttagcatcggttttagcatatttagtgttctccactgaaggaattattttttctttcttgcatgttagaagtgtcaaactttggtttctttatttcatttcagttttgagcagctcaaaatggcagtcaccaacctaaagagacaggctaacaagaagagtgagggcagcctggcctatgtgaaaggcggtctcagtacattcttcgaagcacaggatgccctctcaggtaaggcgatcctcagagccatctgctggcagcttccgccatggaaacccggcactgcctgcagggtgtttacagggtgtgacactcggtctgtttttatcaaagtagagatctcaaatgtgctataaatatttgttgcagagtaggctggcatctctttgaagacttggtactttaaaaatttatctctgaggcttttgttaacccatcttacatgtgtgaaatgggagactactttaactctctgtgatgtccacactccagggctgatacgaaattaaatcccaatgcacaaccaccaatatcttacatatgtgactaattctataaatgcaacccattgtgtgttcactttggaaaggctgatgataggataccagtctcttcagcccttatcgcacaggcgcccacgtatgcacgcaggtagctgtcactgtgccatctgtgtatgggagggacgttgtatggagtacagatgtcatagctttagacattttaatgcaagatgttggtagagttttttttttataaaactgcttttaattaatgaaagtttaattattgctatttagtaaaaagtaatctatatcaataaaagttaactcaattctttttaatagctaagatacttaaaactaaatacccatatagcttaagtatccataactctaaccatgcattgaggccacatcttcttcaattcaggaaggtaaattttaaaaattatttttattcctaaagtatagacattcttttattattttaaaagtccccctcctccctctctactaaaaatacaaaaaattagccaggcgtagtgcatacctgtagtcctagctccttgggaggctgaggctggagaattgcttgagcgtgggaggcggaggttgcagtgagccgagatcgcgccactgcactccagcctggtgacagagcgagaccccatctctaaataaattaaataaataaataaataaataagcccccctcttcctgtgccatatatacttaattgacctccaacacattaaatgtgtatgtgatgcagtgtatgtgatgcagcttcttccttgcaggtagaagttagtttttttttttttttttttttgagacggagtttcgctctgtcgcccaggcgggagtgctgtggcgcgatctcagctcactgcaagctccgcctcccgggttcacgccattctcctgcctcagcctcccgaggagctgggactacaggcgcccgccactgcgcccggctaattttttgtatttttagtagagacggggtttcaccgtgttagccaggatggtctcgatctcctgacctcgtgatccgcccgcctcggcctcccaaagtgctgggattacaggcgtgagccaccgcgcccggcagaagttaggtttttgaaggggtaaaatgtgaatgtctaagagggaacagagaaggtaggtgctcttcctgataaatatgtgtgccttatgtttcttgatggtgtgccattctttatttgtgcttattgctcttctctctaaattaccactgacagcacatagagcaacacagagagatccactattgtcagtggactatgtagactaggaattacatggttcaaatttgacagagctgatatgtaaagttgctcgggtaagttgtttttacttttctgttatgaaaattttgaaatgtgaaaagtggagatgaaagtataatctcccaagtaagggcaaggacatttatgtgcataatcacaatgatattatcatagttaaccaaattggcaataattgtttaatatcatctcattcccagttcagatttctcaaattatccccaaactttatttttataggtgatatgtccaaatcaagattcaaataaaattcaggcatttcacttaatttttaaatctcttaagcctcttttaaactaaaaccatcccctcacctttcttaccctgtttctggtttttctttttttttttttttcttttgagatggagtctcactctgttgcccaggctggagtgcggtggtgcgatttcagcttactgcaacctctgcctcctgggttcacatgattctcctgcctcagcctcccaagtagctgggattacaggtgcccaccaccacgcccagctaatttccacgcccagcctgtttctggtttttcatgctattgatttgttgaagaaacaaggtcatttgtcctggaagatatcccccactctgaatttgactgatgacttccttgtggtgtcatttaacttatttttcttgccattaaattgcttggactcatctaattggatattagataagattcactttcaacacttttaggcatggatagtgctgtgcttcctgtttcatcacaccaggcaggagtgcattcgtgtctggggtctcctgaacagacactgcagtggatcagtagcttcaaggggggactgggaacgaacaggtgagacagatagataaatatgtatgtatacacatacatacacacacacacacacacacacacacacccacacccacatatacttttcaaacctctactgtctctgctttattttggtttgttttccctgaaattctctattaagattttcatgttttattagcattgcattctaatttttaaatcatttaaaattcatgttataggccctttcgttatctgtttagtatttgtatgttctgtgtgatttttttaacattgattcttcagagatatcttttttgtgtttttaaaatgtgtattgtaattttcctccttagtagtttttagtaaatttttgttttcatagtctctgttctcatagtattgtgaacagagaatatgtttcttaatatatatttaagtttttgtaagtatgccaaaaattaaaaaggacggacggatgtggtttcttcagggtccactatttgatatagtatcaatgcctgattgattatattatttaaatatagcttatttatattaaacatgacagacaaatctctttctttaatttggattctgtcggcttttcttcatatgtaaagcatgtatttactttgtcacttttgatggtttagattctcttgatgataatatatttataagtagtccccaagattaccctcagtttggtgttttgctagaaggactcacagaactcagtgaaagctgttgtactcagacttatggttcattacagggaaattacaggttatagtcagccagggatagagattcatggagcaggtctaggaaattttcatccatggagcttccagtagtctcccagtggaattgcaggcagcactgactttcctggtaacagtccgtgccacacacatggagtacttgcagccaaggaagctccccaaaccttgttgtccagatccggagtctgtagtacggccccgtcacatggacatggtcaaggccgacttcaatcttcattccctcagatcaggctgatattgagtgaccctaagtcctcaccgtaaattccattgttagattatctagtgtggcccgtggtccacaggcaaacaaagacactcttatcaggcagaacatttcaagagtttagagattacctcccaggacctaaggacaaaggccagaccttttggggggcaagattaaattctttggtgcataataacatgatattaatattttatacccttccttttatatacattggcttgatatattatttgtaatattctttgtaaccttttagaaatttttcttttggcatgtgtcttgtgttgctacatgtggcaggatttttattttttattattttattttatttatttatttatttaaattatactttaagttttagggtacatgtgcacaacgtgcaggtttgttacatatgtatacatgtgccatgttggtgtgctgcacccattaactcatcatttaacattaggtatatctcctgatgctatccaaatactattctgagagcctttgctctgagttgaccagcagtggatgcctcctcccggtttccttctgttttcctgccattctgggatgtggggaaattgttctccaaatggttatcaaaggaaacgagctgtgtggttaagaaaaatgggggaacagaactgtagtcctgaagatggttatggaaacattggaaaatgtttctggtctgtgccatccttgtgttccagtgttgggcacaggggacaggtacaaatcagagcccttctctgctctttttttgttgtttttttctttctttctttcttttttttacatcatctgcattcttcagttccatccagtggactatttcatacccagtccaagtctggtttttttcagtccatcccaacccggtattccattagtagcttttgttcatccttaagtttttatgccattgtcggttttgtttcttcctgtgtgtccccacaggtattttaattagaacttgacaagaagtgtgtctggcataacacctgccaatagcaaccttggtatgtttagtacagttttttttctttattctgcaaaaatgtttctagcaccagacttcattttgccatggccttccctctgtcattcccttctgttcccttgaagtgggagtgacctgtgggttgttagcagatactgctcacgctggtcctcctgggtggtggtgaggttcctggagctgtttgtagtgtgaaaggccttcctgagctccttggtgcctctgggcacctcctttgttttggtggcgatttccctgaatgccccttgagcttgtgcatttagtgacctgtataatctcttgtttttagcggcaagtccagcattatcacttgcccctttcaagaacaactgtgggtcaaaactgtgtgagtgaatattcgttatggtacactggggtaaaaagccgaaacagactaaattacgcatgttcctccctgcgctctgtcttatttgtcttccttcccctgttccttttattgctgctgcttaactctgtgtggcttgagccgtaattgattttttgacacattctgttgttagtgtctattgatgtatgaagataattcaggtaggtatcattttctgggactcagttatctaagtgagaatcattcctgttactcttctgtgtaatagttgcaattattttactgtttgtttattttctttagtataatttgggaagaaaaggaaccacagattacgtaaccagtttaaatataatttatatatgatttgtctactctgataaaagtttggtaaaataagaaatagaaactaaatgtttgaagggctctctatcaatttaaaatattaatgcatcttacactaacccttcctcttctcctactttagtaaatataatcctactcagaggtcagcatgtgagccaaattaggccacagcctttgtacaggccgggagctaagcatggctgtgttttcccatgctaaaaacaaaaaaagaagaatatgtgatagaggccgtatgtggcccacaaagcctaaagtgttgactgtttggttcttcatagcaatagtttgctcatctgtcatccggcttgaatattcctgtctcacacaggctagcattaacatagattggttagagcatatacatacttctgtgcccaacactggatcctttagatactaccctacacagacattattccttggtgcctcgtttaacaatgatatttacataaatgcatggatggatattatgaatttcttattgtaattgcaaatttgatatctacattttatttgagtgttaaaatgatcaaataattgtagtgaagtaataggcagtctttctataaccttgatttttctttgagaagtactgttgtacatacttttttttgtttctcaaatacaaacttataatgttcaactgcttcacatatttaagttttaatagattagaaacaataacaaacctatgatcatgtaccaagttgcttattgagttattctacttaaagatgttttcagagaaaataaaaggtcaagtgaaccagacattgggttatttggtttaattttctggaaaataggattgcctttatcagatcccagtgtctctcagtcctcatgcttggctgacagcttggcagtggctctgctgtggtggagatgggcggaggaagttagtctgtcagcaaaaagggctgtaaactgagccggggggccagggtcacctcatcttgacctgctcatcagtgatgggttttgtcagcatcagaaaatgtggctacatgatttcctttaatgctaattttgacttagaaagcaacctgtggagcagggctactgtggggtgtgacatctcagcgcagtgtctgttcattgcagctgcagtgggtgcccactcggtgcagctgcagtgggtgccaggtgtccttctcagccaggactatcagaacatcacagcagcatttaaaccaagagggagagcagatctgcacacatgcagcatggaagtctttccagtttagctttctaatgcttaggcatagtccatctcctttccttacagagagggaaggaagttcctttccgtttcagctttctaatgcttaggcatagtccatctcctttccttacagagagggaaggaagttcctttccgtttcacttagtaagttgaaccccagtttcagctttggtatgtagaaacatcttatgtcactgttaccacacaattcaaattttgaaacattacagaaattactttctcctcactccaagtcaaccaagacaattcaactgcagtagctgggttcttccccaaatatactccttctttctctgaatgtgtttctttgatagaggagcagtctgtttattttagaatttcaaagaaaatttgaggtggcttacagaaagaaaaaaagatgaaaaataacaagatcataattagaaactaaaaggagcagagagatagatattagcaggcattgagtgtgtattcatagtgcatttgagaaccgaatttactcagaattttctgaccaattatctgaaatgcttgggacccagcaatgtttcagatttcagattttttcagatttttaaatatttgcattacctagttactggttgaacatcccaaatctgaacatctgaaatgtgaagtgctccaatgaacatttcctttgaatgtcatgtgagtgcttcaagtttcagattttggagcattttggattttcggattggagatactcaacctgtgtaatgagacccaggatgcctcaagtctcccttttctttttcaattcaactgtttttaccacttgttcttgaagacagatgattatgtgtgttaggtactattttaatagtgttaaactgtgaataacttagactggtgtctgctgggtaccttgtacagggtagcatgtttttgctgcttttcagcagtgaaaataatatgaccattttaaaaagctgtttaaaaatatcattttgatttaatgtatctccacccattaaaatggcctacattttaactagatttttttttctagccatccatcaaaaactagaagcagatggaacggaaaaagtagaaggatccatgacgcagaaactggagaatgttctgaacagtaagttttgtcctactacccagaactatttatggattttacaacatgctttaaaattagttcttggacctgatatcgcgggacaaggcagtaagttgcattttactatttatttctaaatagtagtgatttaatgaacacaaaggagaatagaaacattgaaaatgaatgttctgtttctgcttgcattttatttatgagaaatcataatttgaaaacaatccaatatacttcttaagaaataaagtttcctaccctaaaaccaaccagcatataaacagcatcttcaaagcgaggaaagcactgaagcagtagccaggattgtcactgaccagcaacgtggaggagccatcatcaggcgtctcccagcattaatgcaaataacctcagccacaagagtaacagattcttaggggtcatttatttgtgtataacttgcctttttctaaaaaagaatttaaggcagctggctatttaagaaggtgtctaaatctgagatattttgtaaaaattataggcccagggaaaatggctatgtgcaaagttttgagttctgtccacgtcccttgtctgtcctttttctgatgtcctaggtcccagctacttatcctgctgatttagaagaaagtgatcagatgaattaatccttactatgatgttagtggcttaaaaataagtcatttaaaataaatcttttcacaactatagtttacatttgataggaatgcccatgggcatctccttaggtttaaatataatgtacaatctcatcaggaagtagagttaagaatcattggaagaatgaaaaaacctcacaccagatctttaaaaattctgtgaatttaaggctgtgatgtgaagctagttttgcccttccggcttaagtgagtcccgtgggtggaacgttctgagcctgtatgtgaatatcttttcacaaacctgagtgatccctaaaagaaagcattttctagaaagaagtgttctcttggtagtagcatttgaggacttggatttcattctaaatttaggaatttaacagcacttaattttttcctctgattattattacttaattgccctgagatcttcccttgtttttatctttgagaaccaagtcaccaatgttgttaaaatgaagatattctgaatttaactcaaacacttattgaagctgtttctatattagcatagtcagacattttaagatcttggaaggatattttctactcaaggatgttatttgccctggagaagttatcaaactatgatatctgtataaaaaacatgtttacttcagtaattttaaaaaggtggcttataggaacagttgacatagtaagtatatgatggtatcagagaaggagatccttgttccggtttgggaaattctagggtctgtttcatgtgttaggcttaccatagtgtggtaatgtgattttttttatttctttgaagcagtagtttgagaaatcgtcccttgggacttggggtattaaaaattgcctttttccatatattcctttataaccatgaatttttttttccagaaaagtgtcgtattaactttctattgaagtttgctctttttggataaagttcagcttaatataaatggtcacttctttatgagaccattcgtcaggactttttgctattaaaatttccctaaaatacatttctttataacaattcccccttttctagaaacattttttaacaacatgatgttgattgctgtcttaggatatgtttttcctaattcaggtcaacttgacagacgtttatttaactctggttgtgtcaagccccgtgctaagccagcctgggagcaaagccggaggggatgcagctctggccccgagagagtcccgcccaggcgggttcgtagttatcagacttcagtactgcagaactggtgaaaacagaactaaagtcacaaagattcagtcagttctgttgaaaattgaatttattttgttgtagaaaggaaggaaagcataaatgagtatgagtgtcatttacttcacttagatgattactaatgctttttacctgatgtataattatatactaatgtatatggatatttcttcagtttttttaaaagatttttttttaaattgggcaatctttctgacttttaagctaagtttctaaaggatactgttggctgcaggaaacttaggtcatttattcagagtttatcagttttgacactttcttttgaaattgttaaaaaaaagaaattgttttttgttttcatgatatgtgtttctcatgtctgtgtttgaacttaataacttattcttgatttcaagccaatgatgactattagtttatttacatcaaatttgcatattcaactctgtgttcttacctgtttcaaatatatagaacagcattgttcaatagaatttctgcaatgatgaaaatgtagctactgagcacttccaatgtgactagtacaactgaggaattgagttttaaatttttatttaattttaattaattctgctttaaattgaaatagtcccgtgtggctggtagttactgtgttagacagtgcaggtgtagacatgctgtgtaagtatttgtagcagtagctgtggcagtcgtagctcacgcttgtggagggcctactgcagggcaggtgttgctcgaaactatctaggtatatttagtcctcacaacaacactttgaggtttgtgctgttatcttcgctttattgatgaaaaaaactaaagcccagaagattaattgagccatgtaaggttatgtaagtagtaagtagcagagctgcaatttatatccagaaatatggctccagacttgtgctttgaactgcaggcaggccgtgctgtgtgtgtggttttgataggcgcaggtttcagtcatcacggttcagttcatgacagccgtcccccagcaacaccgtggagaactgcggttcccacagggcagtcaccatagctgcataaagtacagttcccctccagccctttaattcacacgtcgctgtgtaaatgacaggtgctctggatgatcagccacactgcctccttcaaggccaccagcgatagtcactgtacgtctgttaccagttctcagcagacagcaaagtgtgcagttgtgctacctccttatctcccagtgacaaaccctcctgacattttacaaaaatggatgatcgggaagggattggtcgataaagatgaaagtgcatcaaaaaccaggaagctctaacactggaagtgaaacgcaaatccaccaaatggagagtgacggaaggaatagctggctgtggggatgtaggtcctcctgtctttgagactcaagagtaactcagtggaggggaacttcccaacaaaggtgagcaaatgtgaagaaaagcatgagatgtcccaaaggaagcaatgctcagagaacctcagagatgtttcatgatgtggacggtgcaaaggaaaaaatatcagaagttgattcacgcttagaaaggagcaggataatctgtcagagcacagaaaagaggcttgattcatattgtaaatattacaacaaaaaagaaggcaaacactcttgataagtttttctacaaagaaatatgacgctttaattttaaatgtttctgatgttttattttttattttttttcttgtgatgtggagattcttttttttattattatactttaagttctagggtacatgtgcacaacgtgcaggtttgttacatgtgtatacatgtgccatgttggtgtgctgcacccattaactcgtcatttacattaggtatatctcctaatgctatcccttccccctcccccaactccacgacgggcctcagtgtgtgatggtccccttcctgtgtccaggtgttctcattgttcaattcccacctatgagtgagaacatacggtgtttggttttttgtccttgtgatagtttgctgagaatgatggtttccagcttcatccatgtccctacgaaggacacgaactcttccttttttatggctgcatagtattccctggtgtatatgtgccacattttcttaatccagtctgtcattgatggaaactcactcaaaactgctcaactacatggaaactgaacaacctgctcctgaatgactactggatacataacaaaatgaaggcagaaataaagatgttctttgaaaccaacaagaacaaagacacaacataccagaatctctgggacacatttaaagcagtgtgtagagggaaatttatagcactaaatgcccagaagagaaagcaggaaagatctaaaattgacaccctaacatcacaattaaaagaactagagaagcaagagcaaacacattcaaaagcgagcagaaggcaagaaataactaagatcagagcagaattgaaggagatagagacacaaaaaacccttcaaaaaatcagtgaatccaggagctggcttttgaaaagatcagcaaacttgataaaccgctagcaagactaataaagaagaaaagagagaagaatcaaatagatgcaataaaaaatgataaaggggatatcaccaccgatcccacagaaatacaaactaccatcagagaatactataaacacctctacgcaaatgaactagaaaatctagaagaaatggataaattcctggacacatacaccctcccaagtctaaaccaggaagaagttgaatctctgatgttttaaattgtatattaaatattagttgtactttaaaaaattgttattcattcgtaaccaacaataagtgagtttttaatgtttcaacaaacgtttttggatatcacagaacaaatgtaattttcccattgattattagatggtcttgctggattttagcttgcacagcccctgtcatagccctgcacactgtgcaaagccaggcctgcccatggggtgttgtaccacctctctgagtagtaagaatactggtcattgattcagacagcaatttttagtccttcctctgtaagcatttattgagcacatgtttgttttatcctagggatataaaaataaaacttgtactttacttctagagattataactgaatggaaaatacacatattcgggtgatcaaatgatggtttgataatactgctctggtgggagtcctcaggtgtggctacagcccacaaaaggggaagcaagccaaaaagttgagtgcagagaataccaggggaggacacaggagccttaagagaggagcaggaagtacccagacaagcagaggccggcggtgggcggctgagtggagggaggcaggtgtgtccccgcggggccagcgcgtgagttcagagacaagcagaggccggcggtgggtggctgagtggagggaggcaggtgtgtccccgcagggccagcgcgtgagttcagagaggagataggccgcagcccaggaagcagggtccagtgtggctgtgtgcagataggagaggtgtggccgcagggtagacgaggtctgcccctgacgaactggctgtgcagtagtgtggaatctgtctttattctgaagacaaatagtgagccatcgcagaagtttaacagaacgataggagatttttaaagagcaatctgccatctgtatagagaatggacgagaagggaggtacgccagaggcaagaggagagcagccagaagtggacggtaggcatgttaagccaggtcagcagtaatgtgtgtagtaatggaataaagtaacgtgagggtgacgtggctgctagtgaaggtagagcgagtggcaggtgagaaaggtgaagggacagggaaggtttgacatgttacatagggaaaaggaagtagtcattggtgatttacagatgtctggcctcagatggatgaaggagcacgtttggcgcataaggagaggcatagagatgagaacattcagttcaacatgttgaatttgagattcctgagggtcgtgctgatgggttttgctagctctcactatgtccccatgatgtcacactgggcaacttgaataacctctgtgtctcagttgcctccaacataaaacgggggtaaaaacagtgcctgtcttacagcgacataaccatgtgcaggtgaactaatacccatgagggttttcgaatcacacctggcatagcatcagtgcttcctgtcgttattagctgtcattattgtatgtccagtgaaaatattcctgtcattattagctatcattattgcatgtctagtgaaaatatttttaaggattggtcttacgctcgcaaacacatcttgaaacacagatttgggagtcaccagcataaagatggtagttggacaaacaggattgaatgatttaacccaagtaccacgtgcaaaatgaaagaagaatgctaaggatttggaacactagggaatatccagaagggccaggatgtggaaaagaaactgacgtttgctcagtggctggctggcaaatatttcacaacatgcattcaaaaaaaaaaagaagaagatagaaaaaattaacctaatattagcatttcccaatttccaaggtgtaaatactcccattggggttggtttcaagctgccaactcagcttggaggtgaagagatactgacagttgctcttgagaggggtacgtgctgacgtcagctctttcctcagttccatctactccacacagagtgtcaggcatagtgctgtgaaacaggctttcagtactgttaatgatcctgtccgtatagcatcgttatggtatagccggcagcctatctcgtcattttctagcctgttgaaattgaggtagttaggtctctttgtgaatttgtacattttagggttactctgatattccaggcaccctaatgtttcacttcctaatctcattcaacttgcttattcctgggatacattgtgctgtggtgggtggggtagcaggtgagggggcgttccttctgtcctgcctctgacctctccaattcacagcaagtggagagcagattagaaatcacttccgtgatctgtctcaagtgtcagtaccaaggaaaggaccaaatggtcactttgaaataagagaaagcataatatttactttaaataaacatggttgaaattataagacaccatcagaattacaggactaggttttctagatgactggagttcctggcacatacaaagatgtttgttccgttgttaaggatgtaagatcactgggcaggtatgagttccaccgactggtgtgtaatgctacctggactttccttcccatcttgcactgtagggaaattttactgctccacagacccgactacactggtggcaaccacgctgtgtttacatcattgctgttagttcttgcagttcctgtgtgaccgagacagtgagaggcattgtccaaattcactggtgctggagaccatctttgggtgaggagaaaggaccaagttccagaccttggtttgcccaaggctggcaaatagagatcagggtttgtcctacagcctatgaggccaaagtcatggccatccactccaggtggacttgttctgtggttggacactgatgttcaaacccttaccagctgccttaaaattgggtgttcttggtgtgagaatgtgtgtggatttgcacacggggtgttcttggtgtgagaatgtgtgtggatttgcacacggggtgttcttggtgtgagaatgtgtgtggattcgcacacggggtgttcttggtgtgagaatgtgtgtggattcgcacacggggtgttcttggtgtgagaatgtgtgtggattcgcacacggggtgttcttggtgtgagaatgtgtgtggattcgcagacggggtgttcttggtgtgagaatgtgtgtggattcgcagacggggtgttcttggtgtgagaatgtgtgtggattcgcacacggggtgttcttggtgtgagaatgtgtgtggattcgcacacggggtgttcttggtgtgagaatgtgtgtggattcgcacaaggggattttatgggatgacctttgttgatgccttcctggtggcgttatctgtgacatcagcctcacatgtgaagagcaccccttttcttcaatagttttgttttcttattagtagccctaaagaagaaagacataaaatgcattttgtgagctactggtgatttttatctatttgcacaaatcttggtttcactgccctcatgtattttattactgaatacattatctgataatcagagttaggaacttcagttttattgtgaatacaattaaatttacagcagaacagtaatttacagacagaagttatctctaaattaaaaattataatctcataacttataatttgtcagtattcacataaaattttcaacatataagtacatgtattttggcataaataaacataattttatagtttataatttctgcatataaatttttctctgtctctattttatttaattataagtgagttttcttcctgtacttgttttcatactttttagagaagttaaaattattagttgataatattttacgactttaataagatgagaaaaatctaattttgaattcatactttttgccccaaatttcattatactaaaaactaataaaaaatgtaaaacaacagtgcttggtgatttaacatccaaacctaacatataagtaattaaccttttaaaaagatttagtctcctttacatatctattcatttatgagcctcaattcttgaaatttatattttttaagtgataaatactttaaaatagttttctttgatgaccaaaagttttaaccctaatcagatttcaaatactaatttagcctccattgtgtggtttggtggcaagaaggaaatatattttttctcatcttataatagaaatgtagaattctacttaaatagcatgtggtgaaaacagttatcttgacaaaacaaagtttttatatgaggcctttaaaatttcaacagaatttaaacattatttagataaaacaatcatgttacaaagatgacttttaacaggatcaggccacccacagtgtgctctagagaatattgcatgcgagccacccagtgagactgaggcaattttttcatctttgcttaaagtatagtcactagaccagataatgcagaaactttttacaagcagcgatcaaacaggcaaaaacagtttatcttttttctctcctttcgttgtggaattaaaactaattcacaagttgcaaaatttaaactgtttttgtacacagcaaattttgctttaaataaagcaactctttcattacagtgattcatatggtttggggtcttttaggtgaaaaaaaaaaaaacttaggaaatgtgcagctcatgtatacttttataagattagctgatttaagaaatattcatgatgctgccttcacatttgtcatttgtaaattacttatataattttctttgcctgctacgtagaggtaattctgccaaggaatagaatttgttttaaatatttctattgagcaactttcctgaaaatgatttccttgttttgtttattgtcccatatgtagatattgagtccgcagaatttagctaatgtacacgtgtatgcacatacatgcgtatgtgtgtgttttaccctattgtatgaagttctgaaataacctaagggcccataattgctatacagtttagaagtgtaatgaaaataaatgtaggttcacattagagaatttatttgggcatggtaaatatggtgctttttatattggataccattcttaacatatgaaaagacttaggcaaaatggaaattttattttagcaaaccataaaagatcccctaaactgaaaaacagtctgagttttaacgtaaaactacaatagcagtattaacattttgtttctagtgcccagttacacattttctgattaaaatcagctttcatctaagtttcctttcctctttttaaaacaggagcaagtaatactgcagacacattgtttcaagaagtattaggtcggaaagacaaggcagattccactagaaatgcactcaatgtgcttcagcgatttaagtttcttttcaaccttcctctaaatattgaaaggaatattcaaaaggtagagtacatgtttatttatttacatatggttgtagatgtcatacatttttaagattttttaagatgttttttatattaaccaaatgtcttcattttgcattactgacagttttcaaaatgtttctttattttaaagggtgattatgatgtggttattaatgattatgaaaaggccaagtcactttttgggaaaacggaggtgcaagttttcaagaaatgtaagattcatgtattacttttagatcttctcctttccttttataggaagaatgtggaatgtgttctgcaaagaatgttatatgagtttttagtttttgtttatatgaggctctctttacaatgtaaagcaattacttcagaaataacagtatgacttttcttatttgatacgcagtgaaaatgagcaaccacgactctaggttgttcgcctgagacgttctctgccgtttgttaaccatcacgctgttagaaagtcttagtttactggaaggaatcaatgacaagtattttctagagatggaaacctacattttaatcttcccgtcttcagagagacccatagactgaagaattccaacctcctttaaaggaagctcagcaacttttgaagttatgtctaatgccagagttacagtccaccaggagaaatatcacagggccttattaaatttaaaaatgaaatctgtaaggacccagaaaactaaatttatttttttattgtggtaaaatatacatgcagtgaaatgtacagacctcacatgttagaggtcagtgagttttgacaaatatgtacacccttgtaacctacatcggagatagtgttctgatcactctagacacggccctggtgcctcttagccctcaccccacaaaagcaactactattctgctttttgaaatttgatattaaattttcattctgtaaatcttgtgtattcttttctttttaaatagattatgctgaagtagaaacaaggattgaagctttaagagaattacttctggataaattgcttgagacaccatcaactttacatgaccaaaaacgttacataaggtaaatcttctgcaaacattttgttgaatcacatgtatctgtttggtactgtatgcatcttgtaacccttaaggctaacttgagggactttaggagattgatgaaatggtgaaggggaagacaaatagcagaaatttagggttatctggtgtaggacatcaaaattcttttgaatactaatagatttgggagtagttatggagttactcactttttgagaaaactctgccattttcgggaaaggaaaagtagtctcaacctcttcctcctgctgagtaaaggggtaccttgcctagtgggatggtgtgggtacccataatctgtgaaggaggggctccctgcatggcttaaagcagaatactgtcacacactgggtgggaaatgcattatgccacaagaatgtgctgctgcttaacagcacagtaagttctggaaggttttaaccttgaatagctttctgatttccaagcctttagtggtcagtgaaagagaaataaagtcactaagtgagcatactttttaaaaaattgcagtaatattgggccgggcaccgtggctcatgcctgtaatcccagcacagcactttgggaggctgaggcgggcggatcactaggtcaggagtttgagaccagcctgaccaatgtggtgaaaccccatctctactaaaaatacaaaaatcagcctggcatggtgatgtgcgcctgtaatcccagctactcaggaggctgaggcaggagaatcgcttgaacccgggaggcagaggttgcagtgaaccgagatctcacaccactgcactccagcctgggcaacagagtgagactctgtcttaaaaaaaaaaatttgcagtgatattaagagaggtgaatttcacaggatatgaagagaaggccttagagagaaacagtatcacataatgggaactagctgttaactttgggcaaccgacttgagttctatttttcggtttcttcatctgaaatggacatggtaatcaaatctgcatctcaggatagttgcaaagataatcagaaatacatttaagggtttaatacctcacccggcacataaaaagtagtcagtaaattttatgtacatgtagtttatgtcagggtttggagataaagcatataaattttaagttttttatatctgtgattaaaaatattaacttcattttctgctaggattttttgagtatggcctttgttctcagaataaattattttccaaatttaatggtttttccacttgaattagtgaagtttattgactattcagtggttgtaaaatgacagactatgtatttatgaatttagctgtggtccccatgtgacctttgaaaataatgtctcaggaacagacacagtggcccagacctgtgatcccagcactttgggaggccaaggcagaaggattgtttgagtctaagagttcaagactagcctgggcaatatagcaaaacctggtctctgcaaaaaatcaaaaattagccagatgcggggatgcatgcctgtagacccagccactcaggagcctgaggcagtaggatctcttgagcccaggagttcgagactgcactgagatgtgatcgtaccactgcactcgagcctgggtgacagcaagatcctgtctctgaaaagaaaagactgtcttgaaaagagcgtctggcctgaaagctgctgtgtgtgcaagtgtgaacgggggaaaagatccgcacctggacctgtgtcctagtgatgaggcgtacggcgggagtatgagccgtcgtcattggcagcacactagtattgcccaggaggaagcaagcagaggcagtggcggtgggatgaagagagggtgctgtgtttgcatgctgccacccctgcacgtgtgcagcatgctcaggcgctgtgcgggatgtgttctacatgtcctctctaatcctgatcaccaccatgaaaggacgcttgtgcggtgcccattgtacaggtgaaaacaccgaagcttgcccagcacacacagtgacccgggggacgggacgcctgtttggcttcagagcccactcttgtttctctctaagctgcctccataagaaagaatgtatataggggattttcctggtttgtagaatcctagaaatgtaaagctggaaataaaccacacatttgtcatccaactgctttattttctacctagaaagcgacagagttgcagggaggttgagcgtagtgtccaggacacgcagctgggtagcctcagacgtcctgaggctgctgtttcctgccctgctccttcactgcgtgtgctttgtatatttctggcctgtttacacttgttatgttaaacttgcctatagtagtgtgttaaatcttgttgagtgtacaaattctttatgttgtgggttaccatctatatggataactcatgtgcagtttttatgagtatataacttactggatatcgtttaaaaggtggtagtgccaaaaaagattcttttaaggagccttttaactacgatttttcctgtcatcttaaaggcaaaagagcaaaaatataaacaagtcaacaatagtttatgtatttgttaatgattattttatttacgatgctttgagaaaatactgagcaattgttacctttttaaatgaaatttttagtcgctaagaaatagaaaaataagatcagaaccaggtcaaatacctgttggactttgaaatttatgagcatcaagtaggaatagagatagctttatcatgaacaaaaatgtattagttttcttacataatccagattatgcatagtagaggggaaaatcagattaccactatattgtcttactgttcacaattttttctaatatcattcactattttatctaatttaaaccttccctattcttctccctctccttatttctatcttgatgttggcaggaagcaaagctctgcatattcctttccacagcagtgtgatcttatccctggtagctgtgagaagatcatgtcagaatatgactaaaaacttcctttattcttaaattttaaaatactgagcctgtgttaatcataattaacattctttacattgcttttgaatctaaaaagcctttttaaagtgttcttaatatgcagttttaaaagaaatggcgataacatgtatcattctaaacagagttttgaaatgtaactacttatttttagctgcatactgaaaggaaacaagaaacttatttgaagagcccagcacaagttgtcatgcttttgaactgagtctagaatttctaaaagaacaactttatcttgctttgtaaaacttttataaactcctttactttaatacccgttaataagatgatagaaaaagtcttttgttattaggttttgcaaggacacagtcaacattttaaagagacgtataatgtaaaaagccactaagcaaagcttattgattcctcttgctgtactcctggagaaagaacccttgtacggaactgtctacactcctattcagtaatttaaacattaaaaggaacaccgtccctaaaagagtatctctttattttactactaacaccaaatctgagggctacgtgagtgaaagtgttaggagaaagcgttgcagaggtgttgggaggcaaaacaagcctatttagggagaacgctgaaatgcatcatccccagcaagaaagcatagaatcacgttctttgggaagaaagacacagtgtactatttgttatatttatcgttcaggtaataaaagaagaaagccttgtgtgagagaaagaatcagactgcattttggaatctgaaatgaatcccctgtgccaagctaaatgtaacttgttagattgtagttttcttctcaggatactattctcatttatgaggaggagtgctggtgacttcttaatctgagtaaagctcttccttctaattgacctgccactttctcagcacagagacacatcctgtttgcaacctgtaggtggtcacaagggggaggagatggcagctctcagccacctctgggcagcctgagtgtggcccgtctgcagatgcctggatatccggctccccacagcacccagtccctccccatcagctgggaatgtcagtgttctcagcattttatttgttgctaacatattacaaagtggatttgtttctcctctgattggctgctgattgagatacctgagtaacacacactcactactggaagaatgggctggaagcatgggtgcacccctgagggattgaggtctggcccaaggtcagcctggagccattgatgatgatttaccactgaacaaaaacctctaacccagagacaaagaatggcatatggcttaacaacagttttaagacaataaattcatttggacatgcttttggagttgatttaattggatttagcttgctatatttatatattttgtgagggctgagggccaaatcttaaataatatttgacagaaatttttctatggaagtaaatggtctctatggatttgggtgttttatagacaaagacttgatatattttaagaatatttagaaactaagaaaaacaccgaactatactatatttcctagagaaatattttctcagtcgtgagtgtggactttagaggtgagtgttgtcaccaaatctcttcacagttcggttagccctcatttagctagttttagaaagcggtgccatactgccatctcgtggccatatttcatatcagaaaggaattaaaaaacatctgaaattttaaaagtatttgcccagtatctgctggctcccacctgtgtctaatataatgactctgaactaagtagaaaaactcctgtgaactaaatataaatataaagaaaaatgctcatcaggtagataggatcactgcaaattgtccttatctttttacaaagagctgtttttaatagttttatcatttatatgaaaaaattttaaagctctgctgtttatttttttattttttgtttgcttgtttgtttgtttggagatggcgtctcactctgtcgcccaggctgcagtacagtggtgagatctcagctcattgcaacctctgcctctcgggttcaagcgattctcctgcctcagccgcccgagtagctgagattacaggcttgcaccaacacacttggctaatttttgtatttttttttagtagcgacggggtttcagcacgttggccaggctggtcttgaactgctgacctcaggtgatccatccacctcagcctcccaaagtgctgggattacaggcaggagccatctcacctagccaagaaatttgaatatatttcattgagaattaaatattaaagactaatatttgacagggcacaagactaattgataaaattttagcctttaaaaagtaatgattttaaaatatgccagcatttccctttggcctcaaccttggacttgctttttcaggtacctgtctgaccttcatgcgtctggtgaccctgcttggcaatgcattggagcccaacacaagtggatccttcagctcatgcacagttgcaaagagggctacgtgaaagatctgaaaggcaaggatttctcttccaatgtgttgtgtgattccttcatgtcattttgatgcattctgggaatgtttaatgatgaaggcactgactacctaatttacttggtatctcttattattgtcttttgcttgttttgtggtttttttggccactggttagcattgtactaatgaaaagggacaactcttttatcatgtctgtttttgcgattggtggacagcgttgacgtttcggggcaggcagcgtgatgccgaggaggtgacattggtctttggtaactatcagtctgcacatcgtctcgtcaggtgtatgttgagtcctgctctgtgccaggcactgcacccatcgctagtaagacatagctgctgcctcccagagttaccgctagaggaaggaaaagccactaaacatgtaactaaccaaataaaatgctgggacatgtgatgaaagaaaaaaagaaaatcaagatgttccaaaagggagtaactgaggagaatgctttagatggctggtgtgggaatgtctcagagaagcctccgtattagaactggaaggataaaaggtagcttactagccatctcagcttgagaaagggaccacctgtgtggaggccctgagggaagctgggggagagaagtcaaaggtctatttgtgtgcaggtgtattggcttttgtttgtatactatcatttggagaatattgagtatattgaatgcctgctatgctgcagacactgttgggtgccaaagtcacagtagtcaggacaacagacaagggcctagctcatgcaagctcacaaaatagtagggtagacagataaccagccagctgttagaatattgtgtgctgtttcatatgactggggaagttctgagtgacattggagtgcttaggagtagcctctgatccagggttttgaggtcaggggagtgacattctgagagctgaagggagtgacatctcttttgagatcagaagggtatctgtacttgacagttgaaatagaggaggaaagcatttaagacttccaggaagggagaatgtgcacaggttacaagcacaagaaggcctctgaatcctgtgtggttggagcttagatcgtggaggtggagtgaagagacgaactttcttggctgctgtgacaggtttggacttcacccagagtgcgatggggagtcgctgacggattttaagctggggtcaatggattgggggaagacaagctcagacttacttttgaaaagatgacgactctggccgcccatagtgggtggatgagagggagcaagcccagagcagtgaagctggtgaggagacaggcaccccacctgatgtggaggtggtgggaatgtgaagaagagcatggactccagggccgttcaggaatagaactgatagggctggatgatggacaaatgaagaggaggaagggatgagcagtgatttccagatggctgactggcagctagttagggtgatggtgccactgagttagggaacataggggagaaaagtgattccgcctctttgtttggacagcttgacttggggttgtctgacatgtaagtagagatggaagtagttggatctagagactgagaaatttgagcttggtgggcatacaggtggtcccttggaactcgtgcatttacccaagaagacgaaaaaagaagcaaactcaggaaagagtcctgacaagtgatgttttaggggctggtagaagaagagaagccttcaaaggaaacgaagaaggggtggtcatggcgggaggaaaacagaagggagtggtcagcaaaatctccaagatgaagcagaagatgaaagagaaatgtccttaggattgctcttacgctgttggtggtgactctggcaaatgcagggcctgagacctgagcccctaactggatgacatgaaaaggagtaatggccctcatcaggtccctgggaggatcaggagctgtaacaggagagcagtcttggtagagaaggaagtacaatggagaggtcgccgttgtttctttctagcatagttttgtcatgaattagttggcttggatttgagtactttccagctctgatgccatttttttctatgcttggtatttaagaaaacccaggtatctctgctgaagccatgtcaacatccccattaatgtcattaattattttatatttttagcaagtgaaaatgacagcaaatgttacacacagtctgcagtctttgggaatatttagaaagccttacatatttatttctctgttgattcaaccaataatttttgagtctactctgttcggcagagctctcaaccttaagggcccatcagagtccactggggattttttttttttttttccagacagagtctcgctttgtcgcccaggctggagtgcagtggctcgatctcagctcactgcaagctccgcctcccaggttcacaccattctcctgcctcagcctcccaagtagctgggactacaggcgcccgctaccacgcctagctaatttttttgtatttttagtagagacggggtttcaccccatcacggtgttagccaggatggtctcgatctcctgacctcgtgatccacccgcctcggcctcccaaagtgctgggattacaggcgtgagctaccacgcgtccactggggctttttaacaaccagttatcaattcttggccttaccccttccctccgtgccaagcacattctaatctctgtggctggagtccaggcaatttcaagctcccgggcgattcatgtgcagccagggctggtcaccagggtgctggctgctgtgccaggagccggaagtgcagtgcgagctggcctcttggagcttgtggtctagggagaaacacaccatctaaaaaatcacataggcatgtattcagttggaatagtgaaaagtgtgaggtagtggggagtacaaaattgtatgaaaatgtatgataggaagggtgcagtccggttgaggggaagtccagggaagttttctagaggaggtgaaatctcagttgaacctaaacaacgacagtcagttctccggatcggcattgagacgcgttccagacaccgtgcgggtgctggacagtcagttctctagatcagcattgagaagcgttccagacaccgtgcaggtgctcgacagtcagttctctggatcggcattgagacgcgttccagacaccgtgcgggtgctcgacggtcagttctctagatcggcattgagaagcgttccagacaccgtgcgggtgctcgacaaatgtcactgctctccagcaaaggtggtgatgaatgcagtcaccatattcactggatacagataggatatgtggtctgaccaaggattttcctacttatactttcaggaaacaaactgaatacctaatttggtatgaaaatatttgaatttctggaatatgtgtgtaatttatgaagacaacatatggactttttgaaactggaaaaattccagaaaatttcatctatctcgtcatatctttacctcaaatatctgataaccagtattccatcaccaaaggtctgaatctttctcaaagatagagggaaacacaccgtcatctttccttccctgacatcttaatttattgctatatatattcattctaaattgcttaaaatcagtgttttggaaaaaaaaaaggtgacagaagctttcttgtaactcacttactctgagcaagcttgttgcgcaccttgttcatcacttgggaaataatcgaaagaatgtgcgtggaatgggagcagtgcctcaggttactttcattacttcatcttttcattagaaagtgaagggccggtgcggtggcccacgcctgtaatcccaacactttgggaggccgaggcgggcggatcacaaggtcaggagttcaacaccagcctggccaacatagtgaaaccctgtctctactaaaaatacaaaaattagccaggtatggtggtatagccaggtataggcccagctactcaggaggctgaggcaggagaatcacttgaacccaggaggcagaggttatggtaagccgagatcgtaccactgcactccagcctgggcaacagagtgagactcactccatctcaaaaaataaaaaagtggaaacaattccttacaactctttgaactttacagttttaatgacaatacaatataaatgtcttaaattcacattttattttttcttttgacattcagaacatgcttaactgttccctctgtcattgtcagtaaacactgctaatctaaatgtaggtaattctagcacatgagaggcttttaactggaaaattggggtggttttttgaacttaggtcagaagcgattttcactattaaattttggaaaatcccacttatatttaaaagcagaaaggataatgtaacaataccccatgtactcacgctgacttcagcagttaccaactcatagccaatctcattttatcagctcatagccagtcttacctgcttctctcccctccctcaccctggattattctaaaacagatcacatcattttatccataattaattcagtatgtaattcttagaaataaggattctttttaaaaactgtagccaaaataccatgaccattacctaaaatatgaatattttttaaatatgaaatactccagtttcaaattcagaaagtttaatttcttcagtatctttctgagtgcatcgatagcattgcccttgagctgatactcagtgcacaggcaaatggtaaatgaaatgcggcacagacgcggacagaacgtttcctcggatggaaggaggattcgccattagtgaaatagagtgtgctttggccagtttgcatgtcggtgtttttctgtatgtgatcatttctatatgtgtatgtcattgcacacatgttaactttaatatacacatatctatggccgggcgcggtggctcacgcctgtaatcccagcactttgggaggctgaggctggcggaccatgaggtcaggagatcgagaccatcctggctaacacagtgaaaccccgtctctactaaaaatacaaaaaattagccggacatggtggcatttgcctgtagtcccagctacttgggaggctggggcaggagaatggcaggaacctgggaggcggagcttgcactgagcccagattgtgccactgcactccagcctgggcgacagagcaagactccgtctcaaaaaaaaaaaaaatacacatatctacatttacatctacaggtaatgtcatatctatgtttgtgtatgtgtgcgtgtgtttatataaaatatttgccttaattataagtttgctgggaatacacacaaattttcttttgtgtgatctacaactgttgttgactagggacccttggtggatgttttattattgtcctaattatatataatataaatgtaaggtaatatgggggaatgcctactaaatattgtttggaatttcctttgagcatcctctcataattgtgacattttagatgtggaagaaatctgggaaactgtctagttttgtggatgcctttagctctatttcgcatgtgacaaaggtgtctcagagaagccacaggacagacccacgtcctccgtatcctgagtaggggtgggactagtgggtgtccagacacgtcctccgtatcctgagcaggggtgggactagtgggtgtccaggtcactccccctctcacctgatcacactccctccagaccagtgagttatggaataggttactgaacacctccctctgagttacattgttggagcaaatattgcatcaaacaggatttctcaatgtgatgtcagagcaggtgagcgttcccctggtaagggaaggctggctggtatttggggattcatgaagagctgcacctgaaactagccaagctcgatgaagtgcttctggtctttattacttttatgctattttgctatacataggtgaattctattaaggaaattttacacagacctcatcactcacttctaaaattatatgtgcaatgtaaataaatgctctgagaatgagcaagttaagaaaatggaggtgagtgagagagcatccagtcccttaggagggatcctgggaaatgtaaggctgtccctgggaaggcccgcagtgcccccatcagagccaaaggaactcatggcacatacattggatgtaaagcttcagagccggcagcctgcagcggatgccacctctctcttgactcgagtgtgtctggttattttctgatgcccggggctcggtgacagagtacttacttgtttgcttggcacctgctgtttccttgaattgattatagctgtctactgaaggctagagcatttgaaaacacaattactaccgtaagaaattgcttacaaatgatctgcggtaaaaggactgcctacattttatctggtactttgttataaagctacattgtttttatgcgggttttctcaggagcctgcttttaaaatgaaagcttactacattccaatataaagaaaacaagttttaagtagttcctttattataatatctgtacttagactactaacactgtaaagttgtttaggtaaatccactagcagaacaatggataagaagaagaatagctttgtgaaatgaaatgcaattttaaatggatagactataaatatttcaaacggaaaaataattcttgatgtctgtttaaagtaaatgtggtctttgtgcatgaatctaagaaatctaacatataaatatttttttaagtctgcttttttaaagcaaagacttttgcttttcactttggtggtttgggaaaaaaatgttaattgtatgtagccctgtggtattcagagaaaatgttatgagcaaagatggtgacagattttcagagacagcagtcctacatacaaagctacctttttccgagaaagctccttttgtagatgaagcatttggcagcagagtttgccgtacagttgataattctatgagtcctgcattagatccttgtctggactcgtttttgtagtaataatatacactggtgctagcagatggtgcccttcggagtataacacgaggccaggacaggagctcacccttgcacctcacacacctggtcctttacccccaaacgctccacatgcctcttgcatcctctaactctgtagcccaaatgtgatcatttaggtttttctaagggtggaaaaagatgggaaaaacaagagcaaaactaaggttaatattttaaaaactcatcttgaaaccttctaaatactgatggaagagtttatggtgtttgtccagcctgaacaggttaaccattttgcttctcttcccctatgttcaaagcagccttgtgttctgaattgttatacatgttaaacttttactaccttattaagaagtgtcacccgtctcttaaaattcctgtgaaataggtccaaaattagactgcgtcttcagaggtttcctgccaggaaaagcctttggttaaccccctactgacattcacaaacaggatttttaaaggtggtcttcaaaggtgtttttttctttgttctgaatgtgagttaaaatatatgctggctatgtctgataacttaagggagaaggcatcaggctactcatagagaaagtgttaccttctttcagagatgcacttaattagaacttctaaaaggacatcattagaattagggttcagtaggcaacatttagaacatggccacactgttaagtaagcagtaagttctcgagaatagccgcagagcagaagaaaagacatttatacctggctcaggttctctttgaaaacttagagatggtatgttccatctgagtggtttatttcgagtcttcacagtggtggagctattatagaaagaaaactgaataacaggctgtgctaaacatctacccttttaataatttctgacactcactagagtattaattacttgctgaaagaaataaaaacatttatgttactccaagaaccttaagatacacaaagtccatattttcagtacaagctcataacatacatgcataaatcatagtattacaatttatgattttgaatttacatagtataaactgttatatcttgctattttaaaaaatacagctaggacctttacgtacatattttatatcatttttacaaatattattggggttaatattacatataattctggtattaccataatgcagggtcaggtagacttcctgtatgcgagattaaattacagcccccattaggaaaccattagcagattcattgaattttctgtggaaccacgcaaataatttcatagttaaaaagtcagtgtaagtgtattgttgtatatgtgctaaatcttttaataaaattatcattttaattttaaagttatcataataaggttgcacattaggaagcttctttttttatggagttaattttctagagatttaaaaaattgtttctctcctgaatattgatcacagcctgaacccaggttgagagaggttggtttaaaaaaaggaaaggcacaactgcagcgagcacagatatgagatgctagtttctttccatcttgccctccctgcagctcagcactggggtggtgcctttgtgacctgtgtacggctgccagtgggcggacctccagggaaggcttctgctgtgcacttgttcgtttgcatgctgtgatgacagagtttttcaaaattgtctttggaagatgaaatgcttagtggggttttatttacctgctttaagatgtataagctgcgctatgtatgcagcgtatgtgcacacagtgagaaagtagattcaggagagggaagtggaagaagtcagtaacctgggacttgagaatttgatttcttttggaatagcatagcactcatttgtagatccccatgtagtaaagtaacagctgttgaatatcacaagaaaaagttggattaaggtctcttttttttgtgtctcctgttttgtaatagattctattcaccttacaatgaataatcttttttagatcacacaggccaaaaaggctatgtgaaaaggaccttgtcaatttgtgattgtagcagctggttcttttccactgccctggcttactgtgcatctggaagaagacttctggcagccggaagtcatttcatgtctaaacttgtccccatccttcatagaaaaaaaattttgatgatgaatgtcaaacacacattgaatgctaactttacttggtaattaaaaatactgataattgtaagtacttttgttctgtattctgttatttttgtaattcctttatatgttctaagcatttttctgcatgtaaatctatatgaaactgctaaaagacataggactttgacaaaaacatacatttcattttggtcattcacttctccagcttacttattacaaatatatgattctcacataactggccaatggtagctaataaatgcttcttcaaagtttatacctgtagttttgcttttaatttacatttcctttggtgaactcttgctttgaatgatactgaaatgcacgtccgaaatgctgcctggagcttgtgaaggacagtcctgagtgagtgagttaacaggggcttcttaactgtgcctccctttgtttaatttggattaagtgattctctttaaattaaggaaatgcccctgtcaggactttaaaaatgttatatatatatacatatatatgtatatgtatacatgtataatcagaagatcaaaaagcatttttatctgttgacacaggtctaattcctgaggaatttgtaactctgccttgatacgcccaccgcacccccacccccacccccagctttggcattgaaattcttgtgtgtggtgcgcttgaaaggaatcccatcctgcctgcgtctgcggaggctcccggcccgtgtttggtcagcaagcaacagtgggtggtcgggctgctgtgcaggacaacggcccgctgtgcgcaggaaaatgtgttcaaaggtgtttaagggccatgaggaagtcggccacccttctgagagtctgaggctgcagatcagtgttccctacactattgtagactgtgagaaaacttgctgtagtaggcatgaaggatgagaaaatacagtaaccttactcacctggctccgtgtctgcaggcttcccttaagaagggtctcttctgccctttttgtggtatagagtctgttaaaaaaaaaaataccgactattgaaaatcagaaagacttgcacagctttgagtggaaaggatttgactgatatggtttcctggaagtcctacagaattctaggtataataagcattttctatagagtctcgattgtcaaagattgtttactttcttttagaaaaatgataaattttaaatttttgattatttctacacttctagtgaagtgactaggattgtttcattagttttctgaagaaaattatttctgcaactcctgaaaacaaattttccaactgtttttctcttgttaaaatgtctagaggtatttttttctaattttatgtttgtttataatttgttaaatgtatctgcatacttaaaattagaaaaggaattttgaggatattgcaagcatatgttatagaagcagtatttaactggaaaaataaaatactaacttttgacttccagtagttaaaaacagttgtgtcttttttttaatgttaagtggttaaaggatttttttttccttccaagatactaattccaggcatttgtgataacatatgtatgttttctttgacatattgacaaaataataactcaaatactaatgtggggaagttaaaagatatagctagatcctaagaatatttatttccagaattttgttttgtatcatttttcctgcaaatatcacatagaattttgcaattagaaatactacggtgatgatttcccacactatagggtgatgtgcctgttcgcaattttgtattcagagtaatctgtagttattcctcaggtaatgttgagagattacaaccaaatgtttttgatcttacaagcactcactcatttgagtatgtttattactgtgcttactatctttaagatagccaggctgaagtccataacaaatattataaaattcggatacagttttcactgttactttttttttttttttttgagacagagtctcgctctgtctcccagactggagtgcggtgatgtgatcttggcattctgcaatctctgtctcccaggtacaagcagttctcctgcctcagcctctcgagtagctgggactacaggcatgtgccaccgcgctggctaatttttttgtatttttagtggagatgggggtttcaccatgttggtcaggccggtctcgaactcctgacctcaaatgatccacccacctcggcctcccaaagtgctgggattacaggcatgagccaccgcgcccggccacactgttacttttttattgcttttagtatttttgtgatgtaatttccattttaagacataattttcacatttgctccatgtgtagaggcaaactttttatacatttaaaacgacaccaccactgatcagtgtccaaaactgtacgaacagtgatcggaataaatgtcttttctgtgttgttctcagtggtgatttaaggtttctgatttaaactttgaatcatagagtcagaattttatagctaaaaagacttttagaattgcatagtataaagccctaatctttacaggtatattttacaggataggttagtgcctcggtgagctgccacagaacctgataccaactgcatggccatggaaattcttcataaaattagtccctgcctcaatttcaaacttagggaacaatttggtagtattggcccaaatgaaaacatagttataaccttttcatcagggcccaaggtaatcatttcctgctttaaaaaaaaggctttttaaaaattttcatccagaaaacaaattctaggaacagttaatttctatagaaaatttactgccaagagaacaagtaacctctgaaaactcctatcaatgcagcattagtttgaaaagggcagagtcaaacacaattttatgttgttacaggatgttaaaaactgcacccagggctggacacggtggctcactcctgtaatcccagcacctggggaggctgacgcaggcagatcacaaggtcaggagttcaagaccagcctggccaacatagtgaaaccctgtctctactaaaaatacaaaaattagctgggcatggtggtgcatgcctgtagtctcagctacttgagaggctgaggcaagagaatcgcttgaacccaggagttggaggttgcagtgagccaagattgtgccactgggctccagcttgggcaacagagtgacacttcatctcaaaaaaaaaaaacaaaaaaaactgcacccggccaccatatgctttatgtaatgtgtatagttttttaaatgagatattgctgtcatattgtaagatgaaacaaaatagactgatatgtgaaatatttaaagacttttgctgattttatattttatggaaactgtttttttcttttttttatagaaatgcttactcatgaaaccagttcatatttgtaataattttgtgagtcagaaatagtaagttatgtaatttaaaaggagtgtcagaattatcaaggtgtttgttttttttttgacacttggtcatacataatttgtgacaactggtatttaaaatgtttgtgttgcttttctcttcaaaacataagctttctaattctctataaaataactcattctgagattattttttgacagtaagaaaagtacgagtgttagggagagaaatacatttctaagctagtacccactgtttagttgacagggcacattatgcatttgtgtgcagctgtgaagcgctaccttctggacactcagcaaaaatacatcttccgaatgtattccagatgctgatagtccggaggggcatgtgctcttctagctccctgctgctgtgttatacttctggtaatgccagggtaccaattggaaaatttgttcacggttacctttgttttcctgatatagaaaactgatgatgtggtttctaatagaacaaaagcatagtaatacagtttctgttattaaaggaaaaaaaatcaatcttttaaccattacaaaactcaggatgtacttaaactatacaaatggtttaatattaaacaatttaaagttataaaaataccagttataaggagaaaactttttctgaaataattgtatttttgcaggaatggtatatgcgtattttcaggaaactaggaagtgttttccttcttaatcataaattcatagtcctaaaaaccttcaagagtaagtgaaatgtaacagtttaaagcattcttttttatactttaaaaatgtacattttaatataaattagaagtttttatatgtatttttaatgtgacgctaagtttgggcccctttatttttctctttaaagtatgttagaaaattcatattttgatattcatttcctgaattccacaattgatagaagtgacaactgtataaacttcaaaggaaaatgtcataaatcactagaacatccacacaaacatttttatatgaaaaaaagtcaattagaaaaaaatactttcttcactgtattttttttctctgtcacatttttttggtaacacagtggattttataagtcttcttatcttagctttaatattttcaaaaatacaaatgtatgcacagcatttatttagcacagtggccaaaacatagtaagtcttcaaaaaaacttctgttgcactaaaaaatctgttcaaatgatttattttctatttatctaagacctaccagctagaatttgtggggatctggagagagagatgatagtgtgtcacgtccaggggcacacggtaggagggcctcagtcagatcaagccttttcttaccacacaatcactatttacctcctctgcttagcgtttttttgctatagttttgttgtttatttatctattggtttattttctgcctccaccaccagaatgtaaacatcttgagagcagggccttagatattattcatcactttatcccccgggcctgcaattcctcacatgcgggagggagctcaataaatacctgttaaatgttattgaatagtttgcattatcagagacaccaaaatgttactttaatttggaaatatgttttatattagcacctgaaaacaactccataggcttttaatattctattaagttataaagtaaaaaatatattttttagtgtcagtcacttactacatgtggtgggagttatttgtggaaggtccaatgactgtggggaacatggagatatatttacttcttatccctgagaaaacagcagtctttggtggagataggcaatacctagctgttaatgaactacagactctagaatgtgaagtcgattaaattatatacataaattatatacattctcactgctgtcagagggcagaaaagataggtagcactttaggtagataagaggaagaggtgaccttgtgtaatagctgtatttcaagtggcatctttcaggatgtgggtttaaatggatgaagaagaaaaactgagtgaggcctttccagtagagaggatagcaaataaggcagcaaaatgtaaggtgtatttttgtagggagaatattcaagtgtcctatgcacagtactgtaaatactctgtaaatgcactttgaattcagtttattttgaagctctttgaatactcagctaaagagtggtgttttagactaacaaggtaaattttacctcttcaagccaatgtccttactaacatgcttggcaacatggaattctattcctaaaggcttttgtgatccattttagaaaaattgtttcctaattctcagcataatttggattggaaaacatcggggtagactttatcctgccggttttctggaagacttctcagatgagaatcaaaaaagcagtatttgagtgtgagacaataaagacaatttcttgatggtagtagaatgttctggcttctggcatatgaagtgtgaggtgaaaaggatccacactagatgactggcatcaagaaacgccatagggagtgaaatcccatgtgtccaagaaacaaatggtgggatttggggatttaagtgtaaagtgtggcattaagggagaagtcagaggagatttatgctacaaaaatgtgtaagtcagctacatttaaagaaacagaagattctgaactccattatctttcctagtgccaaaagttgttttgcaaaatgtgatttttcctgctactttttgtgtttatagcattatcctcccaccaccacccaattttgctgaactgagaatgacttttaaaatctgtttagagaaaatactttttattttatttaataaatgccttatttaagagtggagcaattgagcaagaaatagcctcagagaagcagaccattaaatcaactaagcaagagtatatagagcatgctatatactctgtatatctctcctttcttccccaggtaacccaggcctgcacagtcccatgttggatcttgataatgatacacgtccctcagtgttgggccatctcagtcagacagcgtccctgaagaggggcagcagctttcagtctggtcgagacgacagtaagtatctccctccactgccactgggtcttttaaatttgtactcgtgtaatttcaaacattcttctcttggaaaattccccaatttgtgttgatactggtgctaagtattatcagccatcatcgcttttgcttgttacagtaactaccagtaatttaataattaaaatatatattacatttaaaggaatgctatttgatttttaagtcattgggtgcaggtcagtgcttattaaacatatttagttcaagtctagttttactttttctgtggttgaatttttttaaagtgccacagaaaaaaattctgtgagaacttcattaagatggaatttgcgataaaagtagtatcagtataccttttttgatgaaatttaaactttggtctggaaagagggattggctgttaattaaccataaaatacttgctaataatttttcctaagatgaagcatctaaaattttaagtatgttgcatttctgaactttctggagtggatatttaccattttcctatttgagatacaacatgatcgactatcaggcattcttgcaccaaattagatgccactagtcaggagccatttgtgatctcaataacagatataagaaacccaaatagactaatagaaataccttacattgtattaaattcagatacctgtacagttgttttaaaatgtcttatattattcttaacaagcattgcagtagggaatttttcgaaggttttattaatataaatgaatgttcatcataagagcaccttaaaattagatgattcatttgtactaaatgaaaggcttccataactgttggtattccttcttcttgtccgattctcattcctctcccagctcaccaaacattagaacaaacaatgttagatcagaaccgtttgctcctacattctgtgggacagcagctaacattatataatgttcaatgtaattgcacagaggagctgagatcttttgaaacattattcttgggaaagataccatgtaagaatccatttgctgccatattaagctgtgttagtctgtttgtgttgctataaaggaacactgaggctgggtagtttataaagaaaagaggtttattggctcacagttctgcaggctgtacaggaagcattgcgccggcatctgctactgggaggcctcaggaagcttccagtcatggcagaaggcaaaaggggagccagcatgtcgcatggcaggagatggagcgagggagaggatggagagggagcgagggagaggatggagagggagcgagggagaggatggagagggagtgagggagaggatggagatgccaggctcttttaacccatttcccatttagggaaaaaaggtgcagctcactgctggtgctcacttaatttacataaacatgttctttgaggctgaagcaaatatcactgattttcagtgtgaaaacaaaatataagaactgttcttggaattatttctaaacaactcgtctctaatcctaatgtaatagaaatgtaaatggtgttccattaggattagagacaagagtgttctcggggcacacgggcaatgggtgaaacaactagatcttgtgtgaactcatagagcaagaactcactcattattgcaaggacaccaagccattcacgaggggcccgcccccatggccctcctgcaacattggggatcacatttcaacatgagatttggtggggacaaaacatccaaatcgatcaaaggcaaatctttcagtgcttccatttttagattttcttgtcctgtttttcaccttgtcattggacccttgacgcagctggccatggcctcgccctgtggcacgccacctgccatctggaaaacaggcattaccaactactgttggggagaggagtctgtaactgctgtctccagatgaaacccactcacctcagattaccatcatggtgtattcaattggttaattgactgttctgttagattctaagctgtgaaggcagagcctgccttgttcagcattcagagtgagttttgatcttgggtggagccacatgataagcacacggttaatcctcaataaatattagctgaatgaaaaataaaagtttacagtgtgcccttaagtaaagaaccgttcctttcacacctgtgaaaatgagtttaaaactttttcctgcaactcctagcatagacaaagggctaatatacctaataaataaagaggctctatagcctacacagaggacgtgtcagtggttcttacacgtgtgagtagacactcaaccccacaatagtaagaagaaaggtcgcataacactacaatgagatacgaggttggcaaaaactctgagtgtttatcgttttgttttgggttttctatgtttgtttgttcattgatgaggccactacttgcacgtgtcaccggtggaagtatgagggcatacttcctttagagggcagttcaataatatctatcaaaattacaaccacaggtgctctttgtcccagcaattcttgttctggacgttttctatgctttcacttgagcatgtgctaaatgatataggtatacagttactggctgaaacattcattttaattgcaaaagaccgaagacagtcttgtccattggaagggaacttgttaaattacgatacgtcaaaaatgtgaaaggcagtataactgtggggagaaaaagaggaagcctttgccttacgtttgaatacagaagaactccaggatccatcgctaaatggaagaagccaagcttcaaaagagtgtgtttggcctttcgtttgtgtaaaaaccaaaaacgtgtaaagaacagttgggagggagaaaaacacatttatacttgcttgtgtatataaaaaatatttcagaaagagtcacaataactagtgacagtggtttcttccggctgggaactaggcacttgggagtggaggggcaggaggtagacttttcactgtgtacctttcaggtgtcattttctaaccatgtattacctgatcaaataactatttaaattattaaatcattaataaattattaatacaattttattaataaaatttcttaataaaattaagaaattttattaatacagtttataaaatttgcccttccttcactggactaacaacagcaaatccttttgcttgggggtatttggaaaggaagctagcaattagcctggcccagggaataaacgttctcatgggagtccacctgcccctgaagttgctgagtaggagttagagcctgatccgcggcgtcattgtgctgaggactggacggggtggactctgcagtgcccctgccatggccaccgagtggagtgcggggcgggaggcaggtgggaggcagcagggcgaaggcatggccctgggagtgaaaagaaagaagggagacagaggacatggtgagtgggtcctgaatttctacacttgctttattcccatgaacctgttcttcccacaagaagtctaagcccttatttcccagttacagcaatagctatgttaaatgatgtatagccaaagaggtttcaacgtttctagtttttcttaaatttctttattttaggtggggttatttagtatgtgattgcactagaatgtttccttgtgataactggattccttcctgcattctcacttcccagggtgtatgatggcatttctcacaggctgatcagctgcaatttcacaactggctgcacagcagcccctgcctttgctgttagaaggcgggactttttgaagagacgtttactatccagaggacaaggctgataagtcaaagccacctcctctcggtagccctcccagtactgaggctgtggccacctggtcccttgccctggcttgctggtcagccatgagggagaggggctcttccttgccagagggcaaggagaaatgcgggggtgtctggtgacgagcgtaccgctgccggtgtcagccaggtgggccgcgagcgtccacgcagactcaggctattcctagtgcatgttggagttttgcgggagtggaggggggtgcgccaatatgctcaaaggtgttttcttgattcagaagtacaatcatagtattttattcttttcccccttagcgtggagatacaaaactccccacagggtggcctttgttgaaaaattgacaaaactcgtcttgagccagctgcctaacttctggaaactctggatctcctacgttaatggaagcctcttcagtgaggtgtgtatacggactcggctagaggtggagctgagtcaccgtgcatttctggtctttaaaatgttagatttaagtgattttttaaaatgtagaggcccaacatctctagccatcgtcatagtttaaaatcagttaaagcattataaagccctctcacttagtagctgtgtgacctcgaacaagtcacttttcctcatgtacaaaaagaatagtctgggcacctgtctcaaaaggtggttgtagggattaaatgagataggcaattaaagaaaaaagaaagctcgaactcttttcagggactccgaattgagatattgccagtcaggccaaattctgggtgatgtgcggtagactgtgaacaaatgaggaaacaaggatagcaccttggcagccggcacccggaacaaagtcatccatagagtatgcaatttcccttggaaaggatgtaaacattctgcagtctagccccattgttatcagcttacagaagtttttatgagcccgtccaccttctgcagtcacacatttattaatgctttagtatcttcatcatcatatgactgatagcatagaaggcatgaacataaaggaatgactctgttatgtgtggcacatggaagtcagtcactttctaacctcacctcaagtgcgccatgaaaggcctccggctcctggacatagattctaacgccctttgtcctaggctgccaagggcacccccgtgggagactgagaagacaggtgtttcgtgtctctgcaggagaccgactctacaccaagagctctgggggagataggggtcttctgagagtaaaggctactttctgcttctttttgacttggcaacacacaaaatggacatgggcaaaggctaaaaccatttttggttttttgcacaaaggcacagcctttgtggtttaaacctctcctccttggcggaaagtggctaagtgtcagagtacctcaggtgtctttggagtctcatttggccatgaccataaattcatgctgatattaaggaaatagagatgtgctctggaacttttttctttgtatatttgaactccaagtgcctagtatctccgttgtaaacccgctggattcctgcagccttgtttatgtgaatggttggttttctaacctataaaatttactatgtgcataaaaacagaaatgtgtaatgcatgaacacaaactccttagtgcagaaaaaccaatcgtgtaagcacaacttatcaatgcattttttctttagtttcagttatcagttactttataagtgaacattcaaatattaaagcaatacacaactttcttttctttgttagttatgtatgaactctattgaaaagttgactatacagaggaagttcttccatgaaacgaacgtcaggtttcgcaggtctacataatgagagttgcttattgctggcttaggaagtgaataatttcagttttgtcctgataagtctttccagtactctgcttctgtgtgtcaccatcagtttgtgtctctgtgatctcagctgggtgagctgtggggctcaccatgctgaggtcaagccttgggtcccccttgccctctgcacagtgacagtagtggcaccgcaggcaccagcttcctctctgtgtctgctctgtccctaaaccaaattgttcgtgtgggcaggaaagattagatgctcccctgtcatgcctttggacagatggcattcataggttttcacgcagaacactaggagcataatagaaacatccagtgtctatcacttcctagccgtgaccttaggcaaattacttctctgcacctgcttccataggactggtttgagaattcaatgagttagcatgagtgaagtgctgataataatgtctgacagataagtaagagtttgctgttattatttggagtaaaatttattccagtatttccactgtttgaaatctcatcggcctggcacatggtaggtgttcagtgaacaaaattttgtaacattagaaaatagtagactgatgaactgctggagtagaattgaataatgtcaagctgaatcaactcatctaaagaattagaattactcttttagggccaggcgcggtggctcatgcctataatcccagcactttgggaggccgaggcgggtggatcacgaggtcaggagattgaaatcatcctggctgacacggtgaaaccccatctctactaaaaatacaaaaaattagccaggcgtggtggcgggcgcctgtagttgcagctactcgggaggctgaggcaggagaatggcgtgaacccgggaggcggagcctgcagtgagccgagatcgcgccaccacactccagcctgggcgacagcgcgagactccgtctcaaaaaaaaaaaaaaagagaaagaattagtcttttaggacatggattttaagccgtagtgtttgtttccagccaagtgtttttccctcatttgcatcagttcctacaagtggcccaccacacatggacagtagttgccttccctggagtctttttgagtcataagattcctaagaatttttgatctaggatattttagtgaaaagggagtatgttttgctttcttacagattacataccaaacatataaatgaaatatttggtcgtagatgaaaaataaatcatctacttcagaactcatgcacaacattaatggtgaaatgaaaaaatgactcttaattggttgtgctgaattggatatgcctatgacgtgtctacctgtctatgtttataaacttaaaagcttatagcaataattactaattacgtgtaatttgctctgcagatttgggcatgctttgaaactgtgtgccctcttctgaagagctagaggaaagcgcagggctgtaggaaggagcagaggagctggggacacttgcttcccttgccggtctgcaagtgaaacccagaagctggattgaattctgggaagagttctggggcttttgatagctatttaatctcacacaagaaagcatgatagtttttaaacacaatttatttgaattttcttatttttcttgttataaaactatcttgttgtattaagagcccatccgttaaaaatttagatgaagtttccaacagtttaaaaaatagtcagttcttcaagccagtgaaggccatgtgaaataacaaatgtgaatcaaaacagtgaaatcagccgttgctctcaccacaaagcagttttggtctgcgtgtgcaggaaagagttaaggtttctagttaacgaaatggttaatagtaggttaagatctcacctttagatatatcttaaatatagtgtatttttagataaaaatctttaaaacagccaaataattgatgaatattaagagtcagcattttaaaaagttacataactcaataatatataaattaaaatgccttacatattccaaaattagattttcttttaaaaatagggcaaactttacataatccattgtgttggagatattcagctctattaaattaaaacagtaagtaacaactgaaagcggtctgccccacaactagttcccttccccgtctacttttcatgtgtttggagacaaatccttgaattttacaaaattactgtccagtacatttcctcatgcactcatgaacacctatttgttgggcaaaattgttgtggcaaaatttagccttaatttttatatgttttttaacaacagattttcacgcttttctttgatttaaaaatatgtaatagaacaaatgactatgaaataatcttcgcattgcacagtcttactatgtacaaagtttggtatcaggtactgtggaggatacaagcagaggatatgccctttgacagtcaagactcttgcagttttatactggcatgtgcctccctccatagcaggtgaagcaagcgtccacgaatcagggtgctccagggcaatagaaccaataggatgtgtatgcctatccctgcactcacacacacacatacacgaagagatctatgctaaggggttggcacatgtcattatggagactgacaagccgcaagggtctgcaggatgcattgcccagctggatggccgatgctgtaagctccagtttgaatgccagccggctcgagacctaaggagagcacatgtttcggttcaactatgaaggcacataaagcccacagtgtcccagcttgaaggcagtcagacaggaggagtgcctctaactcatgggaggatcagctcttttgtgctgttcaggccttcaactgattgagcgaggcccatccacatcccggagaggttctgccgtgcacagtgcattgatgcgcatgttaatctatccagaaacacctcacagacacacctagagtaatgtttcaccaaatgtctagcaccctgtggcccagccaagatgacaccaaattaaccatcacaaggtccttaacaaagatttagctcctgacattccagtaggtgctgggctccgcagcagtgtctgaattcaacaagcaaagcagtcctcctaacccccaaccgtcacacaaagctctccaacctctgctcatcccatttgctgacatctgacatctccgggagaagaattgggcatgttaggtttttcaggagtaaatcatagggttacgcctggcagatctgcctcccggggccactctcatgtcgggacccagagcgtttggggcagttacactttcttaagtatattcaagaagatcttggagaaccctaaccctaggtgatcatttattcaccagggcccaggtactgagacacacatgcatgcatgcacacgtaatatacacatgcacatgtatgcatgcacacacacaacagacacacaacacatcatgtacacgtatgtagacatgtatgaaacattaatgtataacacatgcatataaatgcatgcatgtactcagtatgtagacatacacataaatttacacatatacatatctacaatataaataaaagtcaccaaagtaagcatgacctttcctcttctagagacagaactcaaataatttttttaaattattattttaaaaattctggtaacagctataaaagaaacaaatagggttgtaagacagaatatcagcaatgggttggaggtcagggaaggccgctctctggaggtgatattgaaactgacacatggcacaagagaaggacacaaccacacagaggatggggggaagcaggccccaggcagcgagaaggacgcctgcagcaccaggagggcagctcagcttatcagaaaaggaagaagcgtcctgagcagtgggagggctgggagggacaggcccagctggcagtggcttcatcccaggccatggggcggggaacagaccagctttccagttttaaaaaacccaccttggtggtgtgttcagaatcaattggtggggacaaatgtgggggaaaccatggaggtcctccaggcaggaaacagtggtggtttggataaggtttcgtcagtggagttggagagcagttggtaggtttggttgtattttggacgtggtgttcaggtgagggagaggaaagcaagaattctgacgttgctcgcagtgggctcctgagcaggagtgccgtatgccaagccagaaagacctaagaaagagcatgcttggaggaagcttcagatttccattgataatgtggtagattgagattcctgggagttattcaatattcacatatgggtcacagaggagatatttgggctggagatagactttggaaggcattagatagaaatgatatttgaagccacgggaacaaactagacggtatagacagcaaagaaaaaaagtacccaagcctaagacctaacaaactgcaacatgtagaaaagagctatttgtcacctcagtgagcagggcattcatttgctcgatgcccataccccataccaccaaccacgttctgattctggtcttcacactgggcagacagaaagcagctgaacagacactcagagccgctggtgttagccgagcgggcgtgcgttaggtgggggtccctctgcgcatgcctccttcctcactgcagcaccagggcagtaggttctccttcaggcggcctgtctcagccacctgggctcacctgctgctgtctcagtgtggctgtgttcacctgggccactgcaacatcctgctggctggtcatactcgcacactggcccctcattccttcttcttaatgtaggcctcacagcactcacctgcttaaaacacttcagttccttctcatttgtcttaaaaataaaggaaaaatcaacctatgagttaaaccctggggtacaaagaattttaagtgtcattgaccagtgaactcaggagctagctttttgaatgattattgagatggattgcaggtttagtttttatacatacctttaattctttcaagacaaaaacatatttctacaaagaaaaaaatgataaaagctgcgtagtttaatataaaatttaaaaatgaatggaaactacagtttgaaggatgttggtctgtgtatgtgctgcccgtttttttgtcaggtttgtctgatagttctgttgaaaacacccaacaatcctaacccatattttacttacattgatatgttcattatataaactaaccctacacgcagtttttatagcttatacagaaataaatatatatacaacgtgcataacattgcttgtattttaaaactgacttaaagtcaatatcatgataatttataatgcaactgttcttaacttgaaaggtctcttgacttgtcatgcattaaccgataaggcatgagcattttcaccttaaaggttaacttttgcattatgtcaatgaagtgtcagaattttattttacattgtataattttgttaatgcttctttatttagaaagcttcctgggcttgtccttctaggttattttatataaaaatatttagttagaaaatttgttaataaacagttctctgaaatccaactgaacaggcttctcttttagtcaatataaagtagttttccatacattaaggggaaagagacaatggaaaaaaacatgagttatatcagtaaacaaacaaaaattaattctagaatgatagaatgtattttatcctaaattacactgaaatctctgaaggaagagccatagtttatagtatttaaaactaaaatgacagatttcagagtttaggcttcctttggtttctttactagctaatgagaaatgatgttgacagtgttgtcgtgggtatgatacctgatggtttaaccatacgacatcgttggtgaaaatggtagatgaaattcacctgtaaaatcggtagtttcaacttaattcttggattcattcatgggaattgtacgtaaaggttttagaaagataaataacttctcattgggataagaaaggttttctaatgaatcattctttaatcagaaacatagattatgtcttaagcatttcttttaatcaagttataaccatatttaatgttctcttgatgtacaagtgctaaagcatttcttatttttaaattatttctaatatgttttattttgtttttttaatttttaagactgctgagaagtcaggccagattgaaagatcaaagaatgtaaggcaaagacaaaatgattttaaggtgagtaagggtgataagtatgtagaccttttcacagggtagggtttttcctttctcactttgtattcaagacatccattactgcccaggcagcatcttttagttaatgtaacccgattaatcacatttgaacacggttatgcttgttcctggttttctagaaaatgattcaggaagtaatgcactccctggtgaagcttacccgcggagccctgcttcccctcagcatccgggatggggaagccaagcagtacggaggctgggaggtgaagtgcgagctctccggacagtggctcgctcacgccatccagactgtaaggtgagtatggacacattctcagagaaaggcgtacttctgttttttttaactttttggaaagaattaatacattcagtgaagaagaaattcttctttttcttctttttgtccttttgcctccactgtttcctgttcatcatctgacagctaagctcctcactgttcctggtttttgtgttggactagaatgttcttgagtttacgcatcttctccgttgtttcactcagtattactctgacagtacagtcccagttgtggtctgtttctgttttcagcctaatgctgtagctcgtaagctccgtgaggaatgattatacagtgaaagagatgctagggattgctttgcgatcccactctgctcacttctgtttggatgtgtttgttcgcagacttactcatgaatcgttgactgcccttgaaattcctaatgacctgttacagactatccaggatctcatcttggatctccgagtacgttgcgtaatggccacgttgcagcacacggcggaaggtgtgttttgataaatcggtgacgttcactgtgcaatgattatctgaatgtgccacctcctttcagtgtccaaatccttgaaaacaagggaaaattactcttctggaaattggaatatattagttcatcttatttctagctgctcaataagtgttttttctttttgtgatgtattgttgagaattaagaccatgcagaaactaagatggatacacttgaaaatgtttaaagatataagaatattgttatgataaatgttaagtagaaaacatagggtataaaatgtacataaagtctgatctcacttttgaaaatatatggatgtatatttttaaattttaatttacagaaatcaatgtccaatcaaaggaaactctgttagtgttggttctctggattccagaaattatagatgattcttgttttctttatactttttaaatttttcaggcttttctacataaaatcataaaaaaaccataaaggttttctttacaaagcagccttttagttattaaatattttcaaaaataagaacattgctaaaatggcacaggcctttactatctactaccaggcttggctttttaggtaggaagcttacatctctgcaaaattggtgggcgatactgtgtaaatgggaagggaatggaacccaggtgagaagttggatattcccctcttagttgattacctcctcctcacctaggaacctgagcctgccccaaggccgaaggtttgagcaggtggcattcccttagccaactgagaatcatattgcccttgtcaggaatctgtaggattcaaaaaacagccaaattactcatcagaaattttaggaaaaaaaatactgtatgacttattttgtacatgcctagtgttgtgaagaatcctgaataagtaataaatgattgtctcaagttgtcattaaatccaacgtagaattccccaaattgggctatacagtaaaaacttttattcacattaatatcttagtagaatcatccagtgaacaatatgtacttaaatcatcaagtctaccaaaattatattctttgcctactttcatcgagtttttacaaacctatataaaacaatgaaaaaccataacctgtatacatttttaatctgtataaaatttagtgagataattataataaagtatttgtgtgcttcttctcatatagaaataaagagattagctgaaaaagaagactggattgttgacaatgaaggactgacttctctagtaagtttaagttcttttcaattattagtcattagtgtgtatttaaaataaatagtttatcatattaatagggagcatgtgctccatgtgttgcagctctaaatagaaatagaagcttcttaaaggttttcttctcagagacatttttgcttaacacgaaccataaatattgaaaaattaatgagaacaatgcgtttcttttagacttgacctttttcatcctgtataacttacgatttttgtttgaattagttttttaaaaacagagtatgctcaattctaaattactcagcaacttgagcttttccggaaagcaggatagaagagatgacgttgctggctccaaagccaaaacaaaccaaacaaacaaaaacaaccaccacagaccactgcagatacattctcaggccaggcagccaactgtgacctgtttctagaatcttcatcttttcagctgggacttttaggtttaaaaatcatcttcatgatttcacgggttttcacacttgtctcacgggtgcccctcgcggtcctgtgggtggctgtgccagtgacgatggccaggcagcggccgacacatcccagtggctttcaccagggggggacttctgtctctcacagcagcctggcagcgtggtcacacagtcagtgcccagggctgcctccatccttcttccctgtgacccttcacactgccttctactcaggctggcctcggggtcactcgtggcctggctgctgtcaggaagaaagtccagtcccctcccaggagccataacttgcaactctcctccatctaattggtcagaacacattccatgcctgtccctgttggcaacagaggtcgggagagcacgtggctgctcctgttttctgtcttaccttattaagaaaaaaggataggctgggtgcggtggctcacgcctataatcccagcacttttggaggccgaggtgggcggatcatgaggtcaagagcgagaccatcctggccaacatgctgaaaccccgtctctactaaaaatacaaaattttgctgggcatggtggtgggcgcctgtaatcctagctactcaggaggctgaggcaggagaatcacttgaacccaggaggcagagattgcagtgagccgagatcgcgccactgtactccagcctggtgacagagcgagactctgtcaaaaaaagaaaaaaagatagcaatcctaggaggcaactagcagtttctgcctcagataaggaaactagaatgaaatggtcttgacttgcccagatttacaaaccagtgatgagtcaggctatcaggaaacaatgatcctgcacagtatttttaaattcccttgaatttctatatagtcgtgccttggtatcctcagcgaaggctggttccagatcccttcatataccaagatctgaggactctcaagcccctaaaagttggctttctatatccttggactctctatccagccagttccaccattggtggaattcacagaggcagaacctggggcatgaagggcagactgtacttctcatggactgtcttctgggggctggggaatttttgactcattctattcctccaaagttcaaggtcctatcttaagttaatatatcattgtaccttactttatatataacaaggtgatttagaaaagcaatgcttttttgcaaattaaatcatgcttgaaatgagttagggaagtttattatttttaataagtcaattaagattctattttaaatgctttatttttaataaaaatattttaattgggccgggtgctgtggctcatgcctgtaatcccagcactttgagaggctcaggcgggcggatcacctgaggtcaggagttcgagaccagcctgaccaacatggtgaaaccctgtctctactaaaaatacaaaaattagccaggcacggtggtacatgcctgtaatcccagctacctgggaggctgagacaggggaatcacttgaacccgggaggcagaggttgcagtgagccgagaccgcgccattgcactccagcctgggcaacaagagcaaaactctcatctcaaaaaaaaaaaaagaaagaaaattttaatcgattgggtttctattcgtcacaattatttgtatttaaatagtgactagtctatagctaattctccctcacactaaatctttagagaaaggtatggacctgcaccacctgcacaaaaggcagaatgtgaaccatctccacgttttacatgcactacctgggaaataataatatttggatagactgcattaaatagattatatgaaaattgactttatgggtttattttttaaaagctttttaaaatgtgattaccggtaaatctaagatttcttacatggcttctgtttgtggctaacattatacacctatcggacagcactggtgtgaagggaaaacttattgcacttgatttggaatcagaacctacttcaatcttccatgtggtcctaaagaagccatgtagtctgtctgaccctagagtcttagtctgtaaacagggagcagaacacatcttcacagtgatgtgggttaggatacaatgagatactgtggaccgaagcacctggtaaactgcaaagctctggacaaacataaaggatttttatttgttaaattaatacttgtgatcactgggctactatgataataatacatgaagtttactgtgttcagagctcttttctatagacctatcctaatgatcacagcaagcctgaagacaggccagaagggatcattgggccaccatccactgaatcacttgcccgagatgaagcaggtgcaggcaggttagacatacctgcctcaagtcagttatgtgcaaatggaaaaaaattatatgttcagtttgagaaggcagagtctgctgtcagggtcctattcctcattcttaaaatctgccatcaattcagtaactctgagccataaaacagggattggcttcaggtccttcttcaggtcagtgcctcgggtacacgtggtcagccagtgtgtgcttccctggaagcctccagacctcgtttgcctgattgtagtatatcagcctctgtgaaaatgctctgaaatagttacttcagaagcttctttgtagtttatttttaaactttaagtagtgcaactgcaaccataaaataactgatttcatgtttgatctctcacacaagccacataactatcggcagggacgaaagaactgacccccagtgcaccttgcgaatgaatgagccctaggaaatagcacgtctggagtcagccaagacattgtctagccagaggtccttgaagaagtgtcctaccacgatagacctgataacactgagtcagttttttagctattccgcgtggacctcttaagagaaaacgtgaatcaatgtttagaaaatcccatttttctaaacattagatatcccttaatgggataatcccattgcttatcccattgaggacatcaaggtcaagcactgcctcactatgactgtccctcggctgaggcattctctctgattagagctttgcttcagagctcagaaacagctcactcgaaagcatcctgttttcttctcatgctgaaaatggtttctgcctcttttcaatttggataattctgagattctgagaattttcttctttcagaagaactggaatgatttgtgataacttttgacagtcatctaaattggatgactcactgacaatacacagagacagaactatttcttttgagaaaaaagaaatagtgaatgtgtagactatcacctactcccggttcaactgaaagcactcattgaactttctagtattctgtttctacttattatattagtgtgggtataaaaataaaattaataagaaagttgagtccaaattttaatagaagaaatctaaacaaccacacatgaacatcaacatttacttattttttttttaatttttaatttttttgagccggagtctcgcctgtcacccaggctggagtgcagtggcatgatctcggcttactgcaacatctgcctccctggttcaagtgattctcctgcctcagcctcctgagtacctaggactacaggcacgcaccaccacacccagctaattttttgtatttttagtagagatggggtttcatcatgttggccaggctggtctcgaacttctgacctcaagcaatccacccgcctcagcctcccaaagtgccgggattacgagcgtgagccatcgcacctggccaaacatcaacatttaatggcccacggttgaatttcagattcgattgtcaatattatagtaataattatcattgtaacatcttaaattttcataccttctgaggtgggtaggttagatgagtaaggtcagtaacctaacaaacattttgcctctttaaatgctttctgtgcagttggtatttcatcctctatttcttattttattactgtttttgtactttcacttttaagtattctttataatgccctctggtggtttcaaagtgcagaaataacatgacattaaagctgaggcactgttttagctttcattaagtctgggttcctttccataagaaaataaacttgtctttttaaaagatgtatatagatgtcacttcctttcttctcttcagtttttttcccaaactcttttaaaaattaatgcatgtgttgaagagaggttctcagtcccagtgttttgcacacaactgcttggttgagccttgagccttccatgtctcgctgctccggatgaagcccggccgcctaccccatctctcaagacctgtgctcatgtttggtggttctgacacgctgctcttgtctcgctgctccggatgaagcctggcctcctaccccatctctcaagacttgtgctcatgtttgttggttgtgacacgctgctcttcctgtgctcctgctttcccagtggtttcttgcccactctgcggggtgggtacactgtcgtcctctgagaacttgctcctctccttccctgttccttcaaagggctggtccctcttccccttcccgtctcagcatcaatgttctcacagtcttgggggccttctatgaccatcctatttacagccgatcccccatcatgattgttctctcagttcttcttcttttcttttttttttttttttttgagatgaagtctctctctgtcacccaggctggagtgcagtggcgcaatcttggctcactgcaacctccgcctcctaggttcaagcgattctcctgtctcagcctcccgagtagctgggactacaggcgcgtgccaccacgcctggctaatttttgtatttttagtagagatgggttttcaccatgttggccaggacggtctcaatctcttgacctcgtgatccgcccaccgcagcctcccaaaatgctgggattacaggcgtgagccactgcgcccggccaaattctacttcttttattcatgacacttactattttaattattttatttctatacttttttaaaccattttgtcaactttgactttcatgatcgtgtcttctgcctgaaatatacacataatgagaattctgtcttacttattcctgtatcttccttaacctagagtagttcctggcacaaagtgaaaacttaaacacccttaggagctaagattcattctagcttgtcttgaaatgccattggttgggcatattttcaggtttcattttctgacttaatgtagatagaaaatgactgtttacaatctatctgatataaagatcctgtacatcctctaggtcattattattatcattaaattttgtttaacagttccagagatgtggaagatctaggagactcagctcatcccagaatatccttcagaattagcattcaaaatataaactcattatatctgctcctcgttgtatattggcctcttagaagagtagaattttgaagaaaatttttagtcatatctgagttttattgtagttgaattagatatactttggagtctcaagattgattcattctaaaatacgaagtacaaaacatatgccaaacctctgaaactcaatgactaggagatgacttttcagatcgtgtgtctgttccattccattaatctggaaaatgtggggcttggggccatattcgcttgtgttaaacatgtcttcacagccagtgctcatttttgagttttacaatatgctgttttcccttcagccatgtcagtttgaacagtgcatcgtgtgttctctgcagtcactgaagggggttctggagtgcaagccgggagaggccagtgtaagtattccagctccgcttggactccagtttcccagggagccttgggaatcatagttgtaaatttttgactcatcgtactgcaagatcttttctccctcttcgcctgcttgttccatttagtttaactgcgtagatgtgctgatttccgattccaagccaggccgatgcaagttaaagtgtgagtgcaggtgttgtaggtggagtggttacagtgatagcactttgtggacagctattgatgggcctggctcttgaccatcagcccaggactgcgttgtcttctccagcccaagtcactacagtaaggaacacctcccagtaggcccactcttcgcacgcctccttttataggaagggcaccactcctgcagcagcgttccacgttttaactgttcatatctaacttcatatacaaaaaccttttcttagcaaagtccaaaaattttcatcaaaattcttccttacaggtcttccaacaacctaaaacacaggaggaggtttgccagctaagcatcaatataatgcaggtaataatagaaagcagtaatgctgaaagcctcaaataatactaagtgtcagtcaacccctctcctatttataatctgcagatgacgttcaccaaataggtattcttttttcatcttgtctgtgtacataatagtttaaggtaagtgggtaacaaagtttaatgtaagattaattccaacttgttttagcaatacccaaatgtttcatttatgttatgctccccttttttgtgttctcttggtactttctatgtattctgttcgagcacaacgtaaattaaatgatatttagttgttcacattatatctagggtataaagtattgttattgggaccagtgctttgcaggcacataaagttgagaatgtgggtgaatgaataagagaaagtctttttccggaatatatctttacaaacttaataattgatcaaaacataggcacttctaattgtctattacttatgtgatagatatggctgggatatatatttctgtcattaatggggcatatacagtatatacacatattcatacatgcacacaacaccacaccactaatgagatatataattctactttatgtaaagttatctttagtgtccaaatagattaatgtctaggagttcattcctctgagagttctgaaacttatgttttcacttaggtttttatatactgtctggaacagttgagcaccaagcctgatgcagatatagatactacacagtaagtaaaaattaaattaatctcattaatgcatttaagagaattaaaaatacaggctcaagttttatgcttggtcttatatcctaagacttctagtaagaaagaaagattgttcatatcgaagtaatagtttttttttatattcgacctatattctttccatagtttatcttttcaactcatctttgccttattagagacaaatcaagcaaattgaagacatgattagcttattaattatccaaagaacaggttttataaataataaagtgttaaatgtaaatatgtaactcctagttgatgatttttacaattctggtgttagggggaggcaccattgctcttgctagagactaagcatgttggtagaattatgtcaagcttagttattggagctccagtggacacatgttagctcttgatgtttacaaatccatatggtaattcttttataatgctgttgtataggacagcattgtaaagtgctggttttttttttaagaaatccgttctttctgaattatacttggcatgtgtaacttctgtgtactttatgctctgacacagataatactgaaataaatgcctcttatatcttcagttgacaacttgggaatttatccatgtttgtctatttactggttttggcttttgcttttcagtatataaaactatcacctccctagagacccaataagtttttaattctcctaggttttctttgatttgatttcatatttttagctcattatttcaccaggaattggttgttagtcagatccctcatattatggattaaatgtcatgttgcccatgttaacagattatccatagtaccttcttcgagctgttaactgttaagtctaaaacacttattaaaagtttctggccggacatggtggttcatgcctgtaattccagcactttgggaggccgaggcaggcggatcacgaggtcaggagtttgagaccagcctggccaacatggtgaaaccctgtctctactaaaaatataaaaattagccaggcatggtggcgggcgcctgtaatcccagctactcaggaggctgaggcagaagaatgggttgaacccaggaggaggaggttgcagtgagccaagaacgcaccatttgcactccagcctgggggacaagagcaagacttcatctcaaaaaaaaaaaagttatgtgactttcaccaaatgttttccatataattcattgcacgtttaaatttgcgtatagttcattgcatttttgaatttgagtgctttatttgtaactgttcctacttgcttctatgttcagtctctctgttgatgtttcttcccctgacttgtttggaagtatccatgaagacttcagcttgacctcagtaagtcagacgataactagaaagtaaaccattttaaaactgtgtaacaacaatttcgcaaatctaatgactgtgttcctgcatccttgctatagcacgtggtataggacactgtgctgtgctttggagctctattatgtgaaattttcaggaaagtataatttatatgaatttcacaattaacacttttagctggagttgcagtgtcagtcattccatatactgtctgcatctgtgtggtttccgagtgttaaatgggtgcccttatagttcctggtgcttgagagttgccagggtgggttggggagcaggcagaggacaaggatgcccaccccctcacggctcctgcctcttcaaccagagtagttctgcttttctctgttttatttctataagttccatcgtagccttttatttgagcacagcctcaaatagatacacacacacacacacacacacacacacttatacacaaacagatgtatgcatacactgcatatatacatatgtatatatacacacacactttttaaaatgtatacatgtatttaaggagattcacaaacatatattatcatgtgtataaattcatctgttgaaactcaaactctagctatcataaataaaataaccctttctggccaggcacggttgtcatgcctgtcatcccagcactttaggaggccgaggcaagtggatcacttgagatcaggaattccagaccagcctggccaacagggcaaaacctcgtctgtaccaaaagtacaaaaattagtctggtgtggtgtcgggtgcctgtaatcccagctactcgggaggctgaggcaggagaatcgcttcagcccaagaggagaagcttgcagtgagccaagatggctccactgtgctccagcctgggtgacagagtgagactccatctcagaaaaataataataataaataaccctctctggtttgtcatgagtttgaagggggggtgtgtgtgtgtgtgtgtggtctgtgtctgtctcaaggtaaaactgtttgacccaaatgttctactatatatgtaagtatgaatacctaaataagggatttggtatattagaaaaaatatagtttggtcaaagtaatttaaaaaattattctagattcaattccttggatgactaggtagagaatgataccattcactgagacagaaattcagggaaaacacaggctcacgagaacctgggttttttttgttgttgttgaatgggtgacatacaggtagagatatccagtgggtgattgaatgtccttgtttagatcccaggagagaaatctagatacagatttgtgaatcagcagtatataagcaatatataaggcctgggagtagataagaacaccaagaattctggctgaacaaaagaaaaatgctggttcttctgttcacccagaattgcaggtggagtcgccccaagagtggtggcgggccatcccgagccaccccaaaatgaggtcagctggccttccaaagcaagaagcatgaaatgcagggtcatcagtgcaaagcattagggaacgacacacagagggggcggcacttggtcctcacaaggaaaagcagggagcgacgtcctgcctaggtatgtcggcagtgagggggcctgggtgtggacttcatgggagggtttaaagcatttgcctcagggcggggctgatttctgctatttagcaacgtggttgatctctgtgttttctgctatagcttaaagagcttcatcggtgcctgggaggtcatggtccccacttgggtgcaagcctgcaggggaaggcagtcagctggcccagtcagagccgccaaggcactctgtgctcctccaacagggcgcggagagaaagcgagggaagctggggaaccctaccctcactgaatgagagaagggccaaatatataaaaataatgttgagggtgccagtatttatgggctcaccagtagcagagagcctcagtttgccctgaaaagggttaatcagagagacagaaggaaatccagatagagcagcactcctgagagggatggaaaatcccatttaaacaaaggaatgcttagcagccccaagggctgaggggcttgtggagcatggaaatgcggcaggctaggggagtcctgtggagacagggctgcaggagagggcctcccgaatggagactgctggagtcttccccttgctggcactctgaatcctcaggcactccctcctggtgtgctgtgtccctgcacttggggtggtcctgctcttgtgcctcttccagtgggtggagcacaagagtcagccctggactccctgtgacgcggcagctctcagctgactcacattgagcctattctcagctatccccccaggcacctcacatgtgtctctgcaggttgcagggcctcctctctcctgccttagtctccagtgtttttttgtgaccaaattcagttcctctgtattctccattgaaagctatctcatcagatttggtgcgatcttcttagggtcttgttctgttatccagaagggaagcagctgtggtaaggaaggtatctagattcggagtcagaagacactggttcgcatcctgtgtgacctcaggcacatcactgagcgggttctcctgaacggaacgtgggggatcactgaaataatctaagaccatattcatcacctgcacgtgctacatttgatgggcggcgttgttttcaaacgtgcgtctccatcttagttgttaataagcttttgactagtcatccacggtccagagtctgtgctgttcagtttttctttccacttttattgcatctgaatgattacatttgagcaacaaatgtacttataggaggaagactttaaatcactcaaatagcttttctgttttttaagagtcatgcaaattacagtgagaaaaacaaagagaatttacagggcagagaagatgtggcaggctcaggtctgctagataaggagacttgactctggaaggaaaaagtaactaaggattgattttcaaaactgagcaaccagctgacgtttttgaggcgaacagcatgttgaaggcagctgatgaaatgtgaggtttacttactccttgtccttacagggactgcgtcatggtgactccaggcccggggactggaggggaatgtagcgtcctcgtccctccctcacctgggcgagtttccagtgcttattcactgttttccttctggccgtttattcacgaaacgtggaggagtatcatacataatacaaccctatttaccttgtcttataccccatttcctagccatagagtaactcaaggccgttcgcttgtttgaagatcctttaatactccctaggccttttacttatgtttgttgatgactagaaacaggtagtgaataggctacacactctgccagaaataaagatgggaacattcaaaataaaagaatctagaaagtttttggaaactgctgagctgaatgaaattattgggagatataaaatactcttggtgactaaattcaaggatgttatcttttttcacatatccaaaaaaataggaagctctttccacattgactatatcgaattactttcctgtaagttattctggttatgcacagaaagagcatgcagagtatgtgatggaaagtgttttttgccaaaggtttagtcaaaggatctaactcaaggctctagattagtcaaagttgttccagagaaggcccgcctgcctgcgggagcacaggttgggtgcctcggtgaaccgcaccagcagcaaaagggcaattcctggaattttatttaccaggtagtcttgaactgtgaaaggacactgtgtttatcagcatttgtgtctggtagttttcgtaagaaattactttaggtggacagaaccctggagaatgtagaagtaactggcttgtaccccttcctcttggcaacactgaccgtgtcctaaggtggagtcctccaccctcagtgaccctcactccccattagagggagattattccttgttttcttctgcaaacacaagcaattcttaatgccctaaggtatttaaaggagcccatcatacagatatatggcagtgtaattctgttccaggttataaaaatttataaactactttataatagtttctacattttaaatgtaattagttattaaaaatattcctgtagccttttcttgtatacaaagtattaagtaaacaatatagtagaacacttttcataagcaacactgatcccagttcccagctgatcctagttaatggaattttctcaatctgtttttccatccaagctgttaagtcttaaaggaaatatttgattctttagtatattgcatgtaattataagcaaatagtagagttgcaggattttactgtgtttctctttatgttataatattgggaaagaagcagccaagaaaagcaaagcattggatattgacgttaaagagcagagattataattaaacttgacaagtgttaatcagctattctctctggcaccataaaggtgattttctaaacatttgttttgcttttaggaacagcgccttttgatagtcctaagtaattgctgctatctagaacgtcacaccttcctaaatatcgcagaacattttgaaaagcacaacttccagggaatagaaaaaatcacacaggtaagcgagttcatgtaaaacgcacaagtcggtggttttaccagctcagttttcaagctgtttcctagcctgtgttctgctagcagtgcccattccctctgcgtgccgcccccacagccacactgcttccccgccttcaccctgctaaagctttggatgattcccttccttcccatggttcaccttgaatggttaatttaatacccttttcttttctctagagcagagctccctcaaggttacagctggtttactcctcacctgagctgttcaaaagtgagggaagaaaatgaggagggaaaggcagcaaacccagatctttcagaattatctcatatttgactccttttaggtgaacgctttagatacagccagcagcaaactccctgagcctgcagaaaaacctcttcctgcgtattcacacctctccttcctctctccctttctgtatgacctcaaggatgcttttgctttgctgctttgtgcatgcacgcgtgcacacacagccgctggctcagaacagctgcaggatgctctgcatcctacctgaaaaatatgtcctccccactctccaatcactgcacgcagaaagattgggcaaaagggagtccagtagaaattaatggagtgagttttctttttaatgttacactttgttgtttatatttttttcaactaagcagaaaaggaaaaaatgaagtaaccttgttattaaggttgattggttcctgggcaaaggtttatcagatttctcagtaaaactatgctagtaccactttttaatgtcagtacagttttctcaatgcaaagaatgagaacgataatgatctggttaatcttataatcaacacgcactcagggttacctactttttataaatggtggttccagttcgtgaactacattgggatttttttttcaaagagtgaaaatgtcaaagtgggcggccctgtcttgttttcctgcctttttgtaaagattaatcatcctgatgagaaatgtcgtgacttaagcctttggggccaaatgtctagtttatttccagaaatttttgtgttaagaattgcaaggtgctatcttgcagtaaaaaagtggctatttgtagaaggtggttgctttgtttttatataacaacaatgacatgaatatatttattggagaaatgttatttatcattttaaaatatgtgaaatgattaggaattgcatgtaaaagaagcaagtttggttttctctaggttttttgcagtactaagtaggaactgttgcttcactttatatcactaagaagtagaattaaattaattcttaaaaagattttttcatatccttccttgtctttgtccagatcattttgagaccaagataatacaaaggatctggagatttagcagtataaatggtaggctctttcccactcagaatttggatttttttttcatcgaccgtcttgaatattttgaaattcagttgtgtttagaatgaatagatagtaaactagatttagatgataacatttgcactgattttattcatttgtgaatctgttaatttcatgattccaaccaagtaaagtctatttctggcatcaaagggaaaggtctgctgactctgccactgtttttcatagttttccctccaaaagacaaataattctaggggcatcgatcccagaagagtcacagggcacaggtcacagtggatggcttattcattccctctctgtttccgcacttgaagatgagggtctctcatagggggacctcatgtcactgggtgtgagaccttctctcagactcctctggtgtgagccagggcaggccaagtgtttcctccggggatatttcctcctgctttcttactggtacttacgccaggaaaggcattaaacggccagtttttcattcccttcacctgttcctcaccttgaaacatggagataaattagtcttaatataggaacaggagacaaataaatgtttttaggggattattaaaatgtaatgatcagtgacatttgaagctagaatgattttatacatacacttttatttggtgcatgaaatcaggaatggtatcatcagctccataatcttcatagggaaagatacccagagaggtcaaggacttgacctgtaagagcacagcaaggcaggactcaaaattacattttctcattctaaatccggaatgctttctggtccagcaccatgcatcttaaagaataaaactggtctcatgataatacagttgacccttaaacaactcagaggttggggtgccaaccccctgtgcagtcgaaaatctaagtgtaacttttgaccaccccaaaacctaactactagtagcctcctgttggctggaagccttatgaataaaacagcctatcagcatgtattttgtttatctattgcatactgtattcctgtaatatagtaagctggagaaaagagaatgttaagacaattattaggaagacaaaatatattaacactattcataaagtggaagtgaataattattatgaaggtcttcatcctcctcatcttcatgtggactaggctgaggaagagcaagaggaggggttggtcttgctgtgtcaggggtggcggaggcagaagaaaatgcgtgtataagtggacccacatagttcagacccgtggtgttcaagggtcacctgcacaccaaagaaatgaaaataggacctgaagctggttgattagtgtacattgttttggcctttatgaaaccacattgaatgataattcatgagatcagggtatccaaatcatcttcttctacattgttcctccttaaaaataagccccgttataaacctttggtggactcggtgctgtctgaatccagaagtatgtgccaacagggagcgtcctgccatgtgcatgcattttcattagtattgcctgtaccatttagcttttgctcaagtcctggagatgtctttttccagtcatgcatttttttttcaacttataaaagtaagatccaaccgttattcttaaaaagaaaaaatattgggaagtctaaaaaaaaataaaaattaaaataatctataatgcaccaaccaaaggtagacactacgattttaatatttatagtaaccatgactttatatatcctatctatatgttataaaaatatgaaacatggtgaaaaggaatttgagaaaaaaagaaacatttttctgaattcatttgacattgtatttttctactgaatatattctatcatgagtacttttccatttttatttaatatttttgtaaaatgtgtcttatggctttataacatttgttaatgtgggtatacgtagtatttttaacctctcccatactagtaaccttaaggttatttttaatttttgttgttgttactgagaagtgaagataatctttgatcacatgtctaattacttcctcacgatagaatcctgaagtagattcacagccccagaggtacttggtaaatattgccagatagctttttggaagctgatctcatcacatttctgtcatctttttaattacgatgtttaattcgataggttaaaataggctttcattgtattttaatttgcatgcctttttctatttaggaggttagcgctttttcttctgttattgactgtttatattctagaagaactaattttgaaggctcttagagagttaagatacatgttgcaaataagttgcaatttaagtgtgcaaaccaaatttgccaccaaccaaattctttcatacctttgagaaaggaaaaccagagttgtatggttaataaacttcagcgtataattttattgtggtaggtataattacataattccagggagtgcttttacatatataaaatacttttttaatctgtcccagtctttaaaaataagcatctaattcagaatttgtatacttccagattttcacctgacgaagcctgtagacattaaacatggctggcattaaatttttaattgaagtttttttttttttttttttttttttgagacggagtctcgctctgtcgcccaggccggactgcggactgcagtggcgcaatctcggctcactgcaagctccgcttcccgggttcacgccattctcctgcctcagcctcccgagtagctgggactacaggcacccgccactgcgcccggctaattttttgtatttttagtagagacggggtttcaccttgttagccaggatggtctcgatctcctgacctcatgatccacccgcctcggcctcccaaagtgctgggattacaggcgtgagccaccgcgcccggcctgaagttttattttaagcctgtaaatctctttgagaaactccggcgtgaaaggtgtggaggggcagctcctttttcttatatgtccagggaagttcctttatgctgagcagctgattctagagttttgcgttgctttaactgcatgtactgtattttacatgtttgattattgtagcttatttgaatatcactaaatttcaagttggaaaccatttgaatacctagatgtgagtgagtacagttttgtgtcttcactgctgtattatctctatatatatgtgtttcattttccttgtgttatacgtataaacaaaatcagctaaattttgtttacaggctattttatataataaataagttgtaacttaatctgtttcagagtttaagatcttacagacagaaattataagttgatcagatgtgtttctgctttcaaaacactgatcctaatttttgaccctatttggctgccttgagtttcttgttcaaacaggaagggaaagaataaacatacatacttagagagataccccatcagaaggactcagagaccttgtcatttacaaagtgctacctccccaatacagaaagtacctgagaaaaggtttcacaaagcaagaaagaacataagatttcacattccagatgctgtttcagagagcggaggaaaggcaccacatctctttggaaagctgggaagtgcaggaaataaggagtaaaacagctggttctccagttgggtagggtgtggcattcctaagccaaaaactttgaacccaagccaacaaaatgtagataattgtggtaccatcccctgtatttctgttctctgagcatttgatttgtctgcttcctcttcatactcagcagtttctgtagacgacctcatctgcctccacagcttcacccatcactgacggatgcccatgattcccagattctttatttttgacctgcatgtcattctgataccttcgatctgtttcctaccagacgtcctccctggaagtttccatcgagatttcaaagcaacctggcctaaccagtcatcttcctccttcaaaacagcttctcttttatgtgttccctgacttagtcagtagccactgtggatcactgagccacagcttgggaatggctcctttttttctgttttatttattcatttttaattgacaaataataattatgcatatttatggtgcacaatgtgatgttcaacctaagcatacattatagaaaagtcagtcgaactaattaacatattcatcacctcaccaacttacctttgttgaggacattaaaaatcttttaacacttttgaaatacacaatacattattattaactgtggttaccatgccatgccctttgatcaacacctcccctttcctggcctcactctgccctcagcccccggtaactaccattctactctctgtttctatgataatgacttttgtagattccacatataagtgagatcacagtatttgtctttccgtgcctggtttatttcatttagcataaggtcctccagtaccatccatgttgcagatgacagaatttccttcttctttaaggctgtgtagtattctattgtgtatatgcaccacattttaaaattcattcatccattactgggaattattcttgacatcattcctcatgatggtttttgccaagtctttcttctcaactcaacccctgaaccatcttccaaatccttctctacctctctaatttgctgttcctgtccaagcttagcccttttgcatcatccgacagccgtggtgttgtaggaaccttcctagcggttgctttgcttaatgtctaaacgtttccactctccagcttatcatccagagtgtccaggatgggctttcaaaaacccagagctcctcttgttcttcctcctcctgtgtttcaggactccgtactgcctgaagagctaagctccgtaggctggcgtttgtgtaggattttcatctggctctcttgcctctttctctcatggctttttgtccccctactccaacaccttatcattcagcctgggcacctgctcatctttacttgaacatttcatatactttctctgttcattcactcattcaataagtacacattcaatgccagcttactacggtgctctgttgtaggaacatttatctgtagcttgtgttgtactctctaggcccagtattttctttatgaggtgatggttaatgactggtccaatttcttaagtggttatagaaccattcagcttttttatttcttcctgttagttgtagtcatctgtatttttctaggactgccttttcctcagtcaatccggacttcacaaaatcttgatcgtccaccaaagcccacttgagatgcagatgtctcatcctttgttaagcctgtagggcctctcctcctccattcccgaagtgcaaggtgcaccgtaccgtcctctttctcctttgatgccttgttctcggcactagaacagcatgtcacacattgcattatgattagtttaatggagatgcacttcttttctagatgtacattctttttaaatgtttttatgttaaatattttatccatataatagaatagatatcgcataatgtaggatgtaagagagtgataaaatgaacccaggtgctcccacaccaccaagctgaaggaacaaagcatcccagaggccttatgtccacttgtgcccctgcacagccatgccacccaccttctcctatagagaactacttctgaattgtgtggtttctaaacaatattttgtttgaaattaccttttttgacttttacattagcataaataagattatatggtgtgtgtttttctgtgactttgttttcccactcagtattattttgagatgtatccatgttgtagcatgtaggtcatgctcgtttgtaacatgaattaaagaatatattcctttttcttctttgaaagagtttgcataagattggaattatttattctttgaatatttagaaaaacgctctggtagtggtattttccgtatgcccagattttctttgtgagatgattgctaatgactggcccaatttctttaatggttatagaaccatccagctttttatttcttcatgttaatcgtagtcatctatatttttctaggactttgcccattttgcttaaattttcaaatctgttggcgtaaaattgttttataacagttttattacttcaacctcagctgcgatgtggtccttatttgtacttactatcgcttgtttgtatttttattccttcaacctcagctgcgatatggtcattttttgtacttactatcgcttgtttgtatttttattctttgtttcttgccagagtctttttcagagaataacttttgactttagtagtgctctctcgttatatccttgctttctcttgcagtaatttggactctaatcttgtttatttacatagttcattaattctaaacctttctgtcttttaatatgaacatttaaggctgtgaatttccctctaagtgtctttttagctgtgtttcccatgttttcgcaagtggtattttagttattcttcattttttttagttttgaattttaatattctattttagtcttggctagaagtatgattttaaatttccaagctaagggagcagaggagcagttggaattagttttctctttgttagagatttctaacatcattgttctgaggtcagagaatatcatgtttttaggtttgctgaggcttgctttgtaagctcatatgtggacagttttctgaaaccctacctcggttgaaaagatcgtgtccttacgttttggataccacattccacagatgtctattacatcgggtttgtggattatgttgttcagtccttttgtttgtttggtttggactttgatctcttgattactgagaaaaatgtagtaaggtttttccttggctcctttttagatactttatttgcctcttctgttctgtatttttattatgtgtcttggtattattatgttttttggcctgtttgttcccttggctctggttgatgtctttaatcaattctggaaagttctaagccattatctcttcaaatattttttcttctccattcaaacttttctgtcctttaagatctcctattgggtgtatgttagaccttctcactctattcttcacatctcttaatttttttcttttttattctcctcatctttaattgtctgtactgattggggtaatctcctcagctctctctttttgttccttgtttcttcagttgtgtctaatcttgctgaaatttactgtgtattgaaatgttatttcagttgtgtttcttctccagaaactttgttttttgttactaagtaaggggaaattattaacttactctggaatggtataattcagaaatcagggaaggagatagtggtagcagtaaagttctttccagtgtctttccgattattctgtatagatagaaaatcaaatcgtcaaggataagattatcctattgagaacagtggagcaaacaagtgaagcctaatatataggatgtgaggtgactaacttgattattaaaaattcctggctgggtgtggtggctcctgcctgtaatccctgcactctgggaggctgaggtgggtggatcacctaaggtgaggagttcaagacgagcctggccaacatggtgaaaccccatctctactaaaaataaaaaaattagctgggcatggtgtgcgcatgtgtggcttggaagccctcgctaacaagtcctggagacacaggctgtccttctgtttcaggtgacagtatatcctgtttcatctgtagttttcttttttgtgttaatacttctcctaggaattaagaggttttttaaaattagttatttacttggcatttattttgcccccatttgacaagttgtggttcagtaatataaaggaatgtcagtttgccacctgtcctgccatccatttgaaaagagctaaaaaaaattaatttgtctgaacctagttatccagagtcacttggatagatgttctaatgatagtttgatgaccttatttctatacagatggccaaattggaatgaaaataattgtttgttgtttattttctttcttggaagcataatttttaaaaaacattattatcaaaaagtttttaaaatcacaaattggaaattttaaattggaaacattaaaatacatcaaaataatgatgttatcttttaaaccattgtgactgtgttgaagacaacagtaaagaagttagagaaatttgacaatcgacttaggcatctcttctccaggactgtccattgggagcactggctggcatcagtgcctggtgcgtgagatggaaatgttgttgagtgtacgtgattgctgctaagaaaggcagggcggtggcttattgggagcactggctggcatcagtgccggtgcgtgagatggaaatgttgttgagtatatacatgattgctgctaaggtggcagggcgctggcttattgggagtattgtccattacaccagaattctgcctccagcatacgccttttacttctgtaagttattacccacagttttttaatgcttcgaaagaccctcctcagtgctaatatgtacgaattcagtgagtaagtctatttctgaatacagatattcctgaacttatgatggggctacctccagataaacccttccaaaattgaaaatatcgtaagcgcattttctacttatgatattttcttttttttttttttcttcagacagagtcttgctctgtcacccaggctgtagtgcagtggtgtgatcttggctcactgcaacctccgcctcccgggttcaagcaattcctgcctcaacctccctagtagctgggattacaggcacctgtcaccacagccggctaattttcgtatttttagtagagacagggtttcaccatcttggccaggctggtcttgaactcctgaccccgtgatccacccgcctcagcctcccagcgtgctaggattataggcgtgagccactgtgcccggccagatattttctacttacagtgggtttaacctgacgtagcacatcataagccagggaacatactgaatgcgcattgcttttacaccctggtaaagtgggaaaatcatgagttgaactctcataagttgggactgtctgtacacaattaaattgttatcttttttaaaggaggcactgtgtttttgttagagacacctgccctaaaaggccactggaccctcaggcatgtctactctgctgcctttctcacccccatcagtgaccctttagcgctccgtctctgtttaaccactgcattccttaaacacatcactttataagactgatttccttagtgtcaggatgtttttaaagttaatctttcttcctcactctcagatagcgattaatggtagatggatctgacccttgctttttgagcaggaatcaagcagacccagttttctatgttcagcagccagtgtgaacagggtgttagtgaaaatgaggctgttgagttaatagaaatagctgctagcatttattatgtatttgctttcagtgtgctatgcaagtttcctgaattatctgtttaaatccttacaacaaaaagtatgagctgtgtactcctgacattgatcctgcctcatcacacattaatactgccattctactctctttttgtagcatttgcctattaactgtttgcacatctatttattttcaactcctcttttcccttctttttttaaaaaatgaggtgtaatttacctacagtaaaagacacaaatcttaagcttatggattgatggctttttacatatgcacacgttccagcatccaccaccagatgaaaatacaaaaccttcccttgtgccctgtttgagtaggctcccttctcagcaacgttccagctgctatctgcagagaatcattttgcctgtcccagaactttacgtggagttccatgcagtttgttgtcttttgtatctggcttcttttgctccaaattaattttttgagattcatccagttgtgtgtaccagtgagtcattttcttttattgctgagtttggataaccagattttgtttaatcattctcatggtgatggacatggggttgtctccagttttaggcctttatggataaagttgtggtgaatattcctgtaagtctctttgtggatgtttgtactcactgatcttggatataaaccttgaagtacaatagctggtcgtggcacaagctgattaggaactctgagtagttttccagagtgtacactccatcggtcatcaactcgagtgtacgctccgtcggtcatcatcttgagtgtacgctccgtcggccatcaactcgagtgtacgctccgtcggccgtcacctcatgtgtacgctccgtcggtcatgaactcgagtgtacgctccgtcggccatcaactcgagtgtgcgctccgtcggccgtcaactcgagtgtacgctccgtcggccgtcatctcgtgtgtgcgctccgtcggctgtcaactcgagtgtacgctccgtcggccgtcatctcgtgtgtgccctccgtcggccgtcatctcgtgtgtgcgctccgtcggtcgtcatctcgagtgtacgctccgtcggtcgtcaactcaagtgtacgctccgtcggtcataaactcggttataaactgcatcctagccaacacttaatattaccaatcttgtttatttcagccagtctcattgttgctttatttggttttccctaacaatgatgttaagcaccttttcttgtatattcagatacattcaggtagcttctttcttgaagtgctgtttaaccccagctcatttttaaattggatcagtcatctttctattgacgatttttagaaggctctaaataagtcctttgtcatgcatacatattttttcagttcatggcttgctgttttgtttttataatatcttttgaacagaattgtttaattttgatgagatccattgtatcaagcttttaaaatgtttaatgcctttcatatgttgtcagaatctttacctgcttcaatgtcctgaatattttttcccagaagttttgtaatgttaacttttatgtttaggtctatgatgtctatccttatgccaatattgcattgttttatttattataggtttatagtcagtcttgatatcaagtagtatgagtcttccaactttgttctttttaaattgtttgggctattttaggtcctttccatttatatataaattttagcctgtgaatttttaccaagaaaaggccttttaggggttcattgaatttggagaaaattaccaatattgatgatcctatttatttgtttaggccatctttaatttctttcagcagtgttttgtagtttccattagagattttccatgtcttttgttaagtttattcctaggtattttattttttatggtattgtattataatccttcgatgtcttattatatagaaatataattgatttttgttattgactctgctgcctccataaatttacttattccattagtatgtcaacctgcttagaatttctaaatacgtaatgatgtcttctgttaataaaaacagttttacttcttcttttttggtattatttcttgccagatctcatggactaggacctctggtataatcttgaaatagtggtgaaaggggacaactttgccttattcctgatcttctggagaaagcactctatatttgtaccattttgtagatgccctttacacagctgattttctttctagtcttagtttactgagaatttttgtcatgaaagtatattgaattttctcaagtgctttttcatctgttgaaaaaataccacttctgcatgatatgtttttaaaatttatttatagtttctatttgccaatagtttgtttgggtttttatgtctttgttcatgaaggctattggcgtgtgatttttttcttacaatatcttgctcagtttggatattagggttatactggcttcattaaacaaaataggaaatgctttcagcctctattctatgaaaatgtttgtgtgtgctataatttcttccttacatgcttggtagagtcacaaatgaaaccacctggacctgaagttctcattgtcaagcccttgtctataatggattcaattagtttaataaatataggactacttgtgccagtttttgaaggttgtgtttttcagcagattagcaatttcctctatgttgtcaagacttgatggcataaaactgtaatgtccttttactatccttttaatgtcttcaggatctataggaatgtttcttttttcatttctgttcttggcaatatgtgggtttttttctttatttcttcatcagtcttgcccaggagcttatcgtttctgttgttattcctttttaatttttaaaaaatttcaaattttttaagagacagggtcttgctctgttacctagattggagtacggtagttgaatcataccacgctgcagcctcgatctcctgggctaaagtcattctctcaccatagcccccaagtagctgggaccacagatgtgcaccaccatgcctggctaatcatttttattattatttccaaagatcctacttttggcattggtggttttctttaatatttacctttttaagatattgatttctgttctttatcttttccttctattttctttgggtttaattttctctttttctagatacttggggcagaaaattagagcagtgatttaagtttttctccttttaaacttttcttttaaaacattttcagctataaatttctagccactggttctctcttgcagattttgatatgttatctcttcattgtgtgttattagtatttcccttttggatgcctccttcctttgaagaaatcttacttcacacttgtatttcacatgtccagggagtctctaatcatctatttcggtttgtgtttatagatactagagaaagagagagataaagaagggcgagagggaactcagagttattgcctgtcactgttttcctcagtagttcatcttcttcgttctgatgtgtttgattttaggttagagccctttctcattacatgggtgaaatactccttgaacccttgcatatccaaaaatatctttctcggactctgttaagagaatgacacgctggctaaatacaggattcttgggttctgttctttcattcctgtagattttaatccagtgatttcagctcccagtactgcatgtgagaaatctgacgtcagaccagttctttcttctttgtaagtaaattattgttttgatctagaagcttgaaagtcagtctgtctctgtctctctctctctctctctctctctgtctctctctcatttagagtaaatgtattagaaactagaaactttaacagtagttgcctagatatgtgggctgtcttaccagtctagcctggcactctgcaagcctactcaagttgcaaacttgggtctttctttagatccagttaaattttctcctactgcttgtttaatgaataccttttctctatctgcttgtatttctttacttgaatttctattttttgcatgttagagctcctgggtttatcttctagtcttgttcttcatagttttcatgtctttacacttttactctatgttttgaagtagttcttgcacttcagatcagtctcaacagtgaccaggagttccttgtgttaatctactcatttgttagctttggaagttgtatgtttcacctctggaaatcttgttttgtattatactttaatcgtcatgagggttttctttcttttttctgttcaagttgttgcttgtctcttctgcagctgagtttcactgcttggtggatgtgcctgtgcatagcagcggactcccttagacgtgtgtttatttttcactgtagttcgttgcagctcaggcctggcattggagagaagcctatccctctcaggccagtgctgcagaagcagaacggccaccagccccctgcagggtgacctgggcccacagactctccacaccccagacttcccatatcctccatgcttgggtctctgcctcccccctcttcttcttctggcctcctgcctgctggtgagacaaggcacactcacgtagggctgatgccagcctccttaccctcttctgctcccactcccatcgggagcccccacagtccatgcagctgaactgtgccaaggacaggacttactgataggggtctttcctgttcctttttgcccatgacagcgagcgtgtgtctggcctccctgtggagttgccttagactcgaaggcctgacctgcacgcccctcaagcagagctgtaactggagggagaatccaggggagccacactggggttactggagtgtcagagcaggcttattttctattggtcacacttttcaaatgaattagttaatatgaagaaacagaacatgattttaaatggttcctttttaattgtagtttactggctattacaatttagtatttataatgcctcttgctctgtgtacagaaatgagtggttagtattttcaaaaatgaatgatatggttaggctttctgtccctacccaaatctcctcttgatttgtaatccccataatccccacgtgtcaagggagagaccaggtggaggtcattgaatcgtagtggccgtttcccccatgctcttctcatgatagtaagttctaatgggatctaatggttttataaggggctctcttccccttccactgggtacttctccttctggccaccttctccttcttcttgtgaagaagatgccttgcttcccctttgccttccaccaagactgtaagtttcctgagggctccccagccatgcataacataattgagtcaattaaacttctttcttttataaattacctaatcttgggcagttctttatagcagtatgagaacggactaatacaatgacctgtagtccatatatggagattattttttctcctgcaaaatagctatgctaaaagagatctttgttactgaaaatatataaaagtcacgagtttttgtaggaaaattgagaagtgcttttattatagtctgaagtatttattgttaacattattttactttttccatcaccctcaaataggcaactcatactcttcattatgtgtttataggttagcatggcctcattgaaagaactagatcaaagactctttgaaaattacatcgagttgaaagcagatcccatcgttggctccttagaacctggaatttatgcaggatattttgattggaaggactgcctgcctccaacaggtaagtaataaagtttcttgagtaatagatgtggatatacttttatcaattgatacttgcttgaattcttttcattttattctcatttttctcatatctactgagagtgagagattaatttgattttaactttttgtttgcttaaacccatttcttggatagtttggaaattggacactttgtattattagtggcttaaagctgttcttaaattctagagaataattaatgataacttgtaataattgatcgttttagtaatgcattcctgcttcctgtgatcttctcacatagatacaatagagtgattgtgagtgacagtggcatgcaatgaccttgtgtacatcatcaaaaaatgtattaaagaaatctggtcacttctatgtaagacctgattagtgatgctgtaaaggcgaaggataggagaaaagtgtgtaggagtaagattattatagtaatttagcaaagagaattgagccacagaaggatgaatgacacagttcaagtattatctttgtgatttcaaatgaaagtcacttgaatcacttcaaaatatatatttttaaaataactattgctttctgaatcaagtaaacttttgattgatcaaatagttgtttctttgtatgaaataacgtggaatacctaaaaccaagctgcctgttggcacttttgtagagaagtagtttatgtagaagtggtcatgctggtatcggacacgggttcttcatgggtgtacatatgcagatataacaaagcaccagtgagttgttaacaggtttggtaacttcattgttttaaccaatcactttaacctccttttgtttttattgtatggcacttatactaaacgatgataaaattgtttactgtttaaacacctttggtttttattgtatagtgttcacgtatagtgatgccaaaagtgtaaactaaaaactgggatcattaaattagccacagttacttaatgtgaccacagttattgaatttcctgagctcacagtcatggcagtcatgccagcccttattcctcatgtgcttttctgtgcacacacttttctgtgcacacactttctgtgcccacaccacattcagttcataccctcaaagtacatccttttaaagtttaaggcaggttctatcagtatcttacttaaaattcttacaacatcttctcatgatagtaaaaccggggaagctgtgctgtgcccacctctgccctggcactctgcccactgccccaatgctccacctcacagcccctctccagctggactcaacctctgcctttttgaaaagctcatccttctaaaatataaattggatcctgtcaatcccctgctgaaaaaccttcgaggaggctcattctccctgaggctaaccccagacttctcagacaaggtagcatccccacaggtaccagattccacggatgctcaagttcccagtgtgaaatggtgtcatattcgcatgtaacctatgcacatcctcctgtatgctttaaatcatttctagattacttataacacctaatacaatgcccgtgctttgtgaatagttgttaaactgtatcatttagggagtcatgacaaggaagaaagtttgtatatgctcagtacagatgcagccatctgggtcccccaccccggaatattttccattcatggttggttgaatccacagatgcagaagccactgttgtggaggccacagatgcagaggccacagatgcagagggccagcagtactccctgtgcttgctatgagttacttccctctccacgggctcccccaggcagcaggcaggctgggtgcttcgtgcactgtgaaccctgtgcctagtccctctcacctctgcccctctcctaacctctcctgcccttccgggccctgtgtcctctgggagctcacccagcccatcccctgcatgtctccaggtcgcattggcctacctccattcgtgatgctcccagagcagctcttgccactctctgtgcccgcgggaaatgttttgtcgttatctagctccttgctggacagtctcagcacaaggccgtcatttgggtgtcttgttctcagagtttttagcatagtgcagtctgtgacactcagctgatgctgtgtgtgtgtttgtggagtaaatgaagattggcattttctataataatataccatctctctaaatgtgccagttgctccttctcttccaagtgtttgccatatgcttttgcctgatttttctcaaaattttctcagtaggaaagtacattatacagtgttctagcttccactgttcttctgatttgctttttaataaacagtacacggtggatattcatatttgctgaatgggaatgagtgagagtgctcattttcttgtcctttgtgaattctcatatggtagttgcatagacttgctaaatttgagcagctgcgtttcaattaaaatgcgactgtcaagtgtatctaacacatcagcacgtctgtctgtttaactatttaaactcttaccgaacaatgtattaccttgcaccatgcaaaaagtaatacatttttcggtaatagttaaaatgaattttgttaaagttcgtatcttcccctgtgattagcatgtaacgacattaactgttcacacatctaacacatcagcaattctatctgtttagttatgtaaactattactgaacaatgtattactttgcatcaccatgcaaaaagtaatacattgttcagtaatagtttaaatgaattttgtcaaagttcatatcttttcctgtgattcacatgtaagtacgttaactgttcactctgaaatcatgcttatcttaattggttatgttcaaggctattaaatcacttgtgatatttctttgagaatagaaaaaaatcatgacacagcccctctgagtttcctgcgcttcagtgatgactataaaaatttagaatgggccaccgagtttcactctcaacaaagtgattcttctctgtcgtcactgaaatctccgattgttaccgagaaagaggatttatttgcccctgatgcagaagaagacttttctttgccagccctctctcagacctgctgcctccgttaacaaacagcgaggcatctttagtgtatgccgaacaccggcaggggcagtcgagaatgtctgtcaggtgaaaggcaggtctttcccatccacccgctccaaggtgtcttcggaaaacagacatctatgaaggcccattccctgaagggcggcgttaggtcacaggacttcaagtgcaggggctgctggccattatcacgaggctgtgaatcgtgtggcagcacttgagtgagcagtaaccagggcgcgggggggggtaaaaggcaggcgatgccgggctaacggggatcttagggttcttctgcatccggctagttaccaccacttggaatttcaaagtcctcactggatttatcttagggttcttctgcatccggctagttaccaccacttggaatttcaaagtcctcactggatttatcttagggttcttctgcatccagctagttaccaccacttggaatttcaaagtcctcactggatttatttaaggtacccagaatcctgtctctgtgaccttcatattttccagccatgacattgaactagacaagcctcggttgtgaattaggatcagagcctaaatgtaatcctgaggttgatcttaataagagtctgtaacctcagataatcttcactacaaaattaagattcttctggctgtgtgacattaagtggtgaggcttttttttttaacatagcttcgtttattggttttgtttttttcctgacaaactttctttcataagcaaatggcacatggcaccatactaccagcaatttatttactcttcctcagattccaaaaacatgtagaagtcatcggtgctcgtttcacttttataaactctatttagttctgttctttgtgtagttttgacttcatgattactaactgaacctcagccttgcatagtcatatagtgatttttagtttgtttaaagctgacttaagttgagaccttgtgtaaagtgagcagccaaaatagtttgactattaatcttccaaaataatttcaattaacaactttagtattatcttcagagtttacttcttcagaaactgaattttgcaaatcatgtaggtaactgattacttattgctgtagttaccaataaatttagtttccgatactgtatgtagtgattaaaaaaaaaaatccagttgattaatttcatgattcaacaagagatatccgttaaagccgtagcgatgtttttttaaatcttaccgttgggtatttaaattgttgtcacctctttatttgtgtatatgtcagtaaagattattctagttagttctgagtcacaaaactgctgttaagattttaattgttctgttatctgcaattattaagagttcttagtatttgaattttataaattttaaataagaatactgttggtctttacttacaaatacacattgaagttcacgtctttgaaacattaaataagaaaaaagtatttatttaagttttctgttaaatactggttttattttttctatcaaaaagtcataaaaatttaaattaatgtatattatttaaagttatttactaagtgaatctaaacttaatcattttctataggtaaatagtgaacttatttttgattcaaatgtgcttatactaattatagtaattgaaattataatgggaaagggaaaactttatataatttgtgacatgagtatgtctaggaccattctaaaaataacagcagagttggttgcttccatgtatgatgcatataacctagagtagggtaacctcctgcccgtcagtggtgtgccagagcacaggcttggggtgcacagtccatcagtgagcgaaacttgtaagtgtgttgtccaggcagtgtgccaagcagcatattccaacaaattgaagagaaagaaaatgtaagtctaattatggagacagaggcagaagcacagctcttctcaagtctatgtttgttgaattttattttaagatctctgccttttggaatgtatcttgcagatgttttcactgaattttacaagagacattgcacaattaggttatctcttgcatcctgtaacttaaatcattcaaagctcaggtccagcgtagaatttctagagaataagaaaaatgctacaagaatggagataaggagaaattgtaatttttgtttgattttcaaaaaatggaaaactgcagacagacctcaaagtttaatgtagctctctgagaaaatggaccattaaaatgttttcaggtccttataaaataagttgtatgttacatgtatatgtgaatttatacatatattccttatacatgcatttatatacacacattactaggtacccatgtttagtaacgtagtcagcatttattgcatatataccatgtgcaaggcagagggctttgcataaatcacctgatttaatctatataacagcacctcaaggagtaagcagtatttttattctcattttatagatgaagccactgagcacaaagaagttaagtgacttgctcaagttcatgtagctaggaaatggtgaggtaggggttccgagttcaaatccaggcagcccttaattttaggcattgtgctgtgttgctagacaataaacagcctccattagaaatccacgaagagccgggcgcggtggctcactcctgtaatcccggcattttgggaggctgaggcgggcggatcacctgaggtcgggagttcaagaccagcctgaccaaaatggagaaaccccatctctactaaaaatataaaattaaccgggcacggtggtgcattcctgtcatcccagctactcggaaggttgaggcaggagaatcgcttgaacccaggaggcagaggttgccgtgagccgagattacgccattgcactccagcctgggcaacaagagcgaaactctgtctcaaaaaaaaaaaaaaaaaaaaaaatccacaaagaaaaaggcagatgtgctggtagaatagacacaagttcatgaaattcacaaaataactaatatggccaataaatataagaataggataaaattcatcaattctcaaagaatgtaatttaaaataccattagggtatcattttattaaaaccctctggattgacagatactgtaaagcttgataatacctgctttttggcaaaggtacagagaaaaaaactattccgtcatctttctaggagtgtaaattggcccatctatacacatacgtgtgtgtgcgtgtgtgtgtatgcacacatttatatgtatagaatttacttagaaattttgtgtctaagaatttgtcttaaggaaagttttacagaagtaagtaaagaattatgtacagtgatgtttattgaaacattttttaatatatgtagaatctgaaaaactaaatgcccatcagtagtgaattggttagataatttgttatatatctaaacaaatattatactttctttataatggatgagatggatagatggataagtaaatgcatacctatatgtgggggactgtacatatattggtagaaaatgttgattaaggagacatgcattcattctttcctcatttttattgaaaaagacaatgtatctatttcatatgtacaatttgacatgtatacacatatcttgaaaggggataagaaggagcatgctagaaaactttaattttctactttaaaattttgtttttaaaaatattggggcagaatagatgtatttttattttaaaaaaagaaatttctatattttaaagaaatgaaaaacttcatggagacagcatacccacaaagaacaggcacatgcagtactaacttgttttcttcttggacacacacttgatttgatagagaaatggcatacatggtgaatttaggtttctgcaagtcatttgacagtttttcctgatattttcaggagtcctagttgctgacttattgccatcatgtcttcatgtcagtctagaggaaagcctctagtcattgcaagaacactcattgaacaatgttcaacattttattagacatttgaaaatggaataaattccactttgggtaaatttgtgaagaaaaacctagtaaagttagcttagtagtagcactatcttacacttagaaagtttttacaatgcctttatgtaagcctgtgatggaactatcctaaaattaatgataaaatgtagcatgctttcttaattagaactaccacagaataaaaagtgcaagcttcagaggaattttggtttcagtaatagaggaagaacttatcagactaaccgttccacagttaaaaattgaactctgcacagaatatagaaacccagctgtgagaagcactggagagccgtcaaaagcagacagactggagggggcgcttgaacccttgcaggaggggagcttgcaccagccagatctgagggccatccacgactgcagcaggtgcccagcactcctgcagaaggcacagagggatgcagccaaagaaacactcgatggaaacttgaatctaaaggaaggaataaaaagaatcagaaatggttgatatgtgggaaaatagaaaagacaaactttttgggttttgacttttgattttttaaaagatgattaaatatagaaaaatttctatatttattaagttgaattcacaatcaaagacctttctttgtggaaaattccaagtccaaatggttttactgataagttctatgtaacatttaaggaataaataataccaattttatacaaactttatcagaaaatataataggaagcatattcaatcttattttatgaaacctgcataaccccaaatcaaaaatgtgacaagaacattacaaggagagaaaattacagactagcgtccctcatgaacgttggaacaaaaaattgtaacaattatttttagcagatcaaagcactattgtccatgcagtggaacactaattcattatgactaagtagggcttcttttttttaatgtttgaaatttttgttttatttatttttattttatttcattttcctttaagttctgggacacatgtgcagagcgtgcaggtttcttacatagatacagatgtgccgtggtgtttggtagtcatgggacgaccagaggcaggagccatgctgacctcttcacaagatgacacctctacgtaattacagtcattgccgagtctggtggttcttccccatacgtaaatgtcctaatgaatgaccgaataaggattataagacatttttctttccactcagcatatattgctcttacttttctatcaataaaaaaataaatccataagcagagctaccccctctgtttaacataatcaaacttcaagttctcctccctttgcggctttttcagttttggtggaagcatctagatatattgtaatgtcttagttcagctctgcaccccacccacaccttcatactaccccaaacatcaccttcaaataataacattgtattcacgttatcaattcagcggaaaatagaggtagttttccattccccattgtacatttttaagaggaatttagaaagctgcattttaatcatatgagttagtgatatcaccaataaggtcatttgaggccagggcttcagggttatagtgagctatgattgcaccactgcactccagcctgggcaacagggagagaccctgtctcaaaaaacaaacaatttttttaaaagaactgattatactttggcacctgccaaaataaaccatacattcattgccctgtttaaacttagtctaacttgaattcatagatatgaaaatatacatgtttgaaacagcaagagtagaataaagtgaaattaatctcttaatctgtatactcaatgtctacaaaatacttcatgtacagatagaaagtacatttttcattcataaagtcaacaaatattaccaagtctatactatacaaagcactgtccaagttttccaagttgttcaaatagcagtttctgatttccaggtttaaagcataaatagagaagccgacagttctgtgcgtaggaggtggacgcactgcgttctcacttaaccaaggtggtaagcacgagtgtgctccctcagcatctggggagccagggtactgatctcaagagtgtgccctgaatgttctccatttgaaggacaccaaactggtagcacttggacacacccccttggccagcagaggctctaaatgtccctttctgcatagcgccatcccatctctggtttctttatcttacctatcagatttagattttcagatgttacctgtcagaacagatttttttttccctatctgatctcttcctctccagtctcactccctcaaatcctgctgaaatattctttcgaagttcatttttgttcaggtttcttctttcctcacagccatttcatggcgcctggcctttggaggaaaacagctttagtactggtcatgtgctgacctgcttagctctgaagcctcatctcttcataccagccgttcctggtcatctgtactcagtccacactgggccattgctagtcctcaaagacccagcattccctttcccagatgccctcaagcacactgctgccttcacttgaccttcctttcatcccctcagacctggctgaggcctggagacaccttgctgcaccatcatttcacctgagcccagcccagctcaatgctcccccacacgctgtcctgcagtccgcatggacctgcctgagacctggagacaccttgctgcaccatcatttcacctgagcccagcccagttcaatgcttcccacacactgtcatgtcgtccacgtgggcctggctgaggcctggagacactttgctgtccccatcagttcacttgagcccagcccagttcagcgctccccacacgctgtcctgcagtccgcatggacctgcctgagacctagagacaccttgctgtccccatcatttcacctgagcccagcccagctcacagtgctccccacacgctgtcctgcagtccgcatgggcctggctgaggcctggagacaccttgctgtaccatcatttcacctgtgcccagcccagctcaatgctcccccacacgctgtcctgcagtccgcgtggacctgcctgaggcctggagacaccttgctgtaccatcatttcacctaagaccagcccagctcacagtgctcaccacacactgtcctgctggtccacctgtctggatgtgaaccctcctgcttgtgtctcctctctgtatccatgattagccaggcacctggcttggagtaagcatccagtaatagatttattcagttattagttgattagctaatgccttggtaagggttactcaagccatagatgataggtgaaaatgaacatcaataaaatacgaaatttacccttgggttttttatattaatagttattttcaacagaaagtcaaattgagtcaactattttttattcaataaatgtcaaaaagagaactttggtttattaattaggataaataaccaaaaataacatggacaccccatttacaaagaattcgagaccaggcatggtggttcacacctgtaatcccagcactttgggaggctgaggtaggtgaatcgcttgagcccaggagttagagaccaacctgggcaacatagtgagaccccatccctacaaaaaaacacaaaaattagctgggcatggtggcacatacctgtggtcccagctactcaggaggctgaggtgggaggatcacgtgagcctgggaggtcaaggcgtggtgagccaagatcccatcactgcacaccagcctgggtgacagacagaccctgtctcaggaaaaaaaaaaaaaagaattcaaatgctataaaatactgtaacaccaaagatctcctaaatgtagttctacctttcttcattattctaaagacactttgagccccacagaattttaaggctaccatcatgaacatcatattcctagtgctgtttgttgggacacttttcagaatctgtttttgtctccgagtgtggacagtgactgtcggcactcagtgcgtggtggttttcatctccgagtgtggacggtgagtgtcggcgctcggtgggtggtggttttcgtctccgagtgtggacggtgcgtgtcggtgctcagtgggtggtggttttcatctccgagtgtggacggtgagtattggcagtcagtgggtggttgttttcatctccgagtgtggacagtgagtgtaggcactcggtgggtggttgttttcatgtccgagtgtggacggtgagtgtcggcgctcggtgggcggtggttttcctctccgagtgtggacggcgagtgtcggcgctcggtgggcggttgttttcatctccgagtgtggacggtgagtatcggggctcggtgggtggttgttttcatctccgagtgtggacggtgagtgttggcgctcggtgggtggtgattttcatgtccgagtgtggacggtgagtgttggcgctcggtgggtggtggttttcatctacgagtgtggacggtgattgttggcactcaataggtggtggttttcatctccgagtgtggacggtgagtgttggtgctcggtgggtggtggttttcatgtccgagtgtggacggtgagtgtcggcgctccgtgcgtggttgttttcgtctccgagtgtggacggcgagtgtcggcgctcggtgggtggttgttttcgtctccgagtgtggacggcgagtgtcggcgctcggtgggtggtggttctcgtctccgagtgtggacggcgagtgtcggcgctcggtgggtggtggttctcgtctccgagtgtggacggtgagtgtcggcgctcggtgggtggtggttctcgtctccgagtgtggacggtgagtgtcggcgctcggtgggtggtggttctcgtctccgagtgtggacggtgagtgtcggcgctcggtgggtggtggttctcgtctccgagtgtggacggtgagtgtcggcgctcggtgggtggtggttctcgtctccgagtgtggacggtgagtgtcggcgctcggtgggtggtggttctcgtctccgagtgtggacggtgagtgtcggcgctcggtgggtggtggttctcgtctccgagtgtggacggtgagtgtcggcgctcggtgggtgatggtttccctgtcacccacccatccctcacggggttctgtgtccttgtcattgagtacttggcactttacgacttctgcttttgatcaaaacggataccagttgagtggacttcatctctgaagagggaagcctaagtcaataatctttttttctttactgaactctgatggaaaactatcaatccctaggactattctgaattacatttacgaagtttggaggtagatattaatagtcttgtacttaatctctttaaagcaaaaaggaattttacattttctaaaggagtataattttcattggtcatctttttttaagaaaacaacagtttcattaatcttgcttgttttcagatattttcttcttctttataagctgtttgatatattagagtcagtgctgtaaaaccatttgtccaatgctttaggcatttggttatagtttctttgtctgccaagcatttttcaataaagctagttgttggctcaaatggtcttaaatgtgaaatttattaacttcaagatgacccgtggcctacatattttcttcattgcatgtcttatctgctaaagtatttattttattatgttttaaattgatagctataaactatgctgtttggcatcagggtaaactaacatactattgtacaaataaacagtccaagtcatttaaaaacttttggttatggaaattttgagacatatctccaaaccgaacagtctgacaaatccagttgacctgttggccgacttaagcagcgatcatctcacagccagtcttgtctgatctgtgcccctgggctccccactgcctctgagatctgttattttgaagtaaatcccagatattcgatcatttcatccatacacagataagataaggactgattttttttaaagaaacgtaatcataataccattatgagatctggagaaagttaacagtaattccttaattttatcagctatttagtcaatgttcaaattctcgtagaagctttttagacagtttgttcgtatcaggattcagtcaaggtccacacattacttttggttgatatgtctcttaattaagaaaaataaacctctcttgagtcacttttggtgctcagtgaagtggttgtttgcctgttacccacccatctttaaatgaataaatcgggttttttgttctgtagattttctcatattctatatttttcagatagcttcctcatggtgtcatttaacctgttcctttgtcccttatgtttcctataaatttgtggttaataatgaagctatcagtttgaggtttgattttatattgtttacttccatcaggagataccttatgtttggttgtctctgcttttgatgataagattgaaaattgaattcaagtgttatcagcttggtataccctttaaaagttcaccataaacttttcatctaatggttttagcaccattggtaattgttttcataatctatttcttattagaaattgaaaataataattgttagctggaacactaagtttttttcattaagctctgaagtacagttcatacaggaggggcaggatagatgcctgattagttagcagttttcagaatgagttggtttgctagtatttctcaaaggtcattactaaggtatttttttattttttgattacctttatgaagtcatgatgtaaacataatttgatgagcttcaattcattgtagttgatttttttttaatttagttgtgccctctttgtgggagtctcttcaggtgggccctgggtcctgacagtacagcctcgccatagggtgccatgttccacactcatgctggtttccttgcttcgtagaatcagccgttgggaggaattgatggaatatgaaatatgaacatcttccttcttctcttttatttctttccacactgtgtctctgtccaccctgtctacccccaactggctttttctaaccccatagctctcgttcagtctcaccccaaagtcagttctacagctgggcgggctgtggcagcatcagtcatggtcccttctcatattccagcagcaccaccacttccattcaggtcattgccagctggacctgctcccaccaggcaggtgagaaaggctgcctgcgttccctctaccgtggtctctccgtcagtgaggcnnnnnnnnnnnnnnnnnnnnnnnnnnnnnnnnnnnnnnnnnnnnnnnnnnnnnnnnnnnnnnnnnnnnnnnnnnnnnnnnnnnnnnnnnnnnnnnnnnnnnnnnnnnnnnnnnnnnnnnnnnnnnnnnnnnnnnnnnnnnnnnnnnnnnnnnnnnnnnnnnnnnnnnnnnnnnnnnnnnnnnnnnnnnnnnnnnnnnnnnnnnnnnnnnnnnnnnnnnnnnnnnnnnnnnnnnnnnnnnnnnnnnnnnnnnnnnnnnnnnnnnnnnnnnnnnnnnnnnnnnnnnnnnnnnnnnnnnnnnnnnnnnnnnnnnnnnnnnnnnnnnnnnnnnnnnnnnnnnnnnnnnnnnnnnnnnnnnnnnnnnnnnnnnnnnnnnnnnnnnnnnnnnnnnnnnnnnnnnnnnnnnnnnnnnnnnnnnnnnnnnnnnnnnnnnnnnnnnnnnnnnnnnnnnnnnnnnnnnnnnnnnnnnnnnnnnnnnnnnnnnnnnnnnnnnnnnnnnnnnnnnnnnnnnnnnnnnnnnnnnnnnnnnnnnnnnnnnnnnnnnnnnnnnnnnnnnnnnnnnnnnnnnnnnnnnnnnnnnnnnnnnnnnnnnnnnnnnnnnnnnnnnnnnnnnnnnnnnnnnnnnnnnnnnnnnnnnnnnnnnnnnnnnnnnnnnnnnnnnnnnnnnnnnnnnnnnnnnnnnnnnnnnnnnnnnnnnnnnnnnnnnnnnnnnnnnnnnnnnnnnnnnnnnnnnnnnnnnnnnnnnnnnnnnnnnnnnnnnnnnnnnnnnnnnnnnnnnnnnnnnnnnnnnnnnnnnnnnnnnnnnnnnnnnnnnnnnnnnnnnnnnnnnnnnnnnnnnnnnnnnnnnnnnnnnnnnnnnnnnnnnnnnnnnnnnnnnnnnnnnnnnnnnnnnnnnnnnnnnnnnnnnnnnnnnnnnnnnnnnnnnnnnnnnnnnnnnnnnnnnnnnnnnnnnnnnnnnnnnnnnnnnnnnnnnnnnnnnnnnnnnnnnnnnnnnnnnnnnnnnnnnnnnnnnnnnnnnnnnnnnnnnnnnnnnnnnnnnnnnnnnnnnnnnnnnnnnnnnnnnnnnnnnnnnnnnnnnnnnnnnnnnnnnnnnnnnnnnnatttttttattttttgattacctttatgaagtcatgatgtaaacataatttgatgagcttcaattcattgtagttgatttttttttaatttagttgtgccctctttgtgggagtctcttcaggtgggccctgggtcctgacagtacagcctcgccatagggtgccatgttccacactcatgctggtttccttgcttcgtagaatcagccgttgggaggaattgatggaatatgaaatatgaacatcttccttcttctcttttatttctttccacactgtgtctctgtccaccctgtctacccccaactggctttttctaaccccatagctctcattcagtctcaccccaaagtcagttctacagctgggcgggctgtggcagcatcagtcatggtcccttctcatattccagcagcaccaccacttccattcaggtcattgccagctggacctgctcccaccaggcaggtgagaaaggctgcctgcgttccctctaccgtggtctctccgtcagtgaggcgctggggaaggtgtgtgtgtttcttctgtcatattctatatctgtactaggaactctgagaatttaggcttctgaggtgctatggaaagcattagggattttttgtcacttgacctggttttgtttatctaattatggagggactctctccaaaactcatttacatgcttcacagctgtgtgccctgtggtacacagatagtgacagatacttgcgtagatgctaccgtcttggcatcctcttcccccagcccagctattatttcctcctggtcttggctacatttggtgtgaatgttagccctgaatttgttgctgttcttaaacagtttagtcagaagacttcgtggggcattggaaaacctgcctttcttttgatcccttggcttcaggcctgccctgcagagccagggaagcctctggtgtctgcacatatgatgacagctcagccagctgtgccacacagctctgttgggccggggctaggggtgcagtgatggagctagacgagctagctctgtgcgtgggaacattgaaagctgacaacgagcgctgcagtttggatcatcttcatgtacgcgtggcctagcagctgtcttccctctcctccagtgccgccccagaaccagagccttaggtcacagttagaaatgcgtattctcccagcgtcaggagcaaagatggcctgctagaacaaaaccacttgattagtatctttgccctctgcggtaaggtgagatttaatgaaacgctttcaggactgtctcagtatttggatgggtggagtgcactggagtagcgtagggttatagacagttccagattattcctttgaactggaaaactgaaaaacgttctgctttcccagttatttataacatgcctcacagtagacagctgaggctccaatgatttccaaatgttatggttggacttcctaacaaaccaagtcaccatacgccttggtagtttagtcgctggtgaacagaatctaagggattaaatcacaacagtgaacctaaggacgggcaagttttctaaaagaaacccccggaagccacttggtgctcactgcagatacccaccagctgtgtgcgtctctcctttgttgttggaaatcgttgtatgattacagtcactctggcttctcgctccctcctaggaccgccccagctgtgtgcgtctctcctttgttgttggaaatcgttgtatgattacggtcactctggcttctcgctccctcctaggaccgccccagctgtgtgcgtctctcctttgttgttggaaatcgttgtatgattacggtcactctggcttctcgctccctcctaggaccgccccagctgtgtgcgtctctcctttgttgttggaaatcgttgtatgattacggtcactctggcttctcgctccctcctaggactgccgtgtgccctgtcaccctagcaccctggagccacactggctgcattcagccctgaacctgctgtctgtgctcagggcgtcagggtatcagtccctgggtaagcctgcctcctgctgtggtgccgacattctaaggattgtagagagcaacagccatgacaggaaagcaggggacagacggggaggacagaagactgtgtggacaggacggacagatgttaagacatgaactttttttcatgtattttcatttaccttcaatgcccacatttcctaacctaccttcctggttttgtttgcgtgtttgtttttctttgtttctggggtagggtgaggtggagtggggtggaagtaagttatagttcttaattgccaacctggggcaagggaaaagtaattcttagagctcagctgaaaaatgtgtattccaagtattcctgctgttataccataacaatgttataaatttgtttctggcatgatactgtataaaagccaatatctttatagtttcatcaaaagcaacataattcaaatgcctttattatggctagaactgaaagcagttttaagaactgttcgtttagagcgaagccaccagtgcctaatgttttcttttaagctgtttgcatgcgccgatctggtcattggcttctggaacttcatggagaactccctgccctcagagggccctgcctccctggctccctcgctcccttccgactccgccctcctcccctcctcctgggacatcacggggcttgacccagggcctgcctgctggttctctgtcctttgggctcctcccccacacatctgcctgtggtgtgtgctcctcccctggcctctgcgtcccttgggcttctcccatagacatctgccccaggggcgacccctttggcctccctggagcccctggagcagctgtgtcttcacagccctcgccctgcagctcctaagaaagcctcacatgcacaccaggggctccaaaccacgcgctcagagcatgggaaagtgggagcagcgcatggatttactcattttagtagaaaatgagcatctgatagaatttgttaagaaagttaaaccacagagcaactctctctatgtttcctgttttctactcttgaggtcataaatgccatctctgtgactttctcccaaaaccaggatagaaccttcaagataaaaggtacttggtaaatattgggtaatcatctccaattttcttaaccaccttctcttagtaagcagcaaaaactaaccccagaatacttacagggcagcttagtagttagtaataaatagttactatttgttctaaaccttcaaggtggaaaaattttgagtgttcattgaaaacaacttgaacatttcctaagagaccacagtaaaagggttacttgtcggcctggaagaggcagagaagacctatcacacccctttcttttacagccaaggaaactgaagtccagacgaaacactgtctacagccgtcaaggagcatttggttgacaaactgggacttctgcctctgcctcctaacacttttcaaaagtatatcatttttcagcaagctaatcaatgtgcttaaactctacattgtatcaagagtctaaaaatagtacaattagcataaaaagctcagtttgtggctagatttttaagtgtgtggagcaagagacatcaacaaagcagtttgtgtctatgggagcaaattaaaggcaatgttattaaaatccttatattgcagaggatatttacttgagacttagattctttttgtatcaatttacttcagttttctcataatatcacatactaataatcaaaatgtttgagtgacaaccagagtaaattcataaatgtaatatatctgaaaacccatttttcttttttgaaattgctgtcatttctggttgcaaatggtgtgacagcctatgattacagtaatagggactttaaggattatacatagaatgcatgtgacttttagcaagtttgtgtattgaaggaatttaataagaggttttatggaatcacaaaagctaccttcatggactttaaatatgatggatatgaaagaaactaatattcttgtactctacggtcgggttgtattaatgaaaagaaaaattggtgtgtgtgcttggactttcgtttcttctcattttcctccttggtttgtgctggggcttcctttttcatattctgctaaggaaaacaggttcggcagatcatttagcctcactggggctgtgctgctcgtggacacgtgggccgtgtgcagccgcactgcacgtaaaccgtgggtgaccacgccgtgctcttggtacggcacgtggtctggctcttccccacggggactggagcacactgaagataacacacatgcagtgacccagttccattccagcctgtgacccaagagaatgagtgtttatgcccgccaaaagacaccaccagctgcattcataacggctctgctggaaatacctgaaaatgggagctgggaaacatagagtcgcagagtcggcctattttgtggggtttaagcatccattgttgaaaataaaatgccagacgacattttgctttggttcatattgaaaacctcatggatttattcaggtatttcatttggtccattttcaaatgaaaatattttacagtttacttactgctttcacatacattcttgtatgttatcttcacaccaaccgtgttggggttagatactgttttccccatgtggcaaatttttaaaatttggagaatcaagaaaggctgtgtaacttgctcaaataagggaactaggcccaacttttcatctccaattctaactttatcactcttaccaagaaacatgtacagggcatgggtcagaccacggggctaacaatacggtgtcgttttgtatatcttcatgtttgtaaatacagcagacccctgtacgacagatagttggggtgccaacctgctgtacagtctgaaatctttgtttacccccagaatttaactaggaatagcctgctgttgcccagatgacttattaataacataaacagtctgttacatattttacgtatatactatattctgtattcttaaagtaagctagagaaaagaaaatgctattaagaaaatcataagaaaggaaaatacatttactactcatgaagtggaagtggatcatcataaaggtcttcatcctcatcttcacattgagtaggctgaggaggaagaggaggatcggagctggtttagctgtgtcaggggcagcagaggcatgagaaaacccacctatgggtggacccacgcggttcaaacctgtattgttcgtggaccaactggaattgagtttgcaaagtactgtgggccttcctcagtcccaggtgctgttaacagagctgagaaggggctcaaggaccatggcctggtggccctcccctgctgacaaaagggcagtggcttaaccccaaggaagaagactgtgtgtgtatatgcaccttgcccttctgacaaacaccaacccatgagggagagtttccaagtatggcaaagctgtgaatgaacgataaagataccaggaagagtaaaggggttgcacttatttttggataaagcatctgcacaacagtgtaccaggcacgaagcaacagatgtggcggagtgatgcgagtgatcattgatactgaagacgggagaacagatgagtcattgctaatagaatctcaagagaaataacaagcaacatggaattcagtatttgaatgagattttcttagaaaaagaaacaagtctatgaaacgaggcactgttcctgcccttgctgccctgagcctgtgggcctcattggtgacatccttggagtgcactctaagctggccttgcagctttagaaacgcaggcccctgcaggtgagcggcttgtcccgctcgggctgggttcaatccagatgcccccgtgcagccctctcttggcctcacacttcaatgtcgtcagtcccaacagggtgcaaggccagtgctttgtggttttagccatctaaacagatgtgtggcatattcaaaaattagtctccttaaatgtatgcatttctacctagatttcttactctgtaaatgggactttaaaatcccagttagcaattgggttttcatattttttttttgccttccattttattatgactcaaaattgtttttaatttcaaggtgttttctttttggaaggttttacggctatttcttcaattgcatatggacccccgctatattgagaataggagctataccctattacttctttcccgtgctccacggtaatgactgcagtcaaaggggtgcgggacccgctcagcagcaggcacggcactgcctggcattttgcaccatcttgcgtgccaggccatggcaggaacccttcccagcattcactcgtgtagccacagggaccacgcaggaaaataggggtcaggaccccagctgcttccagacctgcttctctcatagcagtcattggttttgatctcagctcattaaaatctttaaaaacaaaaacaaaacaccttcttgaaattgtgaaaatcaacagttaacccaggcctgtttatgaagtagtatgtccagaagtaacacctcacagtgcaaaacaaacgcattcatctgcatgtatagaatgaatcctgttttcttgtcactttcacttttctaactgaagtttccttgtaatgaaaaaaaaatttctgacaaaaaactaaattcaaacaaatggtttgtctgtttatattaagttaattaactttctacctttatgtctaaaattcagtgtatcaagtttgtgaaacgtattctatgctaagtgtgtaatgagttctgtgacatcttatgttaggataattcatggtctgttctacacatcagactttacattttgaaatgagaggggagagttttttccacttgcgtatatttgagtcttgaaagctgtttgtctatgaagtttatgaatctaaactcttatgaatataaagtctttcttacagatgggaaaaaataaaccatgtaaccatttcactgttattttcactgttggcaatgttttctcttttctcgaggaaagagttttcctattgagattgatcacgctgatcaataagagatcctactgatgaaagcaatgaaaaaaaaaatcctgggatggaaaacagaaagcaggagagggtgaaggtacccattcatgtgctacataggaagggtgtcctttcctcaaatagtcattgaaaaaatccactttagggcaaaagacatttatcaatttgggaatgagggcactaaaacctgacgaaggggaacttaaaactctttagttagtccaacaagagctgattttgctgcagaatggttaggactttctctctgttctactaatagtgatacagtttctggttatctttttcttttttttaattaggcagtaatttcgataatgtgtgttcagagtgtaattgaatagataattcacttgaaaaaaatacaccaaagttttttcagtagtgtttcagtttgacaataaaaaaaagtacattgtgggatatttatagtatttttgaatctatttttaccagtagactgggagtgataactgatttggggcataggggttaaaaacaggaaatgtggtttatacagtaggtagtatctccagagtttccagggttgatttcttatagtattgtctgaagagtgttatgcgtcaaaacaacattaggccgagtaccttgaaatccgcctgtgtttaaaggagccgtctttccaattacaacaggaaatgcttcatggaaaagtttgcattcttggtataggttaagatggcatagcagttgtttattgtaattacaacacgttcttcctctccagcacttttcagacactttttatacagtcagagtaaatcttgtgtcacttctagtaaatttccttcaattttcgtattaaaattttattttattttcatgaaaagttttgtcaaatagctgttaagaatgttttaaaatagactatcatagctgaggaggagcatatattagggatactgttaattacagtaatcagagaatccaagttaagaggataaaaaggcatgaagaaataggagtataattctgtgtggccttttgcatgataggttggcagaatccatgaaaactgaatagcttgattacctttgcactcagcaattccacttctgggaagatatcttacataaactgttgtattagaatccaagaatctatgtttattgcagcattatttatggtagtaaattgaaaggcaacataagttccccatagtaggagaatggtcaaatagattatgatacatccatgctagaatactaagcagccatcaaaaattataaggtagatacgtatgcactgaagagcaaacaggttgtttgcttaagtcaaagaccttcacagacaacttaccaaagtaaatatgcagatggagaataagcatatgaaaagatgttccacattgtgtgtcattagggaattgcaaattaaaacaacagtaagataccattgcacacctattagaatggccaaaatccagaacactgaaaacaccaactgctggtgagcatgtggagcaccaggatctctccttcattgctagtgggactacagaattacccagccactttggaagacagtttggcagcctcttacgaaactagacatcctcttaccatataatccatgattggcaccacttggcatttagccaagggagtggaaaagttacatccacacaaaaacctgcacaccaatgcttgtagcaatcttattcataattgccaaaacttggaagcaaccaagtaatccttcagtaggtgaataaatgtgttacggtccatctggaaaatgaatattactcggcactaagatgaaatgagcaaggcatggaaggaaccttaaatgcatgttactaagtgaaataagataaactgaaaaggctgcatattgtgtgattccaactatacgacactctgtaacaggagaaactatggagagattaaaaagatcagtggttgtcgggggttactggggaaggagggagcacagaggagttttagggcagtgaagctactgtgtgtgttaccgtaacggttggtacctgtcgttatatatttgtccaaacctgtaacatgtacaccaccaaaattgaccctaatgtaaactgtggaatttgggtaataatgacacatgtcagtgtaggtctttcgactgtaacaaatgcacccctctggtggggatgctgacagttggggaggccgtgtgtatgtggtggcgggcgggacggcatatgtgaaatctctgcaccttctgctcagttttgctgtgaaactcaaactgctctaaaaagtatagtcaattaaaaaattgttatagattacagaatgaaatttagcaagtttcaagaagagaatgtgtaacatctcattttttaggaaaaaaatatattcataggaaaagatctggaagaacatacactaacctgtcaatagtggttattcctaagaaggatgaaagaggagtttattgggcaactgtgttctttacaatgagcatttaattactcagttttctgaataaaaaattaaggacgaagacttggtgaatccaaagtgttcaatattttattctttaatgtcgaccttctctaatgaggtttctccaaattattaagaagaagaagaatcctgtctcctcatctgatgacaggcagagccattccgtcctccctgtgctggagcgagaactagcgatggtaatggaattgttgccttaagagcttgaaggcgttctctagccccgagcgcagcactcagctacgtaagttannnnnnnnnnnnnnnnnnnnttttcatgaatgattctcatcaagcaaaagccctctctttctcatgtaagctttgctgtttgcctgaacaattgtatttcatgcatttgctttcttgcactgtttaaagacagtgtaagattcttctctcccatgtgcaagatggtcatttgtcatattaaacctgggtgtgtccctactagagtgcaatccctgggagtgcaggagcactctgtgtgtgtgtgtgtgtgtgtgtggggtcactgctgtgtgtgtgtggggggggtcacttctttgtgtgtgtgtgtgtgtgtagtcactgctgtgtgtgtgtgtgtagtcactgctgtgtgtgtgtgggggggtcactgctgtgtgtgtgtgtgtggtcactgctgtgtgtgtgtgtgggggggtcactgctgtgtgtgtgggtgggggggtcacttcttgtgtgtgtgtgtgtatgtgtgtgtgtatgtgtgtagtcactgctgtgtgtgtgtgtgtatgtagtcactgctgtgtgtgtgtgggatcactgctgtgtgtgtgtgtgtgtgtggtcactgctgtgtgtgtgtgtgtagtccctgctatatccccagcccctggaaaagtgtcctgcatgtaataataatggcacactcaggaagtatttttaatagtgtgccagtttgcctgttccaaaatcaagtgaccttcctatatgattaaaagaggaaactgacaaatataccaagaaagaaggctgctctactattttgatgcatgaaaacaagatcttcgttgctggagaatatgctgggttacaccggctggcttacaggaaacagcctacaagttcttgctcagtagagatgagccttgttttctccatggggaatttccacacggggctactagattaattgctaagtggtagtagtctaggttgatactgtgtgggtggggacactttttgtcaaatatcatgacacattctaatttcatattcagacagtggaggagatacatgttgtaaatgcttagaaactgtttctcattccctcgcttgaacaacatggaaagttgtgggggtttattgaaggggaacctttttaaaaacagtacttattactgcagcataataatgtagcctttaactccaaggagcaaatccgtttgccttgtatttttcttggcacactgtccacactgatgatccctccctaatactgtgtgcaccatacatttggcattgtatggcccactgttgttggagcacaaactgaaacttaggtttccctgcacacttacgtgttcactccatcctgatatacctggacatcttcctaatatccagcacgtgcggagcattcagcaaatacctaatgacattatttcagtatattgctggaaaaataaagcatattttggaaagcaaatagattaagcctcagcaatattctatactactgtacttactttattcaaactatatttttcaaatggatcctgatgctcaaaaggactgtctttgtgagaagcgagagattgtatgctttcccaaggaataccttctttccatgtatgccgaggcacttacttttagtagatgacgcagatatattctgacttgagcattatagaattctacatatatttaggtttttctctgatgtgtttattccctcattcattcacttatcaactgcataagtcttcagaacttagtagtgagcaagacagacatggtctttgccttcctttgtttgtcattcacggatatttttgaacatcttgtgccatctgtgtgccaacctctgtgatgggagctgaggctatgatgagaaggagaatggcagatgatccctgtgctgtggagtgtacggtccaataggagagacagttgttcactgagtgatcacacaaaggactgcagagctgccccagtgggaccggggacacagtgcccaggaggacaacggtggatccaggcagcacctgggaatgcagagtggggtggggcggggccgtcctaacacctcccgcttgttggctgcctgctgtctggcggatgcctccctagcctcttaaaaacgttattccacttaaatgttgtctctgttttacaaaggagaaagctacaagtcagagcagtccagaaacttgcccccaggtgactactcagtaatgagtgtctgaggcccagtctaattctgtctgtgtcccccgatcctcttcgctcaggccacggctcagatgtcgccacagaagcaaagtcttccccagccatcaccggcatttgacattgagccattctcaacaccagtgcaaagtatggtgagagttgaacggaaattctaacttccaaggactatgtatgaaaccagcaaaatgaggagtactgtcaaggacaaacgtttccagttctagcacatcacagccatatttcatgttgtattcgtgttttttttttctgccgttgttgtgttcctatatgcaaactcaactgttagccattccttgtaccactcaaaagaattaatgtacagccaggatctgcagcagctagacagtcatggcaggaccattgtccaaacttaataccttgcatttcagaaagagaaatcagtgtgctgtttctagtcattatgctttttagtcaactgttatgtctttaattttaaattaacacctgaaatatgtgtactactttagaattggcaagatgctcctccccactgacctgtaagctctcttagggtggggggtcctgtctgttttgcccactttcttatatcaccacctgttgatgcccagcacatgatagatacacagcacgtgttggaagaatgggggaattgcacacacgtggcattttcataacagcttcgttagcaaaatgggtctcgtgatctgtctgtttcgcagagtaggcagttgtctgaaagataagctgagttgtggaaggtcatacgattggtgtagggttagccaggaaattccatctcaagtgttctttctgtcacctcaataaacttaaaaggaattatcaagcactaacgttactgatagtgacattggaatgaaattcaatgggaggaggacatatgccaccaaaaataattgcagcatggcccctctgtcaccgtcactggccctttgaaaaaggttctgtcaccaaaaatcagattctggtcctgccgccaggagccacaactgaggtcctttgaaactcatcccacacatcgttctgccatcaccgcgaggcctcagccgcttccataacggatgcacacggagcccctctctgacggcctctgcctcaccttctccgtctgacctcccatttaaggaagagactgcgaggccgcaggcgagccctgcatcaccgtacgtcaccgtcccagcccctgcctggtctgggcctcctctcagtgttcgcatgtgcatgcctttaccctggctgccagcaccttcctctgcccagtcgggaaagcacgtggctactgcttttgccaacggtgttggccgtcagagctgcatggagccagcgagccgggccaccccagcacctgtcccagcacgggcttctttggacacaggtgtttgaaagagctgacatcctcccacagacagattttggataacattttgaaacagaaaacaagcaattggaagtgagtgctttatgggagtaaaagtcttacttggacccaagagcccacgggacaggctgaggaggaaggcgagggtgcgggcgtgctactcggctggtctctccctaggccagtacccagctgtggccggagtgaagagagaaaggaagcgaaattctgaacgaggaagaccacagagatcttaccggtttcccagacacggacactatctggtctctaggccctttgcccttcctctgttcctatccagtactattctttaaccgtttaaggacttcacaaaataaatatagcaaccaaacatataacaaattattttaaattgaagtataaatttttttatgtttagtttttgtgggttcatagtaggtgtatacacttagcagttacaagagagattttgatacaggcttgcaaatgcgtaataaataaataccacatcatcagggcaaatgcgtaataaataccacatcagggtaaatggggcaaagatgttttttacaacatgaaattctttcatatggccatcctgcatatattggcaggtcaaacttgtaataactaagcactttggggtcttacatatactggagatgtatacgtgttctacttggagcaccatatgccttgagcacctctgccatgtgcctagtggcatcctccatgtagtaggatctcaatgaatttatgttagttgaatgaatgagaacttttagccattcccttagaatgaacaatttcagcccaatcggtaataaaaaaaaaaaaaagtacttgctcctgtatttaattcagcgattagctttttggagagagaccatcaatgatttatttttatattaaagtttttgttaccaaaaattataataccagcacaggcactgcactgggaggttatgatggcagctcgcagagctccgcctcactccggccctttccgatgcatccagttgaatgctgcctctttgaacctcactggcctgatgtgtggtttgactagcggtaccacttcctgtccacacaggaccacacatttttcccttctctttttccaacattaccagttatttgtatgaagcagttatttcgtttttttgtgtgaggggaaagaaggcaattatttcctttttttcattcaaaaagataaaatctagaaatacaaaagttctttcttgtccaaggttacgtctttgagctccttatattatccatgtgaaacctgtgctcgacccaaaataggaagcttgattttttttttccaaattttctgcccacaaaaatatggttcttttggttcaaagggtcctgtgcctttattcttcccattcatagctttgtcttcagaattgcattgagcagtttacacttcacctcttttacggggtgtcttattagtaatgcttaggcgggtgggttcttgccaggaagtgtttatgatgtcggggtccgagtgggagttgagttcacagcaggctgtcactgagcatgtgacaccgcctggcttcactctaagtataattttctgctttttagtcagcactctgcccccactcttttcttttacattgaggaatttcaaaagttaaaaactgccttcgcatttccagtcatccttgcaccgtagcacatcgttagagccccaaatcctgacacttgttcttgcaggagtgttgacaggaccccggttctcactgagggcagaggctgtgaattttttattctgttccttagagcatcgaaaatagcagcttactattgtgcttcgattttcagtaagtatgtatgttacctgtgcgtctacatgagctggtcctccatggcgtgcggcttagagaccagacctgagcatgtggatctccgcccctgggtggggctgcccagagggtatgagcggcgaggccaggccccagtgcccccacagcagcgggagcagtctggggacaccggggggtgtggctttcctcctgcgggaagaaagcctctctggtctccagacaagttcgtttatttcactttcacttacaacaggctctttctgttcttctctcctgcctcctagataagacttcttaccttgcaattatcctttttctcaggaagaatccattaatttctggattatattgaattactcttcactcagccatctcagcaaaatagacttaataagcacactgtttttgttttgaggagccaatatatatacatagatagatatatcttttatatagagatatatatatcttttatagatatatatatcttttatagatagatatatctatctatatatatcgatatatatagatatataatatatataatatagatattatatatagatatataatatatatctatatattatatataatatatatagatatatataatatatataatatatatagatatatataatatatataatatatatagatatatataatatatatataatatatataatatatatataatatatagatatatataatatatatagatatatataatatatatagatatatataatatatatagatatatataatatatatagatatatataatatatagatatatataatatatatagatatatataatatatagatatatataatatatatagatatatataatatatagatatatataatatatatagatatatataatatatagatatatataatatatatagatatatataatatatagatatatataatatatatagatatatataatatatagatatatataatatatatagatatatataatatatagatatatataatatatatagatatatataatatatatatcttttgaggagccaatagatatatagatatatagatatatatagatatgtatatctatatgtctctatatatatctcgatatatacctatgcccttgatattgatctgtatatgaaattggctcctcaaaagaaaaaccgtgtgcttatttgtataccgtagtgtgtgacacaatcaaaacctagttctatatttggaatatgcaaatgcccgttcaaaaggttgattatagttcttgatctctatctcaactttcccaactaaccagtagcgtggatgagactctgggagaatattttccttaatgttgttactgggaacatccatgcttttacagtgcagcattttccctgttctatagaggagatgttctcagtgtgtgcagctctagaaggcatctggaatctcccacttcaagggaaaggaattgttttggaaacacaataaaacagtattttgtttttatggggtttttttcctgcaaaatgatgataatgaaagctcttagtgaacgctgtgaatgccaggacctatggcatgcatcccctttcatcctcactgcagccccccaagggtgggacaattattattctcctgtgacagatgagaaaactgaggctcacagccttcttgccaaaagtcacaactagcagctgtcgaaactggggtttggtccccaatagtcagacctcagaccccacattcttaaatcctgtgtgtttctgcttttgagcaaagtgaggctcattgaacttgtacctaaaatctgatgttttattttgtccaggctttaacttgcttacagaatcaaattcagttttataaggagtttctcctaaaagtgattccttaagacaaaaatggtccttctgctcaataacttgactttcacctttggtagtaagatgctataattgatatttaatgtgcattttataagcattgttaaacaccctctgtattttgtgttactgcttatactgagtgtgtgtgtgtgttttacagtatatatgttttaccgtatatgttttacagtgtgtatatgttttacagtatatatagatacttatctatatatattctctgtgtgtgtgtgcgtgaagaaactgaagaacattcttaaattttcattttgaggccgactgagagccagttatagagaacataaacagtgacagaaatgaaaaacaataaaagaaaacttctcatttctttttttttctttttgacctgtatggaaatactcctttcaccatttgattctcaaaaggaaatagtggtggtgttactttctgtttctcctcagaaaactctaaagcatggggtacagcctgccagcaggggaggggagcttgtgttattattaatgccttctttctctcctttatttcaatttcaggtgtcagaaactatttaaaagaagcactggtgaatataattgccgtgcatgcagaggtaaagtatcattagatgttcctaagagatatggataaccaaaaaaaagaaaaaagaaagatgtaaatttgattatttctatggtggtcttttttttccctcagaatgtgtcttgggtataaataagatacagttcagctcttgctcgcactgtctgtctctctctgtctctgtgtgtgtgtgtgtgtgtgtgtgtgtgtgtgtgtgtgtttaactgtgagtctttctctgaaattgtatgttttctttgataattccagctaaattcataaatatttgaaaggtgaagatagattgcaaggatgtttatccttcaaagaatagtaaatcccttatcttggaaaatgaattaacctctttttagcctgtgtacaaataagcactggtatctgattcctgtagcagtggctgggattccagaaaggcagacactgcttagaaagagactcggggcaggccgacactggaacagatgcgtggtttcctgtccgtggttgacttagggtcatgcagacagtattggtgcttctgggccatgcgaaaacttgctctcacttgacacgctttcatcttaagctttgtgttaacatcctcagtgaacatcctggttaggaggactcttctgaggaacattgaaagaagagaccagagctaccaccatgatctatggctgcctgttttcattcagtcatttcaggatttgttactcactgctttgccaacactttgagagtggctgtggctcacagactaatgggggaccagataaagtggggcagatcaaagaggctaccattcagtcgtttccaccgttgcccaggtgcctcttgggcgacaagcatccaagaagggtgtttttaggtttatgccgcctgctgcatccaaaagtatctgaggccatcaaggtaaactgaaaaaacatggttaattaagagtgaaacccgaatatgaccagggaagacaaagataacactacctggttcctaaatttggctagaagtttgaagcgccaagagcagaaagaaaactatagaacgttacagtttccagttcttatgaaagggaaacatacaaattcatctctaacaatagagtttttatatgatttaactcaggcaggaagtcaccacatagatctttttataaggagcaatatttttaattgtgatcttataaaaaatataaaaattctgtttttgttatggtagcatcctatagaatttgagcccaaagtgcaaatttaggtgcagttgttgcaagcatttcttcggtaggtgggcagaactgtgagatctgtggaaattgtagtgatggtgctgattcctagtgaggcagcttttattaatgtctattatcaattgccatgggcttataatgactgaaaggagaatttcattcatagtatttactatttgctacataatcttaaattgccaaaaatttccttggacactcaagttatgtttgggttaattcaaatatttaatgctagtggctcaatctgaaaaaaggaaaagcttaaaaagaaaatatgatttactgtcatttatgagtcagcagagtcagatgtttcagtaaatctccaaagacagtaactctcagtttgaaagtctcaaactttaaggtttgaaaataatgtaagtcaaataaaatgaaatacatattgagtacagtatgtgtaaaattgtggagggggggcttgttctccaatacagaatggggtaccccatatgaaatggtgtttgtcagagtttaaggagagtctgacacaatatttttttaaattgtggtaaaatattgacccagtatgttcttatttctctaatttcttctttagagatgtttctttccagtgaaaggggcaagaggcaaaagaaatgttcaaaacagtttttattttgtcaacatcagtaatgcctttcaaaattatatttgccaatattgtatttttaagagaatttttgttgttaatcagtcaatagaatttaaatataagtctgtatcttcctttcatttataattttggccttttaaaaatgacttagaagtcctgttgattttcttttgttttgttttgaatgttaactttgtctttaacaaattcaagtcaaaaagccccacaaagcaccatgtcttcctatttcaaaccaggtgttcaccatttccaaagaactggtccctcgggtactatccaaggtgatagaagcagtttctgaagagctcagtcgactgatgcagtgtgtttcatccttcagcaaaaatggagctttacaggtaacaaaatcattcaatttcatattgaacttctgttgttatttaaagcatataaaatgtttttagtcatcaatcttatgatatgacaggcttcttttaatggatctactgattgaagaagttcatattctttcttgcataagccatacccatgaagcattgtctacaagtttcagagtttctgtttctttacagtagagcaagatcttaaagacttctgccaaattatctgaatgcagaatccttcaaaagttttgtgatttttatttttattttccaactatcttcatgacattccattccgcaggaaatttttaacaacttgcttttaataagtcttttgaaagcattcagtgcagtttgcatagaaacaacaaataactgtctcttttgtttaaattacataattataactgccgtaaacaccagttgactttggcatgcacataaccagctggtagttgctaggcatgcctgcagatggaagcgtgcacttctgcctgggagctcctcatgtgatggctggcagcgtggcagtgagtttcaaaaagcagtgcccttcgtccagccatggctgaggaagctcctatcaggccagcccaccacaaataacaactgtaaacttaaatatcaaaaaataaaattttttttttaattttgaaaaaatccctgaagacaccagagaacgaccattggtgggcagattctagaggaaatggcacccgcatgaatttcttatttcttatggattttaacctaaagccaggtccaggagtgcctaaaactccaagacaaaacgtgctttctggcttgaaaaacaggctttggagcagccacaactacggctaggtgagagaggtatcccatagaggagtctctccatatgcatggtccgactccactccagccagcccagcgaaggctagaagaactgaagtaagaattggatgctgcccaagagccaagagttagagtccaaataagttaactgcttgctaaaacaaacaaataaaaaatcaacagtccttagagatatattacagaatccagagtctccacagcataacattcacaatgtccgggatgcaaatttaattgaattcaaatttaattgaaatgcacaaataactgggaaaacacgacttattcctaatacaaaacatgatcacctgaagccacccttaagatgacccaggtattggaattagcagacaaggattttaacacagcggcatcagatgatgtaaaggaaactgcgctcctcataaatcagtaggtgggaaatctcggcggagaaatagaaaccctaaaacaggaactaaatggaatttctggaatggaaaaacacagtagatgaatttttaaaaatctactagatgataataatagattttttaaaaagtcagttaacttgtaaaccaatagaaattatccagtatgaacaacagaaataaggataattgggggaaaaaagcaagcggagctctcgacccgtgggacaatgtctcaatatccagcatgcatgtaattagattttcaaaagtgtaagaatgacccatcagccacatgaaaggatgaacaacatcgttagttagcagggaaatgaaaattaacactacaatgcgatgccatcacacatccatcaggataaaaattaaagactgactctagtagacgtcggcaagaatgtgatggaactagagctctcacacgtcatcgaggacgcgatgtagcaactgcttagggaagagctcctgcactttcttctcaagctaaacatacacatacgtaccctatgacccagctattccgatcctagttatttaagcaagagaactgaaaacgtattttcagtttcgtatatgttgtataaatgttacaaaacatttgtaagaatgttcaccatgggttcgagacacaaaacatatttataagaatgttcaggccgggcgcggtggctcacacctgtaatcccagcactttgggaggccgaggcgggcggatcacgaggtcaggagatcgagaccatcctggctaacacggtgaaacccgtctctactaaaaatacaaaaaattagccgggcgcggtggcgggcgcctgtagtcccagctactcgggaggctgaggcaggagaatggcatgaaccctggaggtggagctcgcagtgagccgagatcgcaccactgcagtctggcctggacgaaagagcgagactccgtctcaaaaaaaaaaaaaaagaatgttcaccatgggttcgagaggagcctgggcaacatagtaacaccttgtctctacaaaaaaaaaaaaaattgttttaattatccaagtgtggtgctgtgtgcctgtggtcccagctgtttgggaggctaaggtgggaggcttgcttgagcccaggaagtcaaggctgcagtgaactgtgatcgtgctactgcatccagactgggcgacagagtgacaccctttctcaaaaaaataagaatgttcgtagtcaattttattcataatcaaaaactgaaaacccaggtgtccatcaatacagtaaataaactaatatattcatacagtcaaatactattccacattaaagagaataaattactgatacagcacagtgaatcccaggagcattatgcgaaatgaaggaatccttacacagacatatacgtatactgtatagttttcatttacatgaagttctagaacaaataaaactaactgtgatgagaaactcagaacagtggcttcctgtgggtggtgggggttcctagggtggggccttagggatcgtcacagggtgctggttctgtattgtgatctgggtttccatcacaggtgtatacatcagtcaaaactcatcaaatgccacacttcgagatttgtctgttgtgtagtatgtacattctaactataaaaaaaaaaaaacgggtgcaaatagtccactgtagttaatgatatgcacactgaagtggatcagaactacaggactgagtgacggatggaagccatgtggtcatgtgaggctgtgttactgggagagcctgtgagtaaacaggcattcactgtaaagttctttcagagcctccatacatttgaaattttttcaaaatacatatttgggaaagaaaaagagcagagagcacttgttaatttggttaggggagaatctgttgcaaaagcttctgctgtgtttccatttgccaccagttttctctgaaaattgatgtatcagatctttgatattatcgtttaagttgaaaggtcatggttattataatagttccatcacaggagatgagtagtataaactgtgtaatactacagatgaattaacaggcagtcgcagtcgctactgtgggccttagcagtcttagaattttaacaggcatctgccctctctacacattacctccgtaatccatttatctgatggctaaaccactctcaaaaccagcagggagaggttggaaagtgatctcagaattagctggaaaattttttcacgtacacatgtccagaaactactggccatcaaactgttccagcctccagtttttgagacctcctcgggcctggacagacatgtgtattttgaaaaaggtcgtgagtctaaactcccgcttcactctcccactgagaatgactttgagagcttccttccttgaggccatagctctaagagggatagcaggttaacctttgataggcaattaggtgccaaactccagaactgtcctgagagcttggtgaaaaggggagtgacagtttggtgattttggcagatcttttagcatgatgttttctggattacagttttgtaggtattatatagctaaccacagtttttataattggcataacttacaggttaattaaaacactctatcaccttgattgaataaaatttctaccagaagattggttttgtagtaatttaatctttctcctaaaatggtcagctgaaagttctaccttttttcctggtaggtctgtttttacctatactagaatataaacaaaatagagacagaaattgtcatactttctagcatttgtaactttctagttatatactgtttttcaggcttctaagggactgaaaaaatgaaaccaaacaattgccttccaaacagaaaaaggtcactgaatatcctgtgtcatatatatctgctttgatctagatggcttacagaatttctaataaactgtgaagagctggctgtgtcttttgtcattgttttatgttttgtccactccttgagaataagggatatttcttttaaatgttctcctgtgtgtcccactcactgtgggcacctacttcagaacatcaagttatcattgtcagtgggtctgctggagctcccaggaaactgacttgtatgtcagatcacacttattcatgcttgcgtagaagtgaaagcttaacttttttcttaaaacttttatgaaatatttcacatagcatacgatctgtctacaatagaaaaagaatatgcaattcaatgatttttggtatattcaaagagctgtccagtcatcaccatcatcaattttagaacatttcatcccaaaagaaacccctgacccattaagtctaatcatttgcctcccaaaccaccctttccccctacagacaactaccaattggctttctatctctatgatttgtctactctgaaaatttcgtataaatggaaacatgaaaatatgaccctttgtgactggcttctttcatgtagcgtaatgtttcagggttcatccatgttgtgacatatgccagtgcctcgcttctttttacatataatattccactttaaatatgccacattttatttatccattcatcagctgatgggcatttgtggttttcccacctttgattaatatgcagaatgcttctgtgaacactcctatacaagttcttgtgtggacatgtgttttcatgtctcgtgcgtgcataccaaggagcggaattgctaggtcatgtggttactctatacttaatcttctgaggaactgccagacggttctccaaagtggcagacattcctaccagcaatttttgagggttccaatgtctctacatcctcaccattatttgttattgtctcttattgattatagccatcctagtgggtgtgaagtgatacctcattctgtgggtcgtcctttcacattctggatggtgtctttgtagcactggatttttaattttggtgaagtccactttatctgttttgttgtttatactttcggcatgatttctaagaagggtttcctagcctaaggtcacaaagatttacactgggtttcttctgatagtttcataagtttcttacatttagatctgtgatccgtgttaatttttgtgttaaggaaaggattcaacttcattcttctgcatgtggatatccagttgccctagcaccatttgttgaacagactgttcttcccccactgagtggtcttggcacccttgttgaatagcagttgatcataaatatgagggtatacaatatttaaatatattttagctttggagtatggctgaagtcagaaagtctgaggcctctaaatgtgttactctaagattgttttggctgttctgagtgccttgcatttccttatgaattttacaatcagcttgccagtttccattaaggaaaaaaaaagcagctgtgattttaatagagattgcattgaatccatagagcagagtttaggttttgagattaaggcagtgtgcctgcaagggcataggtgtcaggaagcatgccaagccacatccttacctctgtgggacacgggccctttcagggcagtgtttcaaagtgtctttcctcttgcaagactaaaagaaaaattagtggttagagagtaaatacagatggctggaaaatcatgacacagtttgtacttttcatagtgagatatctagttccctgccctcacacagtcatccttgactacaagttaattttcagtcaacgaacattttgtggtagcaaatttcttcggactgttttagaaactctactcatgactggcggtcaccatggtggtattacgccaaccccatcctacgatgagcaggctggagacccttaaccttagtacttgtttatatttgataatataaattttcctgttgtcactttgtctttttctcattttcaggcgagacttgaaatctgtgctttgagggacactgtggctgtttacctgacacccgaaagcaagtaagtggcagtgttctttagttgagtgctctattaaaaataaaggttgtcttactagtcaattctgtcctctgtaaagatgactgatcagagcacatgctcatgaatttgtgatgtgataaagtttatgtcaaggccactttgtaacacaatgtaaatgaaaggggtttaatataattttttcatttactactgacaaatcttagtcttataatacagcagagtatgacatacttcttaaagcaaaagaggataagaactgagtcttagtctgttcatagcagactctgaaggacagctcaagtgctgtaaatatcagtataagaggaagccttgtggtttctctgcaaaattttgtagtggaaatttgataatttttagctgttttgaatgaaagtcaggatttcctaccattgaaatatcagtaggtgaagtgaagcagaactactgtttgtctgtgcaaaattgtttactacgtgggcaacattacctaggaaatactgggttatagtgttgatgtgcctgagaagccaagtcgtatgcaaatgaaatgtttgaggacactgtaatatgcttactcactcatttccagcatctgataacatggcttgctgtcattctgtcagctttgcaactgaaaatacgttttccattttttcctaaccaatgaagttagcctttcattcccgtcggtcacagctcaccagcagccatttttagtgggccatgttcactgttgagccacaccttttcccagccatcgtttgtctgtacaacatactaacaggatggaaagcacccagcccatgttggatgtgtgcacacttcatgcaaatgcctaccctcttcctgctgacttagttttagagtataaggtactcatctatagaggaagtttaaaatattctaggcaagcttttgagggtgttaaatgagaaaatgtgccaaatcactttttaattttcagtaccctgccaataatatgtagtatgtttatcattattgtcatactgtcaaaacaattacatcacatttctttcaattaatcaaaaagaggttcataagaaacaagctgatggtggaggtagcggcagtggcttccacaccaggaaagaggccgctgaatgtgggaagggacccgagtgcgccaagccacccgtcccacaccccaccgcgccctcccgggagcagctggagatgcccagcaccgggttttatgactctgttggaacttttcagtctttctctctgttgctgtgacacttgcccctgatttgaggaatattgctcaaaaacgtatttcctggtagattgaggatgtttttacaatataaaagcaacgaccccctaaagtcaagaattgcagtatttcttcaccttaacccatccttagagagataaaagaactgtttcctttgtgaatgggccaagttaattaccacagtctccccttatgtgcttttcatttggggttgggaattttttcttaatactttctcccttgcgcaaagctaaacactccgaccgcctgttctttttttagaaatccttgtccttttcaccctttctggaagagaaactttacccttgggaatttttttaagggcttttatataaagacgctccaatttaaataaannnnnnnnnnnnnnnnnnnnccgctgaatgtgggaagggacccgagtgcgccaagccacccgtcccacaccccaccgcgccctcccgggagcagctggagatgcccagcaccgggttttatgactctgttggaacttttcagtctttctctctgttgctgtgacacttgcccctgatttgaggaatattgctcaaaaacgtatttcctggtagattgaggatgtttttacaatataaaagcaacgaccccctaaagtcaagaattgcagtatttcttcaccttaaccaatcataagagagataaaagaactgttcctttgtgaatggtacaagttaattaccacagtctcccctatgatgcttttcatttggtttggtaatttttctaatactttctccttgtaaaagctaaacatcccacagttttctttttaaaattctttccttttaccttcatgtaaagaacttacattgaatttttaaagcatctatatagctctccatttttctacaagttttaagtagactgtaattattacaagacattggctgtagatcaggccctgtgcaggccaaatactgtaaacaccccactgtgtcatctttcagaaggtcatccccatttcttagagtaactggattatccccagctgcttgttttgaaaagactccttttaaattaaacatgttcacattaagctctcctctatcactagcatcctttcgaagatgtttttcctttagcttttcaagtagcgtttcatttcctatttgagtttttctgaccccgttgctacaaagcctccacctggtagctacaccttcgcttttacttttactttttctattgtttttcacttttactttttctcatatttccttgcttcactggcttttattggcttctcaataattaagggatgcttaagaatttgtcagcagttctcctgtgcaaggcttcaacttcagtgtggctgtttgtgtttcaggtcaagttttaagcaggctttggaagccctgccccagctttccagtggagcagataaaaagtaagtcctgtgtgctgttcttaggagccagttgaatgtgctcaacaaggttttgtttcctaaaataccttttaaaaataatgatttggattctaggaagagcagaatccaaataagaatcagaataagcagatatacctacttaatagcgttagtaggtacatctcgtcacctgtaacttgcatgtcttctgagtgacagaataaggtaagacctttcttctgggtttaggagaatttagaagttggctctcgtttcaagtgactggtatagaaaaggtcttaagaaagctatctatgacttattcagtaaactgtattagtagcatacataagaagtaatggaaaaaagaagacagcatagtaaaatgcaggagtcagtgattttttttttaatttttgagtaattcagtagtatttattttgtgttctataaaatacaaaatgttatgaaagtagatgtgcacatatggcataataaagttttatatatacatatatatttcattagaccacactgatgatctcaacctgaatttaaactttactactcatagaacaggaaacggacctaagagaaaatctaggccaggtaaatttcataaatgcccaggctcccccgagctgaggcagtcttcattccttcaccacccgccctgcacgtggctgccgggcccatagacaggcacatgtggtgcactgactgaaatgctggcaccgtgaatgcagtgcagactcagtgcagggcagagagatcacataggctgggccatgggggggagctgtcacatggcatcgacgcacagagcaggcagcagaccagcccttccaccatcagtccccgggggcatcgccgccccgccccgcacgcatcccacgtgggcacatggcagctgtgcagacagtgcctgcacaatcagccctttcttcctttttcttgctgcttctctaacttccatcctctatttgaattggttccaaaccctgttcatttctttaaaataaatatgataaaagattgaaacagtcactgctacgtttcatatgtggaacagggctcaaaaggtagtgtgtcacgaacaatacacaccctgaaatggccccaggtcaggactatattttagatttgctgtggggatagcattctaatattgaacattgttaaaccgtgaaataatctcttgacctcagtactgttaaacccagttcttggttgctgcatccaaaccaggaaaactctaagatccttcctagctttaaaaattagatgacttgggccgggcgcagtggctcatgcctgtaatcccagcactttgggaggctgaggtgggcggatcacgacttcaggaaatcaagaccatcctggccaacatggtaaaaccccgtctctactaaaaatacaaaaattagccaggtgtggtggcgggcacctgtagtttcagctactcaggaggctgaggcaggagaattgcttgaatccgggaggtggaggttgcagtgagccgaaatcgcgccactgcactccagcctgggcgacagagcaaaactccatctgaaaaaaagaaaaaaaattagatgactgtatcacatcagttggggaaacagattgcgatatcaggcagcaaagcgatttgcctagtggaattagccctaaccctgcttgccctggtggttaactcactgctttcgctccccactctctaatacctgttaatacaaaatgagaggaagggaaagtcagcagtggctgctgggagatggggttagggaagaggctgactagaggggcagcaggggaaagggtgcagccatgccacgtgctgtagcctgttacactccggtatggctttgccagcgttcatagaaccatctaacaaaaagtgaatttgaaggtgtgtaaattattttagagttgaatttctaaaaaagaataggcccaaacatcagtctgtattagggaggaatctaatcttgggaggggataggaaggagatgtttctgtacaaacataaatacgttatcagtttatcctatttgatcaacttctttgattgatgtgtttcttttgctgagttaaggatccataggtagaacttttcagctgccttctccacacagcaagcccaggcagagccgggcactggctcccctggtgttttcttgcgttgctaggccgccccatctgtcgggctgtaaaacaagtgtctccgtcctgcaggttactggaagagctcctgaacaagttcaagagtagcatgcacttgcagctcacctgtttccaagcagcttcttcaaccatgatgaaaacataaatatctgccacataaaagaagtccaggaaaataacacgtaataagactgttcactctctaagtaccctaaaggtatttggtgtattaaacattgggtttgccatttttctcttttttcttcctctgacttcgaaaattgttggtatacatttcaaccaaaatgacctcatttgaaatgcccaggaagtatttgttttgccattcttactagatcagatcctgtatgactttaaaatacattttaaaatatattttgcatctcagcagaaggttgagtgctgcaggaagagctgcttctgcagggagttttctggaatggcgtggcacatattgaagcatttctcagtgtcccgttcacggaagcgcaggcagctcccacgacacacggagagactgactgatacgagatttggaaagctatgtagacatctttggagctcttactgtcctaaactgtacagctgtgcttaaaacccttatttcatataaatggccttaagttttctaattcaagcgggtttttggaaaaatttatggtctccattaaaatacatattacaactggggtagattatttgtggtccaggtgtctgtgatttaactttgcgttttgctatctgatttttatttttcacagggctaagcatgagctttcattctcactcactcttaatttgtcgtgcgtcactacacatgcacgtgttgcagtccctgaggccctgtgtgttatctgtgatggagtgtgaatgtgtaacgggcactgtgttacactctcaggtgttggcggggcggtcgcagacttcagggtcccctaacggaaaggccaggctccgcgtggacggccaactccctgcccgctccttcagcaggtgactgtctctgccacttcttacctgctgaaggatcttgctcagtagctggaacaatgctgctgtcacacagtctcttctctgaaacttcaggatgctccttggtcaccaggcaatgggagctgtagaccagccgcatgcacttgccccacattcactgctgactggcttcactggaataggttcaggtcaccgggacttctctcagagtcagcagcccacccaactccctcataccgtcgcatctgaaaattttcagagaggaattctctttgtagtcggcttgtcagggttttcaagtttttctatggttatttttaaatctctttttttaaatgctaaaattaatgtcctcattaatgcaagtaattttagagcacagtgtagccatgtacagtttccattatttaaaataaataaatgtgttggttcatttggtgtatggggggacatcatggtaactggaaatgaaagtttaatctttcacaaatgtgcttgataaagctgttaagaattgtctttcctaagtatgttaactgttgtatctaactcaactgtgagctaagtttaaaaactgcaatcatgaatgtttgtgatattttaaatatctactacagcacattcagccaataaagaatctgcctttaatgtaagttgtaatttacttgacatttttccctaagtgtctttatttcaacattttcatatttctactgttaacactcaaaatacttacattctggttaaccctgtattggtaaacacattgtcagaaaccatctgtcaggtcctgctaattctgtttgctggggacttaccatgtgcgaggcacaccatgaagtgcctcgttgaatcctcacaacagccttatgatacatgtgggctagcttaccgccacgtccatttagcagaggaaggaatcagggcttagagagaggttggtgacttccgtaagactgcaaggcagtaagtagcaggactcatgttcacactctggctctgtatgtccttgacttcactactgctcagctcttccttccagcggaatatgctttctgacatccatccacctgggtcacagctcagagaaagttcatcaattccagaggctaataaacagtagcaacacggaaaccggtagtgcttttatggctcagagtggaaggtaaaggcctaaaaaccccatacccaagtgagggagttcaaggactactattccaacaagtcaggggggacttcttggaagaaagggggatttcaagagctacttgagttacagaaccctggtttagtgggtaagaggagatgaatatgaaataagttagatgaaagccgagagagaaaccaggacctggagcaagttaacgaggcagctgagaaaacaaattagggaggttcaaggtacttcagtgctccagtggcatttcatttccagcacacccatgttctttgtgggtcacagcatggcttcatgtgagttagctgagctggcctcacttgaatgggaaagagctattagaaatcacttggttttttactaagactttctttatcagtgtaccatgaaagagcatattctagaaatgatttgggcattgcaaaacaagcatcattgccttaggctgagcacactgactcattctcctgtctcttgtcatctttgcatgtagatttttttaaagggaagaaatagaagagattatatttttattctggatttggtacaaggtggtggtgtgtatttctgttttgatcacgtgctatgggatattctgttagtttcataagcgtgttgtgtaatgttttcagaaaagttacaaattttaactagtttttaaatcaagattaggtttctaaaagtcaaatatattttatgtaatattcataaaataattatgcatagactaaacttgcatacatttttgtcactgaacatttgttggttctgttgcaaagattttcatatagatctgtgaactgttctgaaagatatatttaatatatcactcctcaattagagcagcagccataattattttagctttgctttaaacacagttgcatattactctatactagggccattatgctttttgtgtgctgatctcatctcatttctgctcccccagaggaggatttattacattgaggtttattacgtgtattactggaaagcctttctgtacctggccaggttagaaatatatagcaataaacatcttacggacaagacctgggtctttgggtaacttgtttgcagtttggctaatgaaaggcagtaggatatcagagtgtctttctcctgtctaggcacagaaaatcctagacaaagtgggcagtgaagcttgtcttgtgccttcaacagtgttttaccatgactggaagccgttggttttcttcttgtggtcactgttgatattttcatggttgttatcattatcatctcgtcacatgttaaaaaaagattctcgtaccaccttcctacaacccctctagccagacacaaatccctgagaaccaagaccactttatccacaatgaagtaaaataaaatacgttagcaacaatttaataggagatatcagcagacatagaaacaatttttaaaatgaaaaatttagaaccaaaaaatataatttctgaaataaagcaaaaatactgactgggcttaaatagcagtgaggataactgaggaaagagtaaaggaacttgaaaatagacagatcaacgagacaaagttaacaaggatacccaggaattgaactcagctctgcaccaagtggacctaatagacatctacagaactctccaccccaaatcaacagaatatacattcttttcagcaccacaccacacctattccaaaactgaccacatacttggaagtaaagctctcctcagcaaatgtaaaagaacagaaattataacaaactatctctcagaccacagtgcaatcaaactacaactcaggattaagaatctcactcaaaaccgctcaactacatggaaactgaacaacctgctcctgaatgactactgggtacataacgaaatgaaggcagaaataaagatgttctttcaaaccaacaagaacaaagacacaacataccagaatctctgggacacattcaaagcagtgtgtagagggaaatttatagcactaaatgcccacaagagaaagcaggaaagatccaaaattggcaccctaacgtcacaattaaaagaacctgagaagcaagagcaaacacattcaaaagctagcagaaggcaagaaataactaaaatcaagagcagaactgaaggaaatagacacaaaaaacccttcaaaaaaatcaatgaatccaggagctggttttttgaaaagatcaacaaaatcgatagaccgctagcaagactagtaagacagaagaatcaaatagacgcaataaaaaatgataaagcggatatcaccacctatcccacagaaatacaaactaccatcagagaacactacaaacacctctacgcaaataaactagaaaatctagaagaaatggataaattcctcgacacatacaccctcccaagactaaaccaggaagaagttgactctctgaatagaccaataacaggctctgaaattgaggcaataattaatagcttaccaaccaaaaaaagtccaggaccagatggattcacagccgaattctaccagaggtacaaggaggagctggtaccatttcttctgaaattattccaatcaatagaaaaagagggaatcctccctaactcattttatgaggccagcatcatcctgataccaaagcctggcagagacaaccaaaaaagagaattttagaccaatatccttgatgaacattgatgcaaaaatcctcaataaaatactggcaaactgaatccagcagcacatcaaaaagcttatccaccatgatcaagtgggcttcatccctgggatgcaaagctggttcaatatacacaaatcaataaatgtaatacagcatataaatagaaccaaagacaaaaaccacatgattatctcaatagatgcagaaaaggcctttgacaaaaattcaacagcccttcatgctaaaaactctcaataaattaggtattgatgggacgtatctcaaaataataagagctatctatcacaaacccacagccaatatcatactgaatgggcaaaaactggaagcattccctttgaaaactggcacaagacagggatggcctctctcaccactcctattcaacatagtgttggaagttctggccagggcaattaggcagcagacaaaggttttaatgcactttatccgcaatgaagtaaaataaaatatgttagcaacaatttaataggagatatcagcagagacatagaaacaatttttaaaatgaaaaatttagaaccgaaaaatacagtttctgaaataaagcaaaaatactgactggacttaaatagcacagtgatgataactgaggaaagaataaaggaacttgaagatagatcagtggatattatccaatatgaagaatagagagggaaatgtttgggcaagttttctagagacctgttcaatataatcaaatggtcttaacacatggataattgtggtcctagaaggcaagcaaagagagaatcaggcaggaaaaaatatttgaagaaataatggctggcaatttcccaaatttatggcagatacaaatttacagattcataatgctcaacaaacagcaaaaaagataaagacaaaaaatgccacactgccataaactgttaaagccaaagctaaaaaacagatctagtcagcagcagttgaacaactacctgctacatacaggagaagaacattggactcaacttctggcttaacatcagaaattatggaggccagagagagtgaaataggcatctttaaagtgatagaagaaaaaagctgtcaatccagagttcttcacttctaagtgaagatactctttcacagctaaagacatttctagataaaagaaaactaagacaatttgttgtcagcagacgtgcactgtaagaaatgttaaacgaagttcttcaaacggaaaggaaatggtatctgatggaagtgcatatcctcacaaagcaatgaagagcattagagatggtaaacagctcggtaaatacagaattctttccttttgctttttcttcttaaaggttttataatatatgactgcgagctccagcggcacaatcagttagcgtgaggtacttatatatgactgtttataaagtagtatagcattgtcctgtgggtttatagcctatatagatgtaaaataaggggggggggggggaatggacctatattggtgcaagatttctacatttcacatgaagtggtaatatattacatgtaaagggactgtgaaaagttaaggatatatgttgtagtccccagaacaatcactgaaacaataatgtagaggcgtatagctaaaaagccagtaagaaaagtataattgcatttttaaaatagtcgtgtaattttaaaaaggcataaaaggaagaacagagaacagatagaaaataacacaatgatatgtccagacacaaccatagcaataatttcattaaacattaatggattcagcatttcaattaaaaggcagaggttgtcagaaggaataaagaagcatggcccaactatatgctgtatacaagagatgaaactttatattttaaaatggcgcagataggttgaaaggaaccggatgggaaaaaaatacactatgcaaatagtaagcataaagaaggctggagttgccatatcaatataaggtaatggagattttaagataaaaacatcataacagaaggacttttcataagtataaaatgatcactcaaagatataacaatcatgtatgtatctagtaacaaagcatgaagatcattaaaatacgtaagacaaaactgacaggattaaaggaaaaatgggcagtatcattctcagattggaagttttaagctcctcttagcagctgatagaactagatgaagaaaatcatcaaagacatagaagatctgaataatgattgatatgctgtgtcatgaaacaaatctcaaagaaaattaaaattttcaaattatgcagttctctgcccacagtggaattaaactgaaaatcaataacaataaaatatcaagaaaagccctaaatatttggaagttaaaaagtgcacttccaaataccccaggaatcaaagaggaaaacaccacagaaattagaaaatatttgaattgaatgaaaagttaaaacatatcaaaatttgagggatacagctatagggtgcttacaggaaaagatttgtaaaacttcatgcttacgttagaaaacagatctacattcagtgatctaaggttccatcttaagatattaacaaataacaaattcaaccccaatcccaagttagtagaatgacagaaatcataaaggaaagggcagaagtcaaggaaatagaaaaatgcataagcaatagagaaaatgagatcaaaagacaatgggctggtttctcctttcagttgtcatcagctctgcgcagtgctggcaaagtcacatggcctttggctgtatctgtttccttgcgtgtaataagggtggctggacttaaatgatacacgaagtgctctaaattggtgcttgtagaagcagaagaggagtaatagtggaattttctaaaataagcctgttctcgccattgcttagtaaatatgctgagcatgagtacatgaacccttaaaggctatgatcacttctccaactatttattttcacaatctgtaacatcaattaattttgcattgttttaatacttgaggaatagataccatgggcgtagacacaactcacagaagcagtgttgttctgcatcaaacaggagtttcagactctgcaaaccacaagttagaggtcccaagcttgttatctgtttgactttctcctgaggtctttggataatcattgtccttgttctgtgggtctatttccccatatgagttgtctgctttttttgcctttttttttttttagacaaagccttgctctgtcactcaggctggagtgcagtggcacaactttggctcactgcaacctctgcttcctgagttcaagcgattctcctgcctcagcctcccaagtagctgggattgcaggcatgtgctaccatgcccggctaatttttctatttttagtagagacggggtttcaccatgttgtccaggctggtctcgaactcctgacctcgtgatccacccgcctcggcctcccaaagtgctgggattacaggcgtgagccaccacgcccggccatctgcattatttttaagacttaatcagacactcagcaagccaaattgtttcctgatgcaaataagttctggtaagactgccatgagggcccatccttgatttaccccttagctgtctttaaatcaggtttctttcttaaagttacttggattcttaaagtgactgttgagaatatgcttttaaggttcaggaggaagcacgacactaaaaccctacacttcaaagggtgtaaagaatccccctgttccttgtaggttgtgctggacataatgttaattagatgctctccagaccagttctggagagtcggcacactctgctgcacccaacagccgtcatggggtctgctgttggcccgtggccatcacggtctaggactacctcttgaagctgtcaggactcctggatctaagtctcctcctgcccacgaattaggaagtttgaataggaggacaggatgtggtgagcgtaatatctggaggaaaaagcagattggaaccgagacatctctggtttgctgatatttcactcttctagaacaagcagtgttaacttacatttttggcaaaaaataccagagaaaagatgctcataacttgaatttaatcccaaaaaacattaaacacaattgaggcacattctacaaaatacccaaccaatactcttcagaattatcaaggtcacagaagacagagacttgaggaactaccccagattgaagacgtgacaattaaatgcaatgtgtggtcctggattggatcttgaaccagaaaaaggacgtcagtgagccaaccggtgaaattttcgtaagatctgtaaattagctcacaatagtatatcaatgttaatttcctgcttttgatcattgtgttgtggctatttgagatattaatacttggagaagctgggagaggacaaggaatatgggaattcttcattctatttttaaaacatttttatgtctgaaattcttttaaaatgaaaaattgtgttttaatttttaaaaaagaatagatgtagaatagaaaactttcatagcagtgtatgttggtgaggaattaaaaaatcagtaggagtaactaacatggaaggggattggtgaagcacacaaaaaggaaagtgaatagaaaatccaaactaaggggtaaaaatattttctaatggattagcacagtaacatcaatgaactaatgttttcagatgaaatagatcctcagattagatcccagccccccccaaaaaaattcatctatgtggtatttctaaatatgtgctatttctgggtcctaaataaaaggactcaaaggttgaaagcaaaagaatgccagccctaccccactcccaccccaaaaaaaatgtttgctagggaaatattcatgaaaagaaagctaatggtgctaagttgatatcacacaaaatatacttgatggcaaaatgttatttaggaatatattaaggctattgtgtaatgatgaaagtaataatttgccaggaagataaaacaatttctaaacttaggtacatttaatattaataacttcaggccgggcaaggtggctcacacccgtaatcccagcactttgggagaccaaggcaggaggatcccctgaggttaggagttcgagaccagcctggccaacatgctgaaaccccatctctattaaaaacagaagaattagccaggcatggtgacaggcgcctgtagtcccagctacttgggagactgaggcaggagaatcacttgaacccaggaggcagaggttgcagtgagccgagatcacgccattgcaccccagcttgggcaaaaagagcaaaactgtctcaaaaaaaaaagtaaataataatatattaataacttcaatagatataattttttagttttacctatacaattttttagttatagggtttgggatttgcaatccataaacatactagtagatttttaacacatttttctcaatattgatggattaagcagtcaaaataattatcaaatgtatagaaaatttgaaaagcaccattagcaagcttaatctggcagaaatttgtataaccttctgactttagttagaagactgaccacattctagccacaaacaagtctgaagaaataaaaaattagtatcaaattatctgaccacagtaaaattatattagacattagtaacaagaagataacttttaaaaccctgcatgtatttggaaatttattttttgtagaaatagagtctcactatgttgcccagactggtcttgaactcttggcttcaagcgatcctcctgcctcagcctcccaaagtggctggattacaggtgtaagccatgcctggctaacatttgga

SEQ ID NO: 375 - DNA, 3200 bp, Homo sapiens
gacctaccgggccctgtctgtgccggccgtgagctgcggcaggacggctggagattacttctctaacaggatcaccagtttgctccacaaagcacaatgtctcgatcacgacaacccccccttgtgaccggcatctctccaaatgaagggataccatggacgaaggtcacaatcaggggagaaaatctggggactggccccaccgacctcataggcttgaccatttgtggacataattgcctcctgacggcagaatggatgtctgcaagtaaaatagtatgtcgagtgggacaagccaaaaatgacaaaggagacattattgtcaccactaagtcaggtggcagaggaacctcaacagtctctttcaagctactcaaacctgagaaaataggcattttggatcagtctgctgtgtgggttgatgaaatgaattattatgatatgcgcactgacaggaacaaaggaattccgcccttgtccttacgtcctgctaacccgcttggcattgagattgaaaaaagtaaattttcgcagaaggacttagaaatgctattccatggaatgagtgctgattttacaagtgagaatttctcagcagcctggtatcttatagagaatcactcaaacaccagttttgagcagctcaaaatggcagtcaccaacctaaagagacaggctaacaagaagagtgagggcagcctggcctatgtgaaaggcggtctcagtacattcttcgaagcacaggatgccctctcagccatccatcaaaaactagaagcagatggaacggaaaaagtagaaggatccatgacgcagaaactggagaatgttctgaacagagcaagtaatactgcagacacattgtttcaagaagtattaggtcggaaagacaaggcagattccactagaaatgcactcaatgtgcttcagcgatttaagtttcttttcaaccttcctctaaatattgaaaggaatattcaaaagggtgattatgatgtggttattaatgattatgaaaaggccaagtcactttttgggaaaacggaggtgcaagttttcaagaaatattatgctgaagtagaaacaaggattgaagctttaagagaattacttctggataaattgcttgagacaccatcaactttacatgaccaaaaacgttacataaggtacctgtctgaccttcatgcgtctggtgaccctgcttggcaatgcattggagcccaacacaagtggatccttcagctcatgcacagttgcaaagagggctacgtgaaagatctgaaaggtaacccaggcctgcacagtcccatgttggatcttgataatgatacacgtccctcagtgttgggccatctcagtcagacagcgtccctgaagaggggcagcagctttcagtctggtcgagacgacacgtggagatacaaaactccccacagggtggcctttgttgaaaaattgacaaaactcgtcttgagccagctgcctaacttctggaaactctggatctcctacgttaatggaagcctcttcagtgagactgctgagaagtcaggccagattgaaagatcaaagaatgtaaggcaaagacaaaatgattttaagaaaatgattcaggaagtaatgcactccctggtgaagcttacccgcggagccctgcttcccctcagcatccgggatggggaagccaagcagtacggaggctgggaggtgaagtgcgagctctccggacagtggctcgctcacgccatccagactgtaagacttactcatgaatcgttgactgcccttgaaattcctaatgacctgttacagactatccaggatctcatcttggatctccgagtacgttgcgtaatggccacgttgcagcacacggcggaagaaataaagagattagctgaaaaagaagactggattgttgacaatgaaggactgacttctctaccatgtcagtttgaacagtgcatcgtgtgttctctgcagtcactgaagggggttctggagtgcaagccgggagaggccagtgtcttccaacaacctaaaacacaggaggaggtttgccagctaagcatcaatataatgcaggtttttatatactgtctggaacagttgagcaccaagcctgatgcagatatagatactacacatctctctgttgatgtttcttcccctgacttgtttggaagtatccatgaagacttcagcttgacctcagaacagcgccttttgatagtcctaagtaattgctgctatctagaacgtcacaccttcctaaatatcgcagaacattttgaaaagcacaacttccagggaatagaaaaaatcacacaggttagcatggcctcattgaaagaactagatcaaagactctttgaaaattacatcgagttgaaagcagatcccatcgttggctccttagaacctggaatttatgcaggatattttgattggaaggactgcctgcctccaacaggtgtcagaaactatttaaaagaagcactggtgaatataattgccgtgcatgcagaggtgttcaccatttccaaagaactggtccctcgggtactatccaaggtgatagaagcagtttctgaagagctcagtcgactgatgcagtgtgtttcatccttcagcaaaaatggagctttacaggcgagacttgaaatctgtgctttgagggacactgtggctgtttacctgacacccgaaagcaagtcaagttttaagcaggctttggaagccctgccccagctttccagtggagcagataaaaagttactggaagagctcctgaacaagttcaagagtagcatgcacttgcagctcacctgtttccaagcagcttcttcaaccatgatgaaaacataaatatctgccacataaaagaagtccaggaaaataacacaaggttgagtgctgcaggaagagctgcttctgcagggagttttctggaatggcgtggcacatattgaagcatttctcagtgtcccgttcacggaagcgcaggcagctcccacgacacacggagagactgactgatacgagatttggaaagctatgtagacatctttggagctcttactgtcctaaactgtacagctgtgcttaaaacccttatttcatataaatggccttaagttttctaattcaagcgggtttttggaaaaatttatggtctccattaaaatacatattac

SEQ ID NO: 376 - protein, 920 aa, Homo sapiens
MSRSRQPPLVTGISPNEGIPWTKVTIRGENLGTGPTDLIGLTICGHNCLLTAEWMSASKIVCRVGQAKNDKGDIIVTTKSGGRGTSTVSFKLLKPEKIGILDQSAVWVDEMNYYDMRTDRNKGIPPLSLRPANPLGIEIEKSKFSQKDLEMLFHGMSADFTSENFSAAWYLIENHSNTSFEQLKMAVTNLKRQANKKSEGSLAYVKGGLSTFFEAQDALSAIHQKLEADGTEKVEGSMTQKLENVLNRNTADTLFQEVLGRKDKADSTRNALNVLQRFKFLFNLPLNIERNIQKGDYDVVINDYEKAKSLFGKTEVQVFKKYYAEVETRIEALRELLLDKLLETPSTLHDQKRYIRYLSDLHASGDPAWQCIGAQHKWILQLMHSCKEGYVKDLKGNPGLHSPMLDLDNDWSVLGHLSQTASLKRGSSFQSGRDDTWRYKTPHRVAFVEKLTKLVLSQLPNFWKLWISYVNGSLFSETAEKSGQIERSKNVRQRQNDFKKMIQEVMHSLVKLTRGALLPLSIRDGEAKQYGGWEVKCELSGQWLAHAIQTVRLTHESLTALEIPNDLLQTIQDLILDLRVRCVMATLQHTAEEIKRLAEKEDWIVDNEGLTSLPCQFEQCIVCSLQSLKGVLECKPGEASVFQQPKTQEEVCQLSINIMQVFIYCLEQLSTKPDADIDTTHLSVDVSSPDLFGSIHEDFSLTSEQRLLIVLSNCCYLERHTFLNIAEHFEKHNFQGIEKITQVSMASLKELDQRLFENYIELKADPIVGSLEPGIYAGYFDWKDCLPPTGVRNYLKEALVNIIAVHAEVFTISKELVPRVLSKVIEAVSEELSRLMQCVSSFSKNGALQARLEICALRDTVAVYLTPESKSSFKQALEALPQLSSGADKKLLEELLNKFKSSMHLQLTCFQAASSTMMKT

SEQ ID NO: 377 - DNA, 68193 bp, Mus musculus
  misc_feature (1)...(68193): n = A,T,C or G
aattgaacacaggacctctggaagagcagacattgctcttaacctttgaaattatccttgaatgtatgattttttgtttaaataatggcattgtttttatgtttaaaacattaattaggctatgaagatgtagctcactggtaagactatttacctctggtattcagtctctaacattgccaataataatgataataacacgttgcaaataaacattaaaacaaaatgtaagtatgagtgtcttaaataggaaagaatctccataagaaatatcatttcattactcccatttaacaatataagaataaatgtaatgttcaagttgagaaaaaaatgaaagattccagaacagtatttgcagtaggttccaaatttgtttgtttgcttaattgtttgtttgagacagctcttattatgtagctctggttgtcctggaactcactatgtagaacaggatggcctcaaacttacagagatccacctgcctctgcttcctaagtgttgaattaaaggtgtgtgccactatgtccagttatgtccccaattttgatggtttaaaaacatatgctgtaaataaatattacatatacgataatatatagagaaaaataatagaaaaatgtcagataagattgttgcaacacatatgatttatgcttttctaaagtcatccactggtctagaagcatttattttctttttaacctgaatgaaacttcgtttaaataaaacaataggtgccacaatatagcagctagcctagtgggaactcgtgggcactacagagagtgatgtgagacttgaagttgagattcccttactgtgtaagagtgactgtgtggtcgtcctaagccttagttcttctcatctgttaaatgacagtaataatatttaccttacaaagatgagggatgggaaatgaggtgaaaatgattgatgtgtaacagagacttgacagatggcaacctttatgttatttttggtactattattgctattaatgttactaaattgcccccccccccccacacacacaccaaaagataacagcttaaaaatttagaaggaaggaaggacatgtctgaggattttaatttaattattccacagtgcacctgtaaaatattttcccctttactgggctgttacatatagaaaattaaaaataactataaatatagcttaagaagaatgatgatattcttgcataaagccaccaccaggctacacactagaatactgatagcgcccctacacctcactcctttaccttctcttcaagttctaatatgaggttttagatgacagttgccttgattttcatcatagttttaccactttcacgtgtactgtaaacatataactttatgccagtctagggcttgtgtgcagatgtatccatactgctttcattcttttgtgtcttttttttttctatcaaatagtccatctctggtagtatatttttgtgtctgctagttctatttatgcaacattgcaatgcataaatacttgtccaatattccataactatttatcttctttattatggtattgattgatgttgtgggtgtctttggcttggggttgttatgaattctacagtgcatataagtagctatcaatatatttccactagagcctcagtggggctcctttgttctgcttttaatgctttttgctaatttagtaaccacataataatacagcatgttaaaaacttaaattgtatgtctctaataactaaatggctgaagttatcatatatatgaaaatatgcaaaccatgaatatatgcatgctttacttccattaaatgcatatgtaaaggttttaatctcatgctttgaaatttttaaaattatttttatcactaggaaggaattttcaaatgtcttaaatattatgttgcatatattagatttcatttaatattatttataaatttatattgtgtttgatattttattttctaaatatgtccttatttgaacttcccatatagaaatttgttataaactaaagtagatcaagtattcccatatgttctctcagcatctcttatagaaaagtctattttttttcacaaatttttaagatagccttcttccttgtatgcttggggagtgtcttttgacaagctccttcacccactgaggagatcttcatattcttagcacatttaaaacatttgtagaatcagattgttagtttatagattcacacctgtagcctctaggctgggatggacctgaatctgtagctgaggctagctggcagtagattgcatcgtacactaacaggtgttgggaactacagacatggaatatcacctttattggtcacattctctctcactttctctcagggaggttatgcaactttccacctctgaaggaagaaaactgtctcttcatattttccatcagatttattcttagataatttagatttgggcttctggttcctgctttgctctctagcttctttccacctgggcctacttttagtgttgactatttaacgcagacaactcattaaactttcatagcactggaagtaatttttctgtccataattctttggtgtatacgacctacagagaaagatgtgtcattcttctgtgcagtctgcagtccccacccttatcccctactcgcttccttacgtcctagggcttctagcgcaacactgagtagaaatggtctgacatttattatggattctcttagctgaaagtcaacattatcattacttttgtttctgtcattctggtaagaatggagtgacatccactgtggttttaatttgcatttaattttatatattctgttctgtaacttttactcatttgtaatggggttactttgttttactattacagtgaggtctctttccacattcataacttcctgtgtagattatagtttcattttcctaaaggtgtctcattgattgattgattgattgatttctgtagtccaggctggccttacatttgtagagattgtttagactctgcccctcaactgttggaatcacaggtgtgagtcaccatgcccaatgtccaaaaaaaatcttttcaacatgtgcatttaaattttgacaaaatcaagtttaaccttttcatgatcaacactacctgtgtcatctccaagaaactatctacccaaagccatgatgcagtgacacattacagaactctccatttcttaagattgatgacctatggtgaattcattgtttttcttgtgggatcaggcttgtcccccgctcctcttctggataactcagtgttgacatcaccgatttctgatctccaaataaattccaagtactttaaaaaaaggaatgtctctttaaatttcccctttccatctccgttcaacccagcaagcccacggcacaaccgagtgtgtcccctacatatttctgaaggtcctcagagactcaactgtgttcacaaccagtccatcagtgaggccactgatgaagacctcacagctgggaatgcccacatgcaccctcagtctgtgtggtaggtgctttgagcaggtgttccctgagctaccatcatctgacgccagagagaaactggggaacatggtgctttgggccttccagatcttggagaaaacatggctccctgaaaattctgctcatgtctctcttccagccttcttgccattgaacttccaacccaatgcagggagaagaaaagaatgtttggtgtgtccattgcatctctttcgtcaatcccattgctttcaaaaaggacctgtgttttctttcttttagctcttcattcttcccagatggttgctgtacttttacctctgaaagtgtttttttttttcttttcttttctttttctttttggaaggcttctctaaatatctaaatcagcagaaatcagcagaaagtcttcatctgacttttactactttaaaagccccagtcaggtgcccccccccagaagaaacagaatgttccaaacactagccttgagcaaaatgagttaagcctacacatcagccctgcccaattgctttcacccactgattctgttccagcacaccccacagcatgtgaggcccagtacttggcactgagctggcaaggggaagaactttaccctctggtggaggttggcaggagtagtggaaacagacatagtaactggcagttgggatactgccaggtaactgctcggagggacagtcagggtcaaataagcatatggcaaagagtagcaaaacggcctggagccagggagaggctaacaatagcacctctatgcagcaaggtaaccagggttccaatcccactggaaggctagaaaggtactctagggtgaggcagcatgatatgcaaaggtggggagctggatgtgaacataaaagccacctcgagtgcttctggtcattaaacatcagaatggctgctggttacaccaagaaagaaatcatgaagttaaggaggtatctttagtaaagcttcactgtttgtaagtcaaggactaatacagattgctgtcaagtgttcctaagacaaagatgcacgctttctccaataatctgacaacatttagtgttagaatggaaaactcaaaaattcttatcctgatatcaactgtgttttctgcagttcagttctgacactgcgctgctcagtcagcgcatcctttactggtcaagagcaaagttcaccacacagtggctcctcccactttacactgaactgatgtcccactttcacttcggataaagtgcaaatgtggtatatagtcaagcagaaaatcttcacagaactggctgagaagaaaaaccatacttaagagattaaagcctcattataaaggagacacaaaggaagagtgtatgcagggagaggggcaggccccgattatgaaatcatgtgtattgttgacaatgggcacaaccctgttaaggacactggcaaaggtggttcccgatgtggtccaggctcaacatgggtggcaaagttctcctcaggagtccaagtttagtgtttaaaaaccattggtcagtgtgtgcaaagactagcaacttcagcttcttcttccaggctaacagactcccccaactccacgccccaagccacacatagctgccacattctggggtgtacccaacaaacgtgctaagagttcaggttgtaggacgtagcgttcaaagaaacctttaccatatcccggcagccaagtatgcgtgtctgtccttttttttttttaattaggaattttcctcgtttacattttcaatgctatcccaaagggcccccatacccacccccccaatcctctacccacccattccccctttttggccctggcattcccctgtactggggcatataaagtttgcaagtccaatgggcctctctttccagtgatggccgactaggccatcttttgatacatatgcagctaaagacaagagctcccgggtactggttagttcatattgttgttccacctatagggttgcagttccctttagctccttgggtaatttctctagctcctccattgggggccgtgtgacccatccaatagctgactgtgatcatccacttctgtgtttgctaggccccggcatagtctcacaagagagagctatatctgggtcctttcagcgaaatcttgctagtgtatgcaatggtgtcagcatttggaagctgattatgggatggatccctgcatatggcaatcactagatggtccatcctttcgtcacagctccaaattttgtctctgtaactccttccatgggtgttttgttcccatttctaagaaagggtaaagtgtcctttcttcattccatccctgcagctactcaggattctggggcccaagccttgcaggccacggtgtgttagtcagctttctgtaactaagtgcttgagacaactttaaagaggcaaaagcttatgtggatcccattgtcttgggcatgaggtgaggcaatcaaatagcagggtaggaaaatgaaggggagaaagcagcctcatagaagccaggaaggaaggaaggaaggcaagaaagaaatgggaagggtttgctaagattctaatatccttttcaaaggcgcctctccaatgacctacttcccactaggattcagctcataaaggttctttcatctcccgacagtgccacaggctggcaaacaaggctttagcagacgagttttgggggaacgctccagagatccctttgctagcagtaaggcccagggccaaggcatagcgctccataccctcctttcctcaaataaaggcatgccaccctctctcgcttctgtgtgttcatcaccaggaagttccactgcgtttttccaagtttcaaccctagggaacactgggcattgcatatttgcataacacagacatcttattactcaggaaaaccccaggtttgtaagatctgtgccagctagaaaaagatcagattttttttttaactgtgctacaaattaaattggctaaagactatgtataaagcaaataagcacaaagctctttgaagatgttttgcggggcctacctacctctagagcctaccagaaccagcaaaaaaaacatgagctatttctaattgaacatgtgtggaagaaacctgctcactcaactgatgccccctgctgttacagactcacataaaaacaagacacttctcactgaaaggagtttgcaaaacatgaaacctgggacaaagcatgactgtctacccctgagcacaagaactctgagtggtcccccttcttaaccatctggttagtaagcagtttttcctctcttcctataaaccgcacctagctcaacaaatggcctgcacacatttgaacaggcttcctgtgtcgatctttaacagaaggcctttgtgttttaccacacaaccaatctggtgccacaacactgacttttatgtgcacgacacagtggactggcattcccagtgtcaacctaaaagtgagagaccaaatcttttaagttcagactccattttagagaacttgaactcaggtgaactaacaggccggtacctaacattagtttccaagttacctcccaacaaaacctgagcctagctccagtttctaggctgacccccaactgacaagcatctccaggttaatctcccccaacaactcagcgtttccaggttaactcccaacaagcccaccccctgccaacgaccaccaatgcagagggaaacaaaagttaagtttatggtttgactcccagcaccagccaattatgttaaagaccatagttgcttcccagttagatgcttctcaggctagaaacactcacctcccacttgttgctttctataaagcctcacccgggtagatattcagggctgctctccaccaaaaccatcctgtgtgtcagcagtgggctgaggggcctgagccagctccattaaaggacctgttgtgatttgcactgaattggctcctgtctgtttatttatttatttatttatttatttttaaagatttatttattattatatgtaagtacactgtagctgtcttcagacacaccagaagagggagtcagatcttgttacggatggttgtgagccaccatgtggttgctgggatttgaactctggaccttcggaagaacagtcgggtgctcttacccactgagccatctcaccagcccatttttttttttaaattttatttatattttttattttttggaggggagggggtgttcactaacacttccctggcagtacaaaagcacttaaaactactaggaagtcacaagtatgaaaaaattaactcttaaaaatccatgcatttttatatcaataaaggtaaggaaaagcgttcgaaagtcctacttgcagtaccaagaaaatatctacaatatgttgggatacacgtaataagcaatgtggcatagactcaagaaaatgcaggaacgagacacttgagctttgggtagggcaggagaatcatggagcagtagcagcagatgaccataggggtagctttgatgaaggtgactgaagatggctgagatgcttgccaggtggaattaactagacttgaaatgagggcgtaagacaatgcccagaggttcagcatccccaggacgctcacagtatccaagaacagcagcatgccactctggttatactcacttctgaatcagacggtctattccagtctttaagggccccacattctccactctgacttctgaggcaggagaagaagagggagaaggaggaggaggaggaggaggaggaggaggaggagaaggaggaggaggaggaggaggaagaggaggaggaggaggaggaggtatacacagctcaaagtaagcactcaaagacagatggaaaccatcagagcctctttaaaggagaaaatcaattctaggcttttggtttgaaaacatttttttttttgtaattttatgagcgagtttacatgtatttgtatttatgctgatttaaaaataaattaagttcggctaggcaatacaaattaaggagtgatttttttttttctttttctttttctttttctttttcttttctttttctttttttttttttttaaagtccttgctggtatggtttaattttttgtaccatcaccacctagtggagaaaaccttgaacttcaaagagctaaggtttgagaagaaatgcagggaggggtattatactagtcttatttcttctgttctcacaatgaactttgaggtcattttcttccttaatatttggaaatggggtcagaagttaagtagctttaccaagggccacagtgtgactcactcagttccagataacttgaaattaaatgtagttcattttcaccatatagccattcaaagggctcaactctattcttgtctttgtgagtaagttatgtatctcaatatggagaattgccttatttatacgtgtgaaatgacatgtgcaaaaggactaagatgaagatagagtagaacacatagtatgtacgagaccctggcttaaatctctatcacaagacaatggaagcaaggagaaaaaggggggcgcccagagactggattcccttcctttatccctgaaaccccacttcttcctctatgagcccacgacttgtttctctttgaatctactattcttgcatcttagtcattgagggttggtcatgtgcactgtatgttcagatctgatttctgtgcccagagatccagtcactgtatggatgctagcactgtcttgattattgaaccatctcctgtatccatgttgtgtaacgaatacttcccagaggctggagaaatggcttagtggttaagagcactgactgctcttccagaggtcctgagttcaattcccagcaaccacatggtggctcccagacatctgtaatgggatctgatgccctcttctggtgtgtctggagagagcaaccgtgtactcacataatatatatatacatatatatacatatatacatatacatatacatatatatatatttacatatatatatatatatatatatttaaaaaaaaacgctccccaatcatctctgattgggtaataacaagctgaccagcctgtggctgagcagaggagataggaaggctggacttctgatctcagccaggtagagagagaaggaagagagggacaagaagaccaatgtttgccatgaggttgatatgaaagagcagtcatgaggacacacatggaccagagtgagccaggggaagaccagattggcatgttaacagggcatttgtctgggtattatcagccttagagggttagaatagcccagaatggtccagcttaggcttgcttcttgttattaaacttaatagttctttgtgtcagctatttgggagccagaacgggaacagatgagttctacacttaggtatgtaacagaatttgtaactcacgtcacattagctattgccagtttacttcatagcataagataactaaaccttcagtgggaaaacagtaaataaaaagtttctactgtaacttgctgtatactgttgggtggtaaagtaaatacacactcaaattttgacaagattcataagtctttgctttcccttaacacatttaatttctgattatcagcaataatcaattataataaaattttgatgtttttggtagcccccaggtacaggttgagaattccagccttagcaacttaacaagtcacactcctctcaatctacctatatgtatttaaatattttaaaagatgtattacatttatatttacatgttttgcctgcatgtatgactgtgcattacctaggtgtagtgcccccagaggccagaataaggagccagatcctctgacctggtgctgcaaactgaaagaggaacctacaatagcagcaagtgctcttaactactgagccacctctccagctccttttgcatctttccaaggagtaacttacagaaaagcataataaaatcataagcagtaatacatggatgtagactaccacactaactttttaaatttgcttttcaaaagtaaaaatacaattttgtattatgtagccctggctgacttggaactcaaaatgtagaccacgctggcctcaaactctgagatccacctgtcagtgcctcctgagtactagtattaaaggtacacagcactacacccagagaatatacatttataaatgcctattgtactcatttcctgctcctgtctgctggaaatacctttaaggactgcctgccatcattttgttattgggatacaacggtgattttcagtttacgactattatatcagctagagataactattaagcaagtactttgggcgacaggtcctaaagtaaaattaaggggcacaggggagggaatcccttttattgcatttccttgagcagccttcggaattgaactttgtctacctgtgtagctcttgtgtgtttatgtcgaagccctttctccagcttcctaggcacttctggggtatttccacttcgttttagttttattacaaatattctccctgatgacagcatttctagttccgcacccagaaggccaaaatcctggaaagccaggttcccaagttccctccgcttgggttttactcgaaggcggttgtttccggtactgagcaggcatgcgcacgcgcaccacgcctatccaagcagcgccacagaaaggctcttcccagggaccgaagaagacgagagggcctgttgtgacggagaactacatttcccaaagttcaatgcgagaaattgccggcggcgattgggggcatcgggttgcggagtcttctgcccgctttggactacacttcccgacacgactcgcgaggcgttgccagctgcgggccgagggcgagttgacgcgggagctcaggacgtgaggcatgagcggcgccctccctcggcccgtgcgtgtcctgctccctacccgcgcgagggtcgcgcggcaccgggcctagcggcgggcatcggcgttctcaggggcaggtgcagccgcacgggcgccagggagggcagctgccaccatggaggtgagcgggccggaagacgaccccttcctgtcgcagttgcaccaggtgcagtgcccagtgtgccagcagatgatgcccgccgcgcacatcaattcgcacctggaccgctgcctgctgctgcaccctgcggggcacgcggagccagcggccggctctcaccgcgctggggagcgggccaaggggccctcgccacccggcgccaagaggcgtcgactgtcggagagctcggcgctgaagcagcccgccaccccgacggcggccgaaagcagcgaaggcgagggcgaggagggcgatgacggcggcgagaccgagagccgtgagagctacgacgcaccgcccacgcccagcggtgcgcgccttatcccggacttcccggtggcccgctccagcagccccgccagaaagggtatggggaagagaccagcggctgcagccgccgcaggcagcgcatccccgcgcagctgggatgaggcggaggcgcaggaggaggaggaggcgggggtggacggcgatggcgacgcggacgtggacggtgaggacgatcccgggcactgggatgcggacgccgccgacgcctcgttcggagtcagcgcgggccgcgcgcatccccgggcgctggcggcggaggagatccgacagatgctggagggcaagccgctggctgacaagatgcgtccagacacgctgcaggactacatcgggcagagtagggccgtagggcaggagactctgctccgctcgctactggaggccaatgagatcccttcgctcatcttgtggggcccgccaggttgcggtaaggtgagtgctgctcttgctgtttttgccaagggccgcggaggtattctgagccgggtgcggtccttagattccggacccctcctctggagagggaggcctgggggcgcggtcctgatgcgtgagcggagtttgtaatacgcaagcaagcatgccatttccccagattccccagaccccttgttgggcgtttttcacaagaaaatgcccaattttcttggtttatgcagagatgtggacagagatttgagctatctttgtggtcatatccatgatttttagtgacccaattccaggcaggggacatgctgcaaacattggggaagaaacattttgtatgctccatttgttgtggaaaactaattaaattttttctattatacttgaccccctctcccactaattggcttattctaactggtttttggaactaatagaagtctctcttctgtgattcgttttcaacaggcatttccataactttcccataccaactgctgcttgagaaaagcatcaatgttctgttttagccacagccagaggagactggttagaataccgtgggtttagagaacaggtcactggaagaatacttgagaaaatgtggtgaagtgacagtcctgctcataggatacccggaccgtcctgtggacagtcaggaaagggcccaggattataaagagctcttctcaatttacggttcagactgcttcattcacaagcacattcctgatgcttatcctgttttcctttgcagctcctctcagccacacctctttatttgctggaatacatcattccttttgtgtctgcttgtactcatgttctctctggccaagcataaatcacatgtacccagataacattttttttttaagcccaggcccttgcactctactccaccattgagctacacttccagctctcaaaataacatgctgattgcttagggtgctgactgttagcatcttgcccactcctccaagatttaatggtagttactccatttaggggttcggtcagtagcattggtagcaattctgacatctgtgttacgacatggaaatagtcagctattgatgcttgtaagctttgaaaaggtctgcagggaaatgactggtgagtcatggagaattgagtacaagagatttactaggccaaggcttctcagtgaggcatgtggtgatagttacaagcctatatgatgggggagcctaattccaaaaggcacaggtaagctgggatttattaccaggccgccagtgtctagtaacactcaactgtacaatttccagaaaataaagtactacctttctattcagggataatttgtcattcggcaagcaaccttctctctctctcttatttttttcttcccattttaaatattgaattgctaacagtagtattagtagtgtcaaatacacatttattgagcggtgccagatattgaattaagagttttcttgagggcctgaaaggtagctcagtagttaagagcacagactactctgccagaggacccaggttcaattcctagcacccacatggtgctaagcacctgtaactgcagttccaggggatccagtgccgccttccaggagagctgacagcctctcttctgaccttccagggcaagagacacacacatagtgtagacattcatgctggcaaaacactcttattgcataaaacaaattattattattttttaaaaaggttttcttgagtctttcctttgttttctaagtactaataagatcaaattgctccttttaatttccttgtagagtggatgtgcacaagtggcatgtagctgtctcatatgctagctgcttatttccctcagaagctgttcattttgcttttctcagctaatctgctggcttcccatttgagcttggttctgggatcagctcttatcctggggcctttagcattatactcttggccaaaggagaaagaattttctctttggtgagaggtcacagctgtcaccctggctttgctaaatcaagacttctattctttattgggattcataagagcttaaagagtccaccaataaagaatcaaaaggagttaaggatggaggatggtcagaattggcctaagatttaactatctcctgattttcattgtaatgcttatgtatcgtccttctatgcttcagcactcttccaggttcagtgtacttggctaagtagatatgatacttatggtacttatactttttggtacctatgcatactgcccagtctgactaggtttttaaactttgcatatctttttctagaccaccttggctcacatcatagccaacaacagcaagaagcacagcataaggtttgtgacattatctgcaacaaatgccaagacaaatgatgtgcgagatgtcataaagcaggctcagaatgagaagagctttttcaaaaggaaaaccatcctttttattgatgagattcatcgcttcaataaatctcagcaggtatattaactttttgctatttttagatattatgtatgtaagataagatacatagaatgtaagatcaggttgtaaagtataaaacaatataaacctgcaacaaatgttaactttcctcaagacacataggcttgccatccatcctcaacccccccttactctctcttctttctttctttaaagtatttttagatgacaagagaatgctttctctctctgataaatgaaataattgccatatctctgagctgtctgtagaagaaaaggttcttttgatccattttccaacttttagagccttttaatctaaaaagacattgtgactagttgaactcaatataaagatcattatttaaggctagggtataaagtacttatctagtttatgaaaaccctggattctagttctgccctgccctccaaagttcatggttttatctttccccactatttttatgttcaaaattattttctgttttctgtgccaaggtaaaaattgtaagataatgctctgtttattttcaaccctttagaaagaaaatgatagtttgtttttatatgtaaaacttcttttttgagttacctaaatagaaaaaatattttcaggcatactcttttctttgatttacattgttacagctttttacgtataggtagaaatatttccccaaactaataaaccgtttttctccagatctgaatctctttgcgtataccaacaccttagcgttctgcctgatttgggcttaaatatgcgaccagtgagttgacatttcccctttagacaatgtctgctggctgcatcttcaccagttccttaagaacagttaggtgatgattgaagtatgtaggagaaaaacattttagaaatactaacaatgatcttctgtagaaagctggtgttgcatatgttcacactgtgtactagctcatcagtgggtagaaggtacttgtctaaccaagaactagtttatgttggagctgttagaattgtacctgagaagtaccgtgttcttccagcaagagaccagagttagacactggcacccagaagttgcactttacatatgctaactaagacagagactcttgaaatggatgtgtctaaactgatgaatatcctgaaaaggtaaaattagacaatgaaggaatagataggcaacttacgtaggatgctgcacgtggctcttgagtggaatcactttcttctcttttcctcccatggttaggacactttccttcctcacgtggagtgcgggacaatcacgctgattggtgcgaccactgagaacccttccttccaagtcaacgccgcccttctgagccgctgtcgggtaattgttcttgagaagcttccagtagaggcaatggtgacgattttaatgagagcaatcaactcactgggaatccatgtcctagactccagccgtcctactgaccctctgagccacagcagcaactgcagctctgagtgagtagattgtgtgcagcccctgggtgcccacacctccctgggaatctcttggcggagggccagagagggctgggccttaggcaggggaagggtgaggccaagtggagccattggtctgcctgtaaggaagctaaaggaggaggagagtgtttgcttctgccttgcaggacctgcctaaggctccctttccttaaggtgcatcttgtgtctactgagaggtgtgtctgcatctctgagcgttagcattgctttgttattattgtggtgaccagggcatttgcttttatgcttcatgctttttcctctctcacttactttaaaggtttagaaagactataggaagccttatttaaaggcttaaagccactcattaaatagaagaaatagatatatactgtagaattaatttacacatgtttgaagatttgtgttagattcagatttctttttgccacacagtgtaattttcaaagtattgaggaaaagctaatgtaattctacccatacaattacttaaaacattttgtatattccaaagctcatttccataaaagtaaagaagtgttactgaaagtgacatggtctgaaagtgacaggctgaagagactgtctcattccttttgttgactaactctgcatcgtgaccacccgtagcctttcttgtggttaatccgtttgatttcatgggtcagaggtttttctttattgttagaaatgttgttcagaagtcatttgttcatgtgctgactgaaataatacagtagaacatcatgtggtctgaggagaaaccattgcccacctccacatgctgtagaccagacagctgcttgtgcttgctccaaggccaagttctggggccacttttcagtgaggattaaagtacaaggcatagttgtaccctcaggttttaggtttcaacagtttctccctgtgtgtctgcattctctcatttgcttctgtcttatatttgggaagaacactaccaccatgcctcattaaaaaaaaaaactttgaagtatttggatctttgggcagaatgaagttgcttcattgtagagtacagttatggaatggccattagaagttggccagaaaaaaagtttgggacctgctgttatctgaccattgttgtcgtatcaggggcccttgtgggctgggtctcaggtcattgtatctactatagtcttttctctgtcttagagggttagttcaaggacccctcacgagtaaatgtgtaggtacttatgtactctctataaaaagatgcagtgcttgcattacatctatacacattctccccgtatacttcaaattctgattagattgttttttagtttttaacttttttttttgctgtcaactcaataccttgttcacgacaaatgttttattactgaactgtgcttccaccctccctaaagtacaatgcctaatatgatacaaatgctatacagataactgttactctctgttgtttagggaataggggcaaggagaaaagatctgcacatgtttagtaaaacacattttaaaaagcttttttttttttttttgtttctgtcaaagactgatagaattttaggctgtagagaatccatgggtcaggtgtagactcatgtcagcatgtggtaaaggcaaattgaaaagagaaaagcaagccaggcagtggtggcgcacgcctttaatcccagcactcgggaggcagaggcaggcggatttctgagttcgaggccagcctggtctacaaagtgagttccaggacagccagggctacacaggtttttggtcttaaaaaaccaaaaaccaataggaaactacttttatcctatatgttagttgtaatgtgtctataagtttatgtcccgcatatttagggtcatttttatttcctgggtctgagttatccatgtgcttccaggcttcttgttcactgctctgtcatgattgaactgaggtcagtagaactgtggggctcatcttcatgcacagggtttccgtgctttaagagatccccagatgatctgcaggcacataaagtctgaggagattcagtagaagaattaagacctcatatagatacagacctgctaaaatggcgttgccgtcagtgcaaacctcccatatccaacatggcttactgttgtcagttgtttagagctgatcctagttatggcttcttttcattcttgcttgcttcttctgtcctcctccttcctgggtatgctaagaaaatgggaagttgtccttgtttatatacccatcacccatcagtcttatcttacctgcttggtgattggttagagcctgaataaatcgtagctttcaatgtgaaaaccatggtttaattcttcaggactatccttcagaggaggtaatcgcccaggtatgagaaccttttttctttggtaaagtatccctttttcacagtaaagtaagtattaaccttagcacaattgatgactgaatggctagcattactgacaagaagttaggagatgttgtagatcacagaaaaacaaacactttctaggtgacttcctgaaagaagtagctgccacctcaattgccaagaataatttttgactttcagtttttgtggataaagtattactttcaagtcactatttactagtgtcaactctatgttcattcttacacacattaatcaggttggttacactgatctaggtagaagaaaagactcagctcccagtcattgactcctctctgggaatactgtgcatccatttgatgtgatatattttgatgctctaggtagaaactagaacatgcacagagaattctagactgttgaaggacgtgtgtgaggtggcaggtgtggcatctaagagtaatccaggtgatgcttacgccactagattgtatttgcaaatccgagttctctctctctctctctctctctctctctctctctcacacacacacacacacacacacacagtgtctccattgcagcagcacagaaatattcagtttcttgcttgttttggtgctggggttcatatccaggtcttttcagttgctcagccactaagctccacctatctccaccccagcctgcgtgcttttaaaaagaaaattccttaggcctttaatctctgcattcctgaggcattaaaagtcctagatgtgctaggtattggctgctgggtattgtgcatgttgaaaagtacatttctgggctggtgagatggctcagtgggttagagcacccgactgctcttccgaaggtccagagttcaaatcccagcaaccacatggtggctcacaaccatccgtaacgagatctgactccctcttctggtgtatctaaagacagctacagtgtacttacatataataaataaataaatctttaaaaaaaaaaaaaaaaaaaaaagagaagatctttgtccaggaaaactacaatggagattttaaaaaaaaaaaaaaaaaaaaaaaaaaaaaaaagaaaagtacatttctgtgcttgtagagaacatgtagtgtgataagagccagacaagcaaagagctcgtagtattccgctctggtcgtctgtacaagagagctccttaaacttggtatactagagagccttttcttcaagaactcgtatgaccccaagtatataagagaggtatagaagtcagactttgatgggtgatgattcataaagtgatgatgatggtgatgcttatgtttgggtttttcaagacaaggtttctctgtgcagctctggctgtcctggaactcactctgtagaccaggctggtcttgaatttcaagatccacctgcccctgcctcccaagtcctgggattnnnnnnnnnnnnnnnnnnnnnnnnnnnnnnnnnnnnnnnnnnnnnnnnnnnnnnnnnnnnnnnnnnnnnnnnnnnnnnnnnnnnnnnnnnnnnnnnnnnnnnnnnnnnnnnnnnnnnnnnnnnnnnnnnnnnnnnnnnnnnnnnnnnnnnnnnnnnnnnnnnnnnnnnnnnnnnnnnnnnnnnnnnnnnnnnnnnnnnnnnnnnnnnnnnnnnnnnnnnnnnnnnnnnnnnnnnnnnnnnnnnnnnnnnnnnnnnnnnnnnnnnnnnnnnnnnnnnnnnnnnnnnnnnnnnnnnnnnnnnnnnnnnnnnnnnnnnnnnnnnnnnnnnnnnnnnnnnnnnnnnnnnnnnnnnnnnnnnnnnnnnnnnnnnnnnnnnnnnnnnnnnnnnnnnnnnnnnnnnnnnnnnnnnnnnactatttactagtgtcaactctatgttcattcttacacacattaatcaggttggttacactgatctaggtagaagaaaagactcagctcccagtcattgactcctctctgggaatactgtgcatccatttgatgtgatatattttgatgctctaggtagaaactagaacatgcacagagaattctagactgttgaaggacgtgtgtgaggtggcaggtgtggcatctaagagtaatccaggtgatgcttacgccactagattgtatttgcaaatccgagttctctctctctctctctctctctctctctctctcacacacacacacacacacacacacacagtgtctccattgcagcagcacagaaatattcagtttcttgcttgttttggtgctggggttcatatccaggtcttttcagttgctcagccactaagctccacctatctccaccccagcctgcgtgcttttaaaaagaaaattccttaggcctttaatctctgcattcctgaggcattaaaagtcctagatgtgctaggtattggctgctgggtattgtgcatgttgaaaagtacatttctgtgcttgtagagaacatgtagtgtgataagagccagacaagcaaagagctcgtagtattccgctctggtcgtctgtacaagagagctccttaaacttggtatactagagagccttttcttcaagaactcgtatgaccccaagtatataagagaggtatagaagtcagactttgatgggtgatgattcataaagtgatgatgatggtgatgcttatgttttggtttttcaagacaaggtttctctgtgcagctctggctgtcctggaactcactctgtagaccaggctggtcttgaatttcaagatccacctgcccctgcctcccaagtcctgggattaaaggtattcactacccctgcctggctaaaattattttaaaatagttatttagtgtacatgtaagttttttcactaaagatgaaacttatttgcttaataatgaggtgaatgtagttgtttgtttaaaacaatacaaaggatacacactgattagaacttatatactgatgaatgacaatagaaaaatattaaaagtctttattgttttgggactggggatgtatctcagttggtagagtgcttttctagcatgcctgaagtcctgggtttgattcccagcactgaaaaaactgggcatggtcatatatgcctatattccagcactcaggagtagaggaaagatgatgtaaagtttaaggtcattctggggtttatagttcaaaccaggtgtcttgagtccaggtagacagcataagtgacatgtgtcacttaagtgcatctttacaaagacttcatctcagctcttgcttctttttattcagtgagccaggctggcttctttggttctcccatgaaattacaaataattttactttccagtatcatgtgctgaataatacccaaaaactaatgtgtgaaagagttcaggcctctagaagagaccatggagtttcctgtgatctgcttaggtcaaagctttttctccagttggagaagctaggtcccaagtcttttacctctgtatcttgttaaccagaaatacattttcacatgcatttgctttggccaatttttccttattacagaagcttttatatctttgttgttgttacttgttgttgctatttttgtttgttttttgtttttttaaagaaagatctcactgtgttaccccgctgtcctggtaacttgctttgtaggccaagctggcctggaactcaggactacttgcctcttcctcctgggtttaaattcatgggctaccacacctggtcatgttacttctttattttgtttttcatttattttgcatgtggattttggtgcatgtatgccatgtaacacatgtggaggtcagagtacagcttacgtattaattggttcactccttttaccacgtgagttctgggaatcgaattcaggcttagcagcaagtgcatttacctactaagtcatcctgccagttcccgtttgtgacctcatcacagtgtagtttgctatttgttattttattgcaggatactatgaaattttggtcagtctagttccaaagtagattttactctcaattaattttctttaacttttgaagtttctttctaaattggagcactcccccctctgtgcatgtgcatatacgtgcatatacgtgcatgtgcatatatgtgcatgtgcatatacgtatgcatgtgggtaggaatgacaggcttctgagagtcagttctctccttctctacgggttctaaggattgaactcagattggtttagcagcaagcacatgtgctcactgagccatctcactggctcctattttatcatagtatgaattatttcctcccctcattcaattataagacattttagttttaaattttagtatttttaaagttttattattattattaataataataataatagtatcagtgtgtcactttgtgtgcttgtgcagtgcgtgggtatgtgagtgctggaagaggtcagttagaaccagttagaactaggagtcaaagatggttgtgagctgcaccacgttggttctaggaactgaacttgggtcttctgcaagagtattacatgctcttactcactgagtcttctttctaaccctaattttttattagtgtgtgtgtgtgtgtgtgtgtgttatgatgtgtgtgaatgagtacatttgtatcatgcagcatatgggaggtcagacaacagttttgtgaagttagttctttctttatgtaggttctcagaattgatatcaggtctccaggcttgcacactgtccacttttacctgctgagctatcttcactgctcccagagtattttaatgcacctcatgtaattactcgtcacagcttttaaaagcaggagttcgggacgtaacagagtggtgggtagaaccttggaaattcctgcctggtgttcttaagtggggattgtcatccatgctttgcttatgcccactgagtgccatcagcacagcccctcttactatttggacagagttgctgacagatttattctgtttttaaaatactctgacaagggtaaagttgcaagtatgaatcatataaaggaaagaaggagtggtggctctgtgactgcaaactgcattagaacctgtaatgacagctagctggattagctctatagccaaactctgggtgcaatatagacagcaattgaggaagatactgggcatcaacctcatacctcctcatgtatcagtgtacacacacacacacacacacacacacacacacacacacacactacacaccgtggtttaatgtttaagggagcagctaattttctcaagaggataaccccatgtctactcttgaggctctagtcacagtgtgctatttataaatctttgaagcacacacttatggaagggacatatactacagtgctaattttaaagaccagcattgtgtgcttctattttttgattttttttttgtaggttcaatataacatgtatttgctttagaaatgaggtctgagcagctatttatttgaagagcataaaactatacagtatgatcccagtagtgttttaaaaattagctacactcttcatggttggttgactcataaaggaaaattaacaaatgacaatgtaggtgttatttctggttgatagaaataggaattttgttttctaatgctttatttttttaagaaaagagtgtctcgccttgagatgataagaaagccaaattagcccactcattatacaaattttgaatgcctgttgtctaccaggcattggaactaccacagaaggatagacctcccacctctgcctttgtgctatctttgtaggataataaaaacaatttcaaaatgacattctcaagtactgcactcagtgcttattggggtctctaagaagagaacagtggttaacagcacacttcatggtttagggctcacactttctgtgttgagaagaggctttcctcagagacaaaagatgtcgttttcattagttccaaggcaaactggaattattcaggcagtttccatcgtcttcctccctggcatgcccttctcgctcaggtgaccctttggttctggtcctttctctgcacattttgttcagtatgtgtcttttgattttcttttaattcatcttcaagaaaatcccatctctagttgataattgtttcctaggctctacagaatgctaatggtgtagtctagatgtgtggtgaatcttctggtgaagtgtctgctggttggagctgccattagaaaggaaaaaggccattcaccagagctgtgaggctcaggtggtcctcaggagtctgtgaagaaagcagtgttagaaagttacatgatgagaactgtagtgtccttgcatttttgtcaacctacacactggagtcatttgggaagagagaacttcataatgcctgcatccacattgcctctaggcaagtctgtattttctcagttattgatagatgtaggagggcccagtccgtgggaggcaatggtacacctgggcagttggtgctcagttgtataagaaagcagactgaggaaaccatggagaacaagccagtaagcagccttcctccatggctgctgtttcagttcctgccttgagttgctgccctgacttcctgcagtgatggactgttacttataactgtaagatgaaataaaccctttcctactgcttttggtcatagtgtttaatcaaagcaataagaaccctaagacacagaatgaatgactagaaatctaggacaacttaagtaaagaaaaaatgtcatgtttaagaattattaccatacaaagtattaaatttcatcatggctttttttttttcaaataaattttggtgtgttattgttgtttctagttctcccatctccctcctccgaggctgcttttgaaacattagccattacttttgtgggtgggtaggtagtaacaaacactatgccaactccagcagacagctggatcctctccccttcaagatgctttctagcccagcctagttcactgtttcccaggtagctggtttggacatctgtgaccaggactcattgttaccataaatagttttaactgaagactggaaatgacgtgaatgagctatgaatttaaaaaaatatatttttcctacaaaaaaatacaactagtcactcaatcaaaaatatcccaaataacatgtgttagctggttgacgaggttggggagaaaaattttatcaaatcaggctttaaagatagttatagtttgaccttctttataaaggtctaaacttagaagtgattgtgtctagatagtataacagaaatccctaagtccactgctgggaatcaggtaggaagattgctaagttaagggtgcattcattggtcttctaagagagactatgcctcaaaaccaaccaaccaaccaaacaaacaaaccaaaaaccagaaaaatatgtaaatgaatagatgttattgtgaaaatcagtcctaaaacgttaggtgacttactcaagttctgagagagccctctaatcagtttctaggatagtgtgaagtaccacatgctctttattacactgggaagattttatatgattaatacccacagaaagtggcatgctgccacccaagaatgccatggcccaaattccaaagacctgttgttccttggtctgctgtgccagagtaattgagatccttgtttgtttgcaagatgagggatttgggctttctgattaaagacatgtgatgctgtctttaccccatgtggaaggtgatccgaatattcctgtgtcatcagatgtggattacccttgacatacataggctttctatacactatgctgacatgctagcatgtctagtagttttcatgatttataggctagaagcagacagcccacttatcaacagtgacttttcataacatttgctgtcttgctttgtacaagtctgtatagattaacttgtacagtgaggttctctgtggttcatagatagactgtgacagcctcagcttgtgagatagagtgagataccctatagatcatgtctggtaaagtgtagtgacatacccttaggacttaggaaacttggtcagttcttagtctaaataatgcttaattatctatgttaacaatatgaattcagaataaatattagaacctttgaaccagaatgttttactgaagttaaattacgatgtgctgcaaatgagaagttgagccttgagtgtgttggtaatgaacactggtttctattgcaggccctctgtcttcatagaagataaagcagtggacactctggcttacctcagtgatggtgatgcccggacgggcttgaatggactgcaactggcagtgctggccaggttaagctctaggaaggtgttctgtaagaagagcggtcaaacctattctcctagtcgagttctgatcactgagaatgatgtgaaagaaggcctacagcggtcccacattttatatgaccgtgcaggtgaggagttgaacgatgggaaaagtagaggtgcagggacaaatgtgcccacagctctttccaccctctgaccttcagccaggtccaaagcgtgctccagatgctcaatttgatctgcatattataatggaagtaagcctcctacacaggactgaagacaggcataaaacaagctgtcttgataagaatcaagacgagcttgggagtttgaaataggacgcttccccttcatcttgtacggtggttagatgtagatttccccttgttgtctgatagcacctaggagaacacggcagtttgaaaggccatgaattcagttgacagtgattcttgtgatcacttacaaagtcagtgaggcagaaaagattggtttatttgagagttgaaaaatcctccatttttaatattaaagatgagtttacaaggattttgatagtttggttttatagtagctttgaaattttgaattttgcagtatgtgctaggtgtttgcacagaaacatgtttatagatggcagatatcccagctcttattaaatctgtgatctggtaatattaaatatcataagcacagcatatttgtaacttctcattaaaggtagagatgaagatggcttattgaagattaagctgaactctattctagaacatttgtgtgactctgaatagtatcacattgcgaaactatggagtggaatctccatgcctttaaaagtcctgccaggagaagaagctgataattgaatcttcccggtctcacagtgactgtgcctccattctggtatttcttaatgatgagagttctccttacaggagagaattggagggtggggctgtagaatggccctggtcctagtcactgcttttcatgagtgaactggctggccatacatcctgagtgactgaagcatccctagctgataatactgtgtggtgtaactagtgctgacacattggtcacccctgtcccatctatgttgtgctgagcgtgggctccagccagcggcctttttgcatgctctctcttgaatatcttgtccttgaaaagcctgggaagtaaaatatctaggcatagtaccctactttgctttaagccaaatactaacacgcgataaaagcaaactgcacatttttcagcagtgagcaacttctcacccacctgtttctttttccggaggcccagtagcagtggtctttacctccccggtgagcagcccagaagaccctttcctttgactgtttcatatttatcaggtcactagtcacaatccataggacatttatgagtgatcttttgagttttttttctttagatttcccaaacaaccatataaggtagcttattaatattatccctactttatataaaactcatctcagttcacaaagcatgtgctaaaactgattctaaaattcacctttatcggggtctgttaagatggctcagcggttaagagcactgactgctcttctggaagtcatgagttcaaatcccagtgaccacatggtggctcacaaccatccgtaatgagaaacaaataaaaaaccttgggcgggattgagcagggcccggagcaagagggagaagggaagggggaaaaagttcacctttgtctacttcctgagaagatgtgctgtctcactgcctgcatataccccatgcctacctcctagagtcactaagtcactctacctagaccatgttactgagaagagacacttggagatgttcagccctagggagctatatgaggggcaccttcttactagccctttgctattccaggaggagctgaaggcagtggaagttccttggcttggtagcacagccgggaggacccatatgtcatacccctatgttaatgtgcttgcactgcccatccataccagcatgtctgtgccacaggggatcatcagacacacataaatataactcacattctcaagaaatatacttttacagactgctccagaaacaagaattgtagaactgttgccctataaatgtgttagcttagactcttggagtttttttataaccctgatttgacaaaaacaaacaaaaaactaccattagaggctttgttattattaatctcgtttaatttcacaaactacacagttgccccctagtaggatccagtaaggtggttcagatgtttatacactagagtgaagatatttctgaatgagaacaaatggtctgccctgcattgatctcatgcttttaggttaataatatgaactctccaattctcaagctgcatgtaataaaagcaaaagtaaatgcattgtttctgtgggctagtaattaacattaaaggtttagttgttctgtactgttctctctgtacaaggcccgtgtgtttaaaacaacattttacctagtgggaatctcaaggcatggagaacttgctaaagtctgcattgctagtgagtttgaggttcaggtccaaactgcctcaggctagagcctatggtacagttcactgtaagtcagtaaagatgagtgacctgtgttagagagtatagggttaacaggcatgaaggactagaggtggctgcctatcccttcccaaccgtatgctctgctctgttgagagatcagggttcagagtgcccaaaccaaagaggccaaacaggggctaacgccatgtagaaaactcaggacacttcagccagggaccatggctcactttactagagaagccccagtcagaggacactgcttattcataaaatttagtaattagattcatgcctttgacctggcctgaaattccttaggaattgaagtttaaagggcctgcaaacttagatacttaccctttggtagaccagattcttgtcactctatttgaagagcaaatgtcatcttagcagctgctaggatttgttcctggagccagagtgccctgcccaccagaacactgtcacattgttgatgtagctcatgatgtctacagagcaggtgcttctctggaaggacttaggaccagaggactttgcctctcagctgtcatgttcttaaacttccacgagagaatggtcaaaagacatggacatgtgtaaagagcgctgcttatttttgataactgttcatctattattccgttcttaagtgtcttttctaaagtacattttgctaacctgtttgcttgtgaatctaggattaaagatgaactaaggccaaatggtgaggatggggccacagtgctttgaggctaagagccattatttcatttatcaataccctaagatcctgcttcacaaatgtccccacagtctatggtgtaatgaccatgggcttcagataccaagatgtcaactggcaatgccactgaggaacaaatgagctctatcagctgtccttcccactttctctcaaccctgatgaccatgaccaggccagtcagtttcactcagatagattctatgtgggcagaagatggaaccaggacatggtcctctccatttcctttgccagcctctaagtctaagtgtcctcagtgtgtataaccgtcaggagtttctcctctgaataggcctgctgtgaaacaggcctggagccctgagtgagctctgtggcttatccaggttttaccccactgagtgtggctggagggcagctgtcatgcctgccttccccagcacaactggggcctgttttagtatgctgctttgtatgtcgtgtaggcatacaaggcagacacgtgactgttgttctggtgtataggagaagagcactacaactgcatctctgccctacacaaggctatgcgtggctctgaccagaatgcttccctgtattggctggcccggatgcttgagggaggagaggacccactctatgtggccaggaggctggtaaggtttgccagcgaggacatcggtgagtggaggagagtttgtgtgggggtgggggttctgagagggggtgtgcttactctagtgtggagtcatgcagagtaggtaggaaaagaaagacttgttctgagctcagtggtcggttgctccatgtgcatgtgtctgactatttacagagtcactgtttctgcttctttggagatgatctcaaggtcattcaaaatgccgatgtgtaggagagagtttaggtttgctttgtagccaatgttaaggtttttattcgttagttctcaggtagaaatgggaggttctggacaccattcaagacaaagaatagaaaagttttccttttcttactatagatactgtgctttcatccatccattcttatgaatgccttcatggctttgaactttgtgtctgtcatgtttatcagtctcttgtttttcctactggaatatatttttccacaagaggccattttgacaccaacagtaactcaataaacagtaacaactactataaatgtaatgtgattggagctcagagataaattgatatagttgtgctgggtattttatccctaagtctgcatgcagtagtggttgctgtttacaacagcacactgacaggttggaacaagagtatcctgtgacttaaacttcgatttgtctcttgttgtatgataggcctggcagatccatcagcattagcacaagcagttgctgcctaccaaggctgtcactttataggcatgcccgagtgtgaggtaagataccagctcagttctttgcaaatcttctttattctgtgccctgtcttttgtgggtttgaatataagtcttgccttcatcacaggtgtgttaggtccactgaacaagctgctcagctttgaactttgttatgtagaatcttagcctcctaagagatgagagcttccctgtctcatctggttgtggtttggttttggttttataatattggggcttgagcccagagctcatatgtgctagttaagtcctcctccacagtactatccacagccctgttttaactttttaaacagtcttatgggttgttcaaaatagtccttaacccattctttagcccccaggcaggccttgaagttagaacttcctgcctcagcctcctgagttactgaagttataggattgtcagatcaagcatgctttcacaccatccttaactttctgggaacaggaagcagtgggttcacctccatgccggacagtcatggcatctgctttatgaaccagggctcaagaaatatttgacttagtgagaagttcataccttaaatgagaactactgatttagttccgctctcaccatgtaacactttctccattgttactaattgtccagactaagtgaaaagtgggctataaaaattaacttaaaaaacaagcaagcatgggaatcatgtaagagttaactaggaggaatcataaagtgctctgccaaacagaaactgtgccatcttcctggtgacatgtgcccttctgtgtcctaggtgcttctggcccagtgtgtggtctattttgccagagccccaaagtccattgaggtgtacagtgcctataacaatgtaaaagcctgtctgcggagtcaccaggggcccctgcctcctgtacccctgcacctgaggaacgcgcccaccaggctgatgaaggatttgggctatggcaaagggtacaagtacaaccccatgtacagtgagcctgtggaccaggactacctgcctgaggagctgagaggagttgacttcttcaagcagaggcggtgttgactctcgggccatgagtaggatgcttgtatcttgaggaaggccaaaagtcactggatcttggagttggttgcctggggaacattaaaaatagaccaacattttgtgccagaaattaagggttccatagatggaggtggttacttcagctaaatgtgtaccattgaaattgtgttcatttgcaccctgtgcaatgattatgcttatgaaaatacctggcagctttgtgcaattaagtaatgttataaggaattatctattttgtcatagtatttaagtcataatgtcatttcaaaattctgttctgtaggctttttttcttttaaaaaatgtatattctgggtagttacaattggtacaagaaaatgtaattgtgatttaatactgcatagtgatttgggtattttttttatatgcaaaggtcttatgagccaataaaactatttcaaagtactcttcagttcttcagtgttcctcctttttgggatggtggcaccagtgtctgccaccattacttcacaggaatgagatacaaagaatgagcaaacaccataggtgagaagattggaaaggtaggggctttttctgaaaatgagtgacccccccccccccccccgccaccattggaggatctcactttgtagcccagactgcacttgaacttgtggccctttctattcacctctttggtgttgggatcatacaggagtatgccactactttcagctcattttattttttaaaggactacacctgtacagtttatgtggcctgtgagagactctaatattcctagcacattctaccccaagcccagtaggccttacttacctgtagccctgtttttttttgggggggggggaggttggttttttgagacagggtttctctgtgtagccctggctgtcctggaactcactctgtagaccaggctggtcttgaactcagaaatacacctgcctctgcctcccaagtgctgggattaaaggcctgcaccaccacgcccgactgtagccctgtttctaagtccagtttcttgctttactttttttgtttctggaagttccgccgctatctcttggtttgctgcctttggactggatgctaattcttctcaaatgcatttcaatggccaggctgtacacatttccacagaagttaatgggtcacttcttactcctttaatgttatctctcttagcggttccttaggcagcccagagttgatgtcagcagttttcctgggaaacggcctctgccttcctgatgctaatacttgttctgctgctgggatatctagtttcaacagcccagaaaggcagcatactatagaggcttttcatccttgctcaggcagcatgcttccttcagtagtgttgtcacagaaggatgctgagaagagccaccgtggacccttaaggactgaacctgatgcttgtgggctacctttaggcttgtctgatagtttggctgggaatccattgtaggtaaggaattatttgttcattgtcttctactttcccagcttgctatttagaagtctgaggacattctgatcaggtgtctgctttgtaaatactacaagctttagagccttctgtttctggtatacaggaagtcttcaatcgtttttatgtgcatttggtagggccttcctagatggagctccctgacttgcaattctagaacatctctctcttctttttttaacccattaaatattgcctgtttcacactaagcaatcttgttgatattggaaacaccagtgaacaaaagagacagttttgcatttactgagtgaaattactgttgtgccctgtagaaaactgaatcagaaatgagatggggaagatggagaggcgtgattagatttagctggaggaccagtggggtcttcaaagaagggatggactaccaccatcccctctgctccacacccagccctgtttatttttccttcttagtgtagtttctgggaaatttctttacctttagtttttgttccttcattactgccatcctgtcttaaatttcccagagcctgcttttcttccctgtctggtccttctcccttcctcccccattctttccttctgttctctagtcctctttcagaagcctgtatttattgtgctgtttgatgactgcttcctaaggatattaatttttaaatcttttctatttttttcctttttgtttggtctcttgtattgctcaccctcccaccccccacctaccccacacacgtcaggcatggaattggaaactgaacacgggataaagggcagtgtgctgtattggctttgttcctgttcagggtatttgttgaaaaccctgaaagtccagtccttagggctttccatttggaatagtgggagctccctctgttatctgcctgtgggtgaaggttcagtgccttgagtgctcagtgtcaagcaggaaaacaggtgtgacctctgatctggtgaccaagtgggacccaagctgttggctctatttggagctttacagttgagatgttctgctgtggcctggagtaagatgagattgtccctggccttgtgaatgaccccaagactttgagacagtttcttcagagaagaagtgggtgcttggctttcctcattggactttgtcatctccgaccctcagcatcatctgccactaacttcctcgtttacccattttccctccctccctccctccctccctccctcctgcctccctccctttttttattattgttgttgctgtttgtatttcaaggcatgggacttactctgtagaacagagtcaccttgaactcagacacactcccccaagtgctggaattaaaagctatgccacaatgccaggcatttacccatttttctagggatagatgcaagattttaaaaattgcttcaccattgttttgatgaaacataggaacttatgaaattcatgtaggactaactggatttactgatttttttttttttttggctaggattcactactcaatatttgatcgatttgtactgtctaaatatggagattaggtaacttggagctaagaaatgtgtttttttcatggctccatttgaaatgagacgtccactccctctgacctgtttccttggggtctgagtgaggagataccactgaaatccataaatattttctgtcaagctaacaggctatagaaccaactaagatcactttactgggcatttagctgaggacatcatggtatgtgaaacaggcatggtgcctgtcctcatttatgaagtcctatggaagtgctttttgggtgattccacaaatcttaaaatagaaaagaaaatagaaaagcaagttttttgtttgtttgtttgcttgcttttgtttttgtttttttgttatggtatatcttctctgcccaaaacaatatataccacagcacatatgaatgggagagtacagcccacacctagtaaaaaacagtactacgactcagtgtaccagcgagtcaaggcatttgccaactggaggcagctagtctgtgttgccatgcgttagggtcatgttataattctgaaaagcattggggaaaaccaccagttcccttgttctgcaccagggctgttaggttttgtttcccctggtacagcacggtgaaattcagcgatgttatgcaaataacttgcagagaatctccagttgctgtaaggaaaatgatcattcatcttttcgagatacacgtcttcaaacgaagacatcttgtggcttttaaatgagaacccagcttttattagtactgtgttagaaagtatagtgttctaggtaggactaaggagaaggctcagtggatagaggcttcatataagcctggaaacctgagtttagtcttggaacccacatgtattttcagtgttaacttttctgttgtgatgacactatagccaaggcaacttaagaacaaaaagaaaaagagttgaaatagtttcagagggatgatagtccatgatagcagagtctcggggcatgggttctggagcaagaagctaaaaactcatgtcttcagaccacaagcagaaatagagaaagcaacgggaaatggcgtgactccagcagttaaaagtactggccccagatgtttcactactgactgtaactcgagtcccagggagctctgaaacctggcacaatgcacggatactcatgtgtgcaaaatgatcatacacataattttgtctaaaaaaattcaaactctcaaagcccacctgcaattacatacttcctataacgaggccatacctcctaagtctatcctaaacaattccaccaatgggggaccaaatgtacaaatccattctcactcaaacccccatgctatgtaaaggtggagggagagaaacaactccacaaagttctctgacatacatggctgcatttcagacctctagaagccatgcaggagctatacagggtaggtttaatgaccacctataacccaagcacataggaatcagagatgggattccaggggcaagctggctagcttgactagaattgccaagttaggtttagctgagaagccctgcctcatgaaatagtaaccaaagaatataacgtctgtcaactttgtgtctctctgtgcaatcgcatgcatatgtgtgtgcaccccaccacatgcacccaaccatacacagacacgcacatgggctgggggaggtaaagggaaatgtggagaatgcagctactctcaagaggaggctattcctgcatacctcaggcactagagaaaatatctgaacagtaaaatgaccagatgtaagcaacacactcaagttggtagcttcttggccactaattacaagcagcacacacatacccagagagacaccccccaatggcagccaaatctgaacttgtcagtaaggaagataggataaaaagcatgtagaaacagaaaacttgtatagttcttaaatgagccttgcctttgatttgtttttgtgtatctctcatgcttagcatgtagaatgtgaaagtacatatttgctaaataataaaacgaatggataacgtttccctggggtctatgtaatgtctggaaatcaggctagtcctcaaagcttctctccagcaggggtcaggctgaggctggagcaaagttcctagtgaccattgcaggccaaggttgtcttactgtttgtgatcaacaggacagataaagtgacctttcaagagttgatttgtctggttgcaaaagcagtgtttgaacactacaaaaattatgcaaaaagtagtggaaataaaccatttttcctcagtggtaactactgtgaatggttcaatatatgtcctcttggttacaatacggtaaatagagtttaatatactctgttagttattgatacaacctggacagccccctagtaacccaggcagagttgtatggatttacttaatcagctcttgcacaattgctaatatatttttctaaagccaaactggctacttcctagctgctcttgccagtggtgcttgctgtttgagtcttacccaagttacttctccagcagtctattttgggggtgggatgggcatgttctcctggcccatcacatctcctgctctctccatctccctccttgactctacttttctctgtcccttgtggtccctatttgcaatcccccagcccagtaactgaaactccacctacctctgttctccccagtgattggctgtagccacttttatttagccaatagctttaaattggggagccaagtttacatagactcacttggtgtacatgaggatatgtttgtcaagagcagccaggtcttgggggccagtatttagcatttgaatacatagcagcaccagaccagcccccaacactggacatttttttaaacgtatgtgtgcatatgaaaattggaaacttatgccacctgtttagcagctacaatctgaaccaccagggggcgcacagttcatgtcctgcacctctccatctgtgccatccacacaggcagtgaaagaatggacagcctaggaactgtactttatgagagaaatgaatccctttgcacactccgcctgccaacctttgccctctgcccccatcgccagggttctatcaatagcccagccatccatgcacactgaggaacatggacccagagtgagtctgctggaattcaaaccctggctgggctgattcgtggtcaaggttgtcatctttgcttttccccttcctcatctgtaggaacttaattgcaatggaacctcatcactgagaactgagatgtacagggtctcatcttgcagcgctgagcgcctcatctcagccttttgagtgctgggattaaccagtgtgtgccattgtctctgtctatttccgataatgactttaaaaacctaccacaatgccggtatcatactatactctatgctgttacttggggacagactttttcaatttgtaagatcctgcctcaaaacaaacatgtccaatcactaagcaagtagtgtattttgcaccccaggcagtgcaacatgtttcttggctgtagctgtaccacaaacacaagtgaggcacggtgcataatggagctaggccataggaacgtgggctctccattacaatctatggcagcaccaacatatgtgacaggtaccaactggcagtggcaaaataccaggatacagggaaagtgtttttcacagaactcaaaatcccctgtgcactctccttcctggttatagtaaaagtgtttttttctggtcctgagaattatagaaatggctggcattgctttgctgtgctaggacctgctctgacagctgttctgacacctgcaaagccacatgtgttaaacattgattctgtgatttccttctggggactgttttccttgtgttttaaaacatgaatacgtggagctgggtgataatctctgattcagccataggacatatcatcgtaggacaggaaaggaacatctgagtcacttaatctaattcctgcagtgtgacagcaacttgaccatggtggtgataaaaagaccggaattacagtttatcagatgatgcattcgatcatgactttttccattaaagcaggcaggcttaagaacacccaggcttcactgaattaagtgctttatactgtgtctacaagcacagaaatagcacagttttaaaaagtgaattgtagatacagacactgtaacaagacaggacacttttcataacatgtgagtaacaaagttgactcgtctgcactatgtacttaatcaaacttccatgacattcagtcagttgtcttaacatctttgctggaaacaggtctaaaaaggttttgtagagccatcttactgtgcactgatatcgacttacctgcatctggtaaaatacaacatattcacaggcagtgagtttcaggcaggcagcaagagattggaagtgcagggtgccctgggaactgagccttcaggctcaggaatgcttaacagagtagatggatttcctaccatgcaccaccactgatgtagcccagaaagcatgctatcctggactttattttcccagggataattgacaagctgcactaagagcacagagagccatctggtttctagaagagggtcctcttctcaagctgttgtattcctaactttgagaatttttgtttttgagaagtagctaagggactagattggtccaaggtcccctgaagaactgtcctgcagttaaccacccaaatcaggcatccttacaacgctagtttgtttcaagagtcctgtctccccagacacttgtgctgtggtctcttactatactggtagatttgacgccttctttcatttttatcagttttgtctcagtgtattttgaatcttcccccttggacgatgaaagtagcatgctgatgaggaagaaggggaaaccaaaataagtctgtaattgttcaggatctgtggactcggggttagtaaagtcacagtacaacaaggctgtcccagtcagcatcacccagtcattttctcctgagcccagagccctcaaaatcctcttctgtcagatattgggcgcatattcttcatccccaccaaaataaaagtgacatatcatcactacaaagtaaatggcaactaaagattattattttcatgacaagtattatcatcttaaagaggcttgcattggttacttttatgtggctatgactaaataactgtaagggagtaaaattttgggagaaccatcatggcagggaagttgtgtcgggtcagcttactgcttaggaagtaaatgtagtggcgactgttcatgtcccagaagaacactaaacagagctccacaggaactgggggctaggcattacttcgcccaccatgacttctgccacttgggtctactctgtaaagggtccacagtctgtaattggactgtataatatgtatgtatatgcatatgtaataatggcaccattagctggggacaagtggtctaaacatttcctcttccaacacaagtatgtcaaatatgaaggcaactgatgcagcttgcctgcagagttccagacattatcagacctctgagcattgaagctctgagatccaccaggaatgacttatctaactttctttccgggggcctgacgaaatagctcagagggtaaagttctttaccaggcaactgtgaagacagatattcagagcccaagaacccatgtaaaagctgggtaggcatagcagccgctggtaatccttgcagatgatccctgaaggaaactgactagtgagaccagctgaaatggcatgctgcttgtttagggagaagagtctgctttgatatataaggtatagtaattaagaacactttggaccaccacacacatgtacctgcacacataccacacacacacacacacacacacacacacacacacacagaggaaaacgaaattcctcatggcttaaatgaacctaacttctgtcacaatacatccctcaaatttcaactgttctacctaagactctttcagcatgttgaccactagaaaaaggaaccacgtaccctcctgctttatattgttcaaaggttggactccttaccccaccccacccctgccctgtaggcagtctagttctgatcagatcctcccaacacgagaagctaaaccgtgaaatttcacatcccagtttcttccatcctgactgcgatagctgtcacaagattttgcgagtgttgctttaatagtcgataggaatttcaagtaatgccttaaagtcaaactgaagttggggctgaaataatagcgaagcatccagctttttatgtcacaattaagtctgatgaagccatcattttctcctgctgcctggcaagcccagaatataaaggaactttatttcatgtgggagggaacagaatagggatagatttgcggaagttacagaaacaatgataagaagagataataaatcaacaaggaaattgttgccaggcaacatggttggttgtcaaagagatagccttcagtaataacccttggcaatcttcaatattaggctgtaaatctctgaataagaatgactgagctatgagtggatcagggtggacactcttccaaagaaccagtgcacccagctcacccattctgtctgtaaacataacttctgcctctctgagaactgtgcatctgtttcactgactggaacactttgtctcttgtgtatttaaaattatactgtgattgtagtttttttttttttttctcagtacaatgaacccaggttgccatctccctacttacttgggtcccagaactctggccagaggtagcaagggcatgtgactcacagacagtgaaactggggtcctgtgggagttctccacaacctgaaaccaaattaggtaggtacagaaggcggggctagttggctctggggtaggagatctgcatgagcagtgtcagtctgtaaacactgcggaggaggaagatacagttgctagcctttgtacacactgggagaaggaaatacagttactagactttgtagacacttatcagtcttcctaaacagtacaccagaactcccaagaaaagccttgcaatttctcttgagcctggctcatatgcgaaacagctttgcctatttcccatgtgaggccttgggcatccttgacacagctgcgcccagcctggcccatatggataatagctttgtcaattggccatgtgtctggcaggcctttgctgtcctccacaaagccttggccatgataaaaatccatatctcctcaggatttcactcacgcaagccttcctttgctccctataccagttgatgccaaattcccttatattattcttgttagatcaccaacatttgaccagtgagtcccgtacattcccaggtccatgaagtctgtagaatgttggatttgaaggaacattacagaatactgggccacggtcttcatttccatggctgtgggatctgctctatgactgacaatctcctttcttcttgaatctgtgttccacagagcctgccttttatgcttggagccctcatcctgtcttttccttgttaaaatagtctatggcaggaaagtctgctctgctcacccttgtctccagctgctaggcatttccaggattcagaaacactgacaaatggatgtgagcaatgacttccaagatctacagcaaagcttagtcacctagaggctgtcctgacatgtttggaagagtccctccatccttccctcccttccccgtgtgaggctttgtgcaagacagtgtcagtgcatagatgaatgggcgggctctctgggctgaaagctggctcttgagactgtggacagcttgtgtaacatctctttattggtttcatcatccatacaatgagaacatgttacatctaactcattagccggatgagaggattaaagaagcttaaaaatattctagtatgtagataagtatgagatatatctcccttttttgaatctttgccattatttttaatcaagatgaagcaaaatctgccccccagaagactaggacagtctgttctcataagtgaaggttaaaatcaagggcaggagaggtcgaggtggagaggagccgggatctttcctatagaggggtaacttttcttactgggctggtgggaattttagcagtattagctaaacaatcattttgctgtctttcattgggacttgtcacatgatggtgagttcactttactgttttcagaaagtgagccgacaaagagggcttctgaagggtttcattgccatcacaaccgagctgtggttgaacagctcaggaagacaatggtttcctgtgtaactggaaacaaaattgcttgtatctaggacaagcgtttcttaatagccaagagaaaagggaaggcaaggggcagaaaagcaaaataagatcgaagttctttttaaaatcagtttatattgattgcacaaaatagtaggtcccattatgacagatgtaagtaaggggtttaaccatgtctatctctgaacacacacacacacacacacacacacacactattcccacccacctctcctcgtcttgtaccttaatattatgagccccttgaatttcaggtcttttttttttttcaaggtgggaattctttgcgaatgttggcacacaatattgaagatttaacagtaccagccctcacattggaattgctgtgagccaaagggatcggtaaactaaattaagtttctagagatctcttttattaactaaccacaaaagaaattggtggagcctgggaacacagctcagttggtaaagtatttttcttgtcccacaaggacttgagtttgatgtacagaacctatataaaaaaattccatgcatgatggtttccacttataatcccatctgtgggacttgctggtttagttagcttcactcacttggccagttccgggctggtgagagatgctatcttttaaaaacgttgctggttcctggagaaagatacctaagtcctctggcatccacccatacatgtattatgtatgtatatacatatatgagggagagagaggcagttaaagaattagaaaaatgcagaaaaatgtgtgaaatcatgcaactcttactaatatttactgcagttgtcttaatagaaaacatacaggtgactgagcccagtggagtatgtatgaaatatgagcacatggaaggttgagaattataaatttgagaattataaatttgaggttagtctgagatatataacaagattgtctcaaaacgccaagagaagaaaaaaagaagcagcagaggcttattaaacatgaggggaagagacttcctagtgtcttaagtattttaaggaacatgatactttactcagaaaactgaaatctgtggtgcatctacattcatttaaagctatctgtaaaaatattatgcaatgttgtttacatttttaaaatacagggaaaccattttctctgtggaattgaagtcccagtaggagctggcgcaacagtccaccatgaaggaagggctggcgcaagcgcactttgaaaaccacattcagtaacatccgcttgctcttgcaatgcatggcaatcctgaaccctgaaaatcactcaatttaatgaagtatgtaaaactgtacaccgtaggacccccttagggccattccctgcactatattccccctctccatgcacctctgtgtttatttctcccatgttgaagtagggctgccacctccaacacaacgtgttagggccagacagttcaggtgtagaaattcttcacatgttataatctccatatgactctgagccatcagcttctctgagggagaaataaaaccactccttcctgagtcctgtgttgtctttatgtcatgtattcactcacactcaggctcactcacactcactcactctcacactcacattcactctcactcatcactcacacactcattcataccctcactgactttcacactcactctcactcactctcacactcatgctcactctcattctcactcacactcacacttttactcatctcactcactcttacactcacactcactctcccattcattcattcacacactcaccctcactcaactctcactcattctcacacactcatactctcactcactttcacactcactctcattcatactcacactctcacacatgctcattttcactcacactcacactcacactcattcactaccgttcactgttactaactctcactcatactcactttcactcacttttggtcactctcacactcattctcactcacactcactctgactcattctcacgcacactcactcactaactcacactctcactcattttcacttgctaattcatttaatgtgttgatttcagtgcacggtctgtgcattcgaagctcaggctcagcctctgagctagatactcagtcccaggtgagcgggatttggtgctgatgttgactgtttatagagattttggatttcctaggagccactggaaaaaagtaggactactgaaggtgtcagggaaaggttacactcaacaggtgctactgaaatgctgtttatccacggtcttctatcagtatcagctaccttgttgaatgtatatttattggaaattgtaaaatcattagtgttccttttaattggcagcaagtgaaagggcactgatgttgaagtataaggacctcctagggtaatgaagaactctttgtgggcttaactatttgtggaagtttagggatactagccatgataggtggtcacactggtttctgcacctcagagcttggagacgcatgctctcattctcctctgagctcctccatggcatgaggaccatagcatccaaggcatgatgtcagggttgataatcagtagacatacaaatgtcagcccaagggcccaggcttactcgacgttcctgttattttgcattctgtgttagtgatttctcccaccataacaggaggtgaagctctctttcagtgagactcccaggttacattgtcatgattttcttttaagtagaaaattggtagtgattagaacaattattttaaagaaacagagcagggcaaaatgtgtcaggcgtctgctgtaattttaatgatttgtaaagcacccttaaaaggtaaataaacaaaggcaactcagttttctactactcagctagatttctctcctgccccctcttagaatcagctatccctttccttgtgtcattaaagacagtgtttccagctcagaagccactagaaagccagttttctgccactgcgaattcacaaagctctccctgccaccagctgtggtttctctttatttcatttgagatccaatgagaaaagttctggaactgggctgttcatacaggtcattctctaggacctctcatggggctgtagcccatgcaaatgatcaggaaacctgcgatttaactcagagtgtgcattttgcaaaagtgaagatttactgttaagttgactaaatctaaatttaactaataaaaaatattaacatgtccaattcaagctgaatgtggctgtgtacgcctataaacggagctgcttgggaggtttgagagggaggatggcttgaatctgaaagtttagagaaaaagaaagcaaacaaggaaagaagaagaaatggaagagaggaggaacatatggggagtccaaatgcttaggattggagagatgacttagcaattaagagcacttgcactctctctgtctgtttttttttttttgtctctgtctctgtctctgtctttctctccctctctctctgcctctcgtgtgtacactacatgcatgtatgatgctttcagaaactggaagagaggaccagagttgtagatggttgtgagccaccacatggatgtcggacatcaaacacacagattttgtaaaagggcaacaattgctctaaactgctaaataatctctccagcagccatacttgctgttcttgcagaggacctggattcagtatgcatgtagcagcttaccacaacccttaactccagtttcccaactgataccttcttcccaccctccatggccaataggcatgccatgcctgcaagagaaacattcatacacataaatttaaaaacaagcatataaatacctttcaaaattcccaagtcaaataaaacacttacttgtgtatatgtcctgcttagaaatcacttttttcaagaattgattaaaacaaacaaacaaacaaacaaacaccccatcaactcgtatttggtcttctctcatcttctgaacactttgttttgttttcacagtgaagtctacagttgtgctgttgtcaatttatgtacagggtgtaaggagaaattaaatttcatctcttctcacatagttccctacatgtttgaaacaatacatgggaaattttctcctttcaccttctgccctggagagcttccatgtattgtcaatatatgatctgggatttctaatacaaatcaattgaatgtggagtgtaaagggtgggcttgggaatagttgtccccaggtatttttaggcctatggtcttaagaccacaccctgtggccatcctcctgtcccccatgggtataaagcagaggaccaaaagtaccttagatcacaacatttgtataattaattatacctatcctcccttttaagaagttgagttattgttaaatgacttgtaatgtttggtacagtgtacaaataacatgaatcattatgctttactgattggggaattataacaagaactaaatatctgtatgcattcaatacagacacaaatttaaaaatactttttatttccagttgattgactctgttatgtggaatgaagtgtctggggcacctggattacactgggatcaaaggcatagagaggtttctctggaaaatggaatgatggtcttcctcaccagaaagcagggctcacaaagtgcagggtgacttctaggctctctattctatccacttctaacacccctacatgtaaactgtcctgactcatttctgcagcattagcctagaaggttttgcctcagtgtgtcctcttacctaagttgtcttcttgttagacttggaaattcttaacctttttaaagttacacaactattagtagcacttgccctctttcacaagaaaggtgtcttagttactcttctgtagctgagaagagacatcaggacaaaggcaattcataaaaggaagcatttaattggaggcttacttacagtttcagaaagtgacccatgaccattgtggaggggagcatgacaggaggcaggagcagttgcagagcttacatgtcgaaacaacaatcatatgggaagatagagacagagacagagaaataaaacatgtacaaactgtagtggctcagacttttgaaaccccaacatccccctattgacacacgtcctccaacaagaccatacttaatccttcccagttccaccaactgtggactaaacattcaattatatgagccttaggggctatcctcatacaaaccaccacatagagtacagcaaaagggagcagatatggatatatctgaggtcgtatagttccagatatcaaatagtgtttttgaaatactggatcacaggcttgggagatggcttagtgagtaaggtgcttacatcacacacatgaggatcttagttctgatccacagcatacaggtggacatctataaacctaacactagggaatgaggacaaatggatccagggtgatctctggacagcaaaactaatcaaacagcaagctccagatgctgtgagacactcttttattggacttattcttggacaccagagagttttctgatttattcttaattttaaaactgcaagtatgatgattacatggacataacaattggttttgtaaactgaactagctattttacttaactcccctcgataatagtaagatacagtttctaacaaaataatcgaaaacattatgaagttaattttcctttgcaaaatagttcaatatttttcagctatagctagactctttattaagatactagattattatttatcaattattaattatacttattaattatggagagcatgcatttttttctctaatttctttctatttttgttctttcactttgagggaatgctactgagtgcatgcaaatctaaaatttttatattttctagtgcactgaatctttttctcataaagtgttcatttctaggataggaaaagttatttttgcctaggattaatatagctacatctatctctgtggttagtgtttgcataagttagccagtgaaccgtttcctctttggagtttaagagacaggaaggcagattgttctttgtattcaagattagaggagttattgaaatcataggtggacaaacagatggcagcacagctggacactgaggacagatgcagctgtgtaaaggagtaagaaaccttgtatattcttgagaaagagtaggggtagattgaagtgtttttctttttaacctaagtttgactttggtggggatcaagtgagtaccatataattgataaacatatttcctggttcatgaagacttggggccaatgggacagggagacaagaacctagagaaacacgttcactgtattctggaaaccaattgactatagttagttactgcagctgacacagttcaaccaaaatacaagatggcatggccctccctggccagcagtcagttttctcactgtggcagctgagcacctaagaggcagcttaatggtgggaagatagatttgtgctgatggcttcaggggtttcactccttggctctccagcatggatgcctgtcactacatcatgtctgtgggggtgggtggcacatggtgagacttcacttctgaacagacaacgagtagagagggggggctagataagataatagcccccacaaccacaccccacttacctgtttacttcagcttggcccaccttctaaagtttccagaacttccccaaatagagccaacagctaaggaccaagtgtttaacacactttgtactcaaacctattgaatgtctttttttcctttcaaagaatgtttccttaaatattacatgttgaactgaccactattgtctcttaactaaaccacttggacattttacatttcaagtaattacttaacacctactgtcacttcccatcttgttgtttctcatgcttcttgtatcttgatttcttcccttctcttgccttctttgggttgattgtacattctttgtttctctttggttcaatatagaagctgccaaagcattgtactgttaatccttagatttcagcacctatccatggcttatcttcccagacaatgcaaggaccttggaaaatgttctgtaagtgaaggaagtactagagacttaactattcctctagcccaatagattattaaactccattccctgtcatctggcttctaaaccataatttatatttattttagaattaaagtttgaatatggtgtgatgtggtgccagctaactttgaacacatgaacttaaatcatccttttgcatcatcatcctagctatctaggactataaagctccaaatctggagtatcatttattttaaaatagttcccataattctgtatacattgaaaactacttagacactattgctactattttatatggtcaatatttacttaaattcaccacaaatgcacgttcttgttctttaatgtcctctttcctgtgcataaagaagatttctcaggatagtctaaaggcaaagtctatataaatcaatgctctaagtttttgtctgaatatgtcctgaaggatatttttctcaaatatgaactaagttgaagttggtagggtttggagtctgcgtttcccagctaactggaagacctgtctgtggcctggctccacagctgtgtggctgtgtgttgttagcatggctgccctgtctgatcccttttattgggttgtttttatgatcgttgtcttaagacttctgcagtttttcaaggatatgctttgttttgttttctttctaggacagagttttttttttttttgtttcatcggctagggtctagagtgttcaccgaagcctttttatctagtttgaaataaccattttgaatgttagctttttttcttttaggtgtgtgtgtgtatgagggtatacgaaagtgttggtgagggtgtgtgtggatgtgtcttcacaggggtgcatatgtgcatattggtatgcacactattgcatgcatgtgcactgacagtcacgcttcaccatatgctttgaacactgtctcttactgcactggcttggaccttagtgattggcagggctagctgcccaattctctccagggatccacttgtctctgtcctctctcaatccactgctgaagttacaatcgcacccttctacacagggagtgtgtgtgtgtgctggtgatccaaactcaggtcttcatgtttttgcagggaaggcacttcagtgactcagccatctccctggccaaatgtttgccctttatatataattctgctctgtatcccatccctgtctcctatgcattttcaacaacttcttttggaaaggtgttttgagatagagtgtaaaccttgcagtcctataactgacttggtagaccaggctggcctccacattggagatctgcctacctttgcctcctgactgctgggattagtcctggctggcttcatcctttttgagttgtttatcattccttctgtattttccatgcttacttttggttttggagtttattgactgtgtaactttctagaagaaactaaaatcatttaaataaccaatttattggattgcttcatcagacttaaaaatccacaaattctttattatttaagttttcaatggaaataatttattgtatgtttaagctctggggtttctagttccttttcatccagacatgaaatgttgtttgtaagtttgcaatagcctgctaaagtatctgaccttggatttcgtcaatattatcttcacagactgttgttctctggtttgtatgggcggcagcagcatttagagccttccactgttgtccttctcttttgtttgtgctgctttgtatctctgttgccatggctgcccacccaaacagttatctttgattatactctggatgttgtacttgaaaagcagattgtaataatgatttgaggcttaagggtatccacgctaccccagatggatatgacttcagttagcatctgcaggcacccacctacagtccataaagtttgaggatggagtcgtccagaattttcagcctagctatgaacctttgatgtactctggaggtcatgcaaaagccgaggaggaaaacaggagtcctgctttcattgtacaatcaaaatagacatacccatgccaaaagtcatggatataaagagctaacagggttgaacatacaaaagaaagattggtttctggttagagtttttattgtcaagtacaaatgaaaataatcactattaaaatctcagggaatgaaactctaagctctgccttgtatctgtaaagtctccttcttctatggggaacaaaccctgccaaggaagagcacattagatgtgggattgtgccgaatgaagaaaatgaacggatggtccactgtgaattcttcctcaggcaacaacatacagaatgtagcaatgcctcctgtagcagcggctgcctctgttccttcctcattcacttccacaaaggacttgtggacaatttttgatatgaaaagatctctggatcctgacatgccagagagatcagccttgctactgctaaagagatcctgcactcccaggcggcccaggttagagttgagggtatagctctcttctatcttgaaccggggcagtttgacgtggacatcaatgaattccaagttctcacgtttggtccattcaagcagtttttccaaagttatttgcttttcaatctggaattaatataaagcaggtgtgtatttacttagttgattgttatatggtaattactatgtgccaaaccctttacatacatcaatttgttcgatggtcatagcaatgctcccccatcacagtggttcactgatgtcagaacatattctgaatatttacattttaggcttctgggctgggagtgtggctcagtaacagaacacttaactagcccaaggtacttgggtaccgtgaataataaaataataataatgatagatgttaatttattaccgcaacaatgtactattccaatgaacggactcacagttgccacaagtcacagggttttcttcatgatttctgcctaaatagattccacttagattttattttatctgtaaattgctggaatatatcggaattattttccaggtctttgagggtagaaatccaaaacaaaaaacaaacaaacaaacaaacaaaaaacagtgggtctttcatccattcatccacctatcattttgtggatgaatttttgtttgtctacttctacctatctatttatccattatccatccacctatcattcatccatccatccttcatccattcatcaatccatctacttatctgtccatctgtcacccattcatacatctactacctattcagtcatccatcttctttcatccatccattcatctattcatttctctctgcctcactccttccacttgttctattcttcccttctgttcctcctttagtccatccatctgtccattcttccacacactcaggattcttaaacccctctcacattgaatcacttgactgatggactatgaggttttattaccctgactgcttgaaaggtacagggaaattttagtagttttctttattttgaaactttctagagttgtagtgatgtatacactctactagagctgaagtaacattccataactcctgggggggagaggggggcaaaatatatgggctttatttatttatttatttatttatttatttatttaaaccaagtgtaagtagttaacatggggccacacaccctgcaatcccagcattcaggagccactgaaagaaagctgtaagctttggctgcacagcaagaccttgtccatggaatggagtcgagtcgagtcgagtcgagtagagtagaacatagaatagaatagaatagaatagaatagaatagaatagaatagaataggcatgctaatgacagtaactttgtagcattgatgtgaccattgagtgaattgatataaagggtttggcacatagtaagtaccatataaatattaactactattgttcctctattggactagaccagaaacacttatcttatggatactgacaatttccttctttagatcagagtatctttttgtaatgagataaattaccaggtagaaaatacaattgacaaatgcaccacaatcatgttagtgcacactctgtacattggagtgacagcaggctccttcttgaatgcaagtgtaggctgggaaggaacagaagctaaggctcagggcagtctaagatttctgagggaaaactgtaatcttcacagtttgtctacttctaaccttgttaggagacacccaatccccaaagacttaaatcaattcttaatataattcctttaaagttactttaagtaactttattatgggggaccactcatcactgttacttttcaaatatctacatgttcccccattacaacggttcactgaagaccaaacatattctgaatagtttaattttaggcctctgggctgggagtgtggcacagtgacagaacacttacttagcccaaggtaattggacactgtgaataataaaataatgataatgatagtaacagcaataatagcaatagtagtaataataactatataaacatgagatctcagagcagtaagtcctgatggactatattgacaaatatgggcctgcagggtaaagtctgtggatggacaagtgtttatggttcagtaaacacatgggaaatataagaacaatgcaatataaggaaacaaaccatggcattgagagccagttaccttcttaagacccgtggactcgtcctcaatgtctttaggcagcagaatgaccatgctaagttctccaccctggtaaggcatctccagcaccttgcacttcaggtccgaaatgtaaccaaatggaaattttttcttttgatacatcatcttcactgtttttgtgtctttctgaatggttgcaaaataaaaaaatactcaagttattctctcttgtgttttaaagcagaggtgaattgggggtcttggggtagagggctcagtggtaaaggcctggctaaccatagaggagacaccttgtgctacaactccagcactcacacacatacaatcaagagcatcccaggatgctggtgtcacctgaccttactcagtcggaatggagcatccgttgtgtcctctgtcatgaatttctcctcccacattcccttaaagtagatggcattcaccagcacaagtttggtcatactgtccaccacacccacagacaacagttctgggattttccctgaaaagataaggtaagcttttttaaaggttcatatcaaaagtttaaatttaatccagtcactacttagctctcacatagaggtcacacttcattttgtttgaattcagtgttgtcaggaaggacccacttgtctcatttttattttaaacaaactaacttgtaagaccaagcgggctgtgcctagtgcttcttgagaccctaagttccatcgcttgaaccagaaaacaaaaaaatcattaatgtcagtcaatgtcttcaaaggtttaaaacaagaaagttctcctttctggcatgcaagcaataaccattattttgtgaatggctgttctttagagaaaacaaacaatattccatagtgaaattttttgctcactggtaaattatgtcttcaaatctgctaagtaggagactgttcttttgaaaagggctttaaacaaatgtccaagagataaaagatttatcctagggtaagtctattgaaacaggagctattttacctatagtctaacacacttctgggaactgatagagttccagacaggatccctgagtgctgactcacacagaaacaagactgaggacagatccattacccagctgaattgagcccagagagtgagtcactccctatccactacttctgagttactggacaagatggtggccaaaaatattatgactataccagtttctaaatactgacttcatggttccatgaggtttcacctctcatttctttgcatatgaacactaaacaattctgtttaggcatgtataataactttattctgcattttaatgttggttttaattttcaattgtacttcagggggacccataggtactcaactggttccactaaaccatgtctgtatttctccactaataagtttctgacatcttacattgtcccttattctagggaatagcatctacatgtcagtgcacataagtcaggatttgggaagttgtggaagggagacaggagatgcaagtgagagagtgcaggggaatgagaacttgtgcataatggctctgctgtggttcagaggggtccccaaaggaccctgacttgaaggtttggactctggtccatcctgcattggaagacagaggaacctttaaaatgtaggtcctaggtggtggtggtggggtctacccacctatacatcattgggaatgtattttaatttatttgtattttgagacagggctcttgccatgtgtgctcaaggcaatcctcctgcctcagcttccaaagtgctgggattgtaggtctttatcctcaacgttaccttggagaaggcttgctgctattgaaaatggttgtgagacactggtctctccttccttctctttattcaccaatgaggtaaacaggcctcctctgctgcactgtcttaacaagaggtgcagtgttgccatgggaccacagcatcaagtccaatcatttataaactaaaacctccaactctgggagtcaaaatcagcctttagtccacaagctgattgtgtcagggtgagctccagaaggggaactgagtaacagagccagcactgctcagcctctcaccttctgtttgacctttgacccactggtttatctccttccttgcatcctcagaggcatgcagaaaatccacaggggccaagtcagcaccatacattttctgggttgaagccaagtattcctgttttttttaaaaaaaaaaaaaaaagtgccatgaattatatctattccctacagaaattttctaaaatccccacaagaaaataacaaagtcctaaaaattgaaaatgttttattaaaacctaagctttggacttttttgttatgttgaaaaccacacaacagtaaatgtactgtcctaaacannnnnnnnnnnnnnnnnnnncattggttgtttgtttctgtcctttctcttgcttttgttctccttgttcctcttttctctcttggttgtcatgtttgttttctctctggtgtgccgtcgttctattcacattgtccgcagattcgtgtgttgtttttttgtcttgttgttccgctttctcattgcgttgtatgtggattgtcctgtttgattccgatccctcgtttgtaggggtgtcagtcatgactcctggattttgtgttgtgtctcctggggggtgtcgcgctccgcctatgacaagtgtggggtatctgttgagggttgtggcctggatgtcgcatgtcttcttgtcttcatgccccttcgtccaccgtgttctcgttgttgaccgctgtttgatctcccttcttggtttgttctctgtcccgttgcccttttgtctattcctcgttagtgatgggtcattggctatgttgttattccctttcttggtggtggcgccttttgtgcatgtcatcccactatcactttctttcctgtggttttgatattctcatattctatttccccttgttttttctttctctttttatatatttatttataattgttgtctcactgaaatttacttattcttattttctcctatacatgacacactctttttcctttttattcctctcatcatatgatatcagtactatcttaatggtgcctatgtttattgtcgcattatttgtcttttacttatatatatcctctatacgcttttgcgatctcttttctgtgtattcgtctcgtataatcccacatcttatcacgtatatgtgtactgttcatttgacagttgttccatgtgtcgcgttccgttctttcccggtgtgtgtcgccgttggtcccggggttgccgcgtccgctcacgcgtcccgtccgcgtccgcgtcccgtcccgtcccgtcccgtccgcgtccctcccttccttccttccttccttccctctcatccttccttccttaaaccctccacccacatctcttgagataggatgtctctttgtaccagccctggatgtcctggaaatcaatttgtagaccaggcttgccttgaactcacagagctcttcctacctctggctcccatgtgctgtgtctgagtcatctttgaagcttacaagctgtagtggcaagtatatccctttatataacatttctggtgttaatacaaaggctactcatcctttttgaattttacactaatgttttcataattgagtaaatgttgattatacttcaagtggcttttcagactcatttttcctttgtatgtgtatgtgtgtgtatgcaagtggggtttatgtatgtacaaatgtgtatatgggtgtgcatacctgtgcaatcatggaggccagagaaaatgacaggtgtcatacttttattcccttaaaacaaggtctcccactgaacctgcctaggctcgtggtccacaaacccaaggggtcctcatagctctttttcccacagggctggggtcacaggagactatagagccatgccaggcatttttctgggttctgggatccaaacttagcttctcatacttgcacaggaagcgctcttctccacagaggcatcccttcagtccttgctttctcaagtcatccaggatggatcctttccttagaaagactatgagatgaaagtcccacatgcattctttgctgtttttatgaatacctgcaacatgtctgtgcctggaaaggtctgtgttacttcaggaagtttcagaatgtgaagtgctaggtacttacaggaaggaagttgtaggttttctctccatacagtctgttagcaagtttcagagtgtgagatgctccacgtttgctcacttcagcattcaggctttggaagcgtgaatggatgtcctcaacagagtcaaaatgaaaagtctaaaggaaagacatcattcttcatacaatcatctatgaagtgattccctgttgtctacatccaccaaattacttttatttgatacccagtaactccagcccaatattttattaacatatcattggcaaaggaaataaaatggaaccaaaaatgtatggctctgtgagacatcattaaacatagcttctgaataattttcaaatgttccccgaatgtgaatggttaacaagttaaatatttatgtcaaaattttttccataaagattcaaatggtatattcaagtttatatactgtgccatatacaagtttgttaaaaaattttttttaaatctcagaaataactaaacagtgtcaataagacacattcctgttgtgagacccaaaacgtgggagtgactgagaccttctttctcaatgcttatcttattacggtccacaactcattctctagagaaataacttccttaagtttattctggtgagagtttacttcctcttctgctagttgtaaatcaacaggccttttatggttgtgtgaggtctggcctcattacttgcttctaggacacaaaggacaaaagcacacagggtccagagtccatgctactctctgagctccgcttactagattgctacatggacacacctacgagactgaaatggggagggaaaggccttgagacagtatactgtttcctgatgctgtcagctgtaaaaagccttaatgctgaagcagacataacctgcgagaagcacctagcagcaggtgcagttaggaaacactttacccactcctgtcatgatttccaaaggtggcagaattcccctctcagaattaaggaacaccaagagcagaagtgcccttcatacccattaaggaagactaggcagctgtggggagagatgcaaaggtgacctgctgtctcccaggggtggactgagaggaggtaggacctgtccaacaggccacagggactttacaatccctcctcctgcagagccacagccagtgaaatcaggctggagagaggcacagggctaaccctgggaacatagacaggtggctgtctttaccttttgtccccataaaaaaaccaccaccaccaagctctcttcctgtagcatgttcttatatttgtcatgcctgaaggtgaccctattactggcatgatttatgagtagtggttatcagtgcaaaaggaaaacaggaaacagctagctctggggaggtgcagggctagcttacctgaaagcctgtgattcactcttgtgaatgggagaaccaaacccacaggtagtgtcattgtctttcttcactttgtgtccccaactgaacagagactctgccctaatctcacttaaagttggtagtgaatgaagaactgactgttttgggggtgtggctctctgaaagtctgactgtaccatctaacaagcatggagatggcagggagagctggccagtttggcttttgctaaccttagaaagctgagctgcagtgctgcctttggcccccagaatgaccatggccaaggcagaagaaatgctgaagggagagaagaagatgtttcctgtggggctgctttcattcagggtttggaacagctccaaggcgaagagggtgttggctgaactcagctgctccatggtgaagtctgcaaaagaggggagatcagcactgccagctacaacaccagcaacactacctacctcagctctgacatccacccctaggaccctacagtttggaattcctacctcatcctgtttttcctaagagggcaagcatactacttcagttctccatgcctgagatcaaggctgaagtctcagctggagtgaaatatgcgaatttgagaatgccactcaaataagtaagatgtgggtgacagggaagaggaacactcctctgtgtcccttttgcaaacaagctgattcctgcagtgggtaagcaagccctgcttgaggctcatctgctaatccagctgggtcccaaactcagagctccagtttgtccaagtacaggctaatcacaaatgtgtgtccctggctgtttagctacccgggccacatggagttctcattgttgaggatctaggatctcaccagcttccttccctcccagcctccctgcagccaggattgaccgtatgaagctcagggcactgtctcccagatcaaggttcaaaaagaaagccgagggaaagaaaaactaggatcaccttcctccctcgggcccgcggcctggagtagggtgcagttggggatccacagagcattttctggttacatcttgggtgagggtgaggtaccaggaacgtgctggttcctggaagaggtgccagcttcctccctccttgctatgacccctgagaatcttacctcttgcttagcaggtctggctccacttacagctaggatgaagtgctcagagccagctgttgcctttatagcatgcagaaggggcgtgtcttcctggcaagcccaagctgggtggaggcgccttttcttggctgagtgtttaaaacccgaccttggagggctgtcaaaataaaagcagaagattgtggccactctcaaggggactttactttcctcagttgcaggcctttttattattattattattattattattattattattattattattatttctttaagcagagatctggtaagttatttcttcctcagctgcaaatggccaagagaataaataaatgtcctttcttccaggtcaaaagataccttcttgaattccactgaaacgctgtaaaatcaaaaggaatcctttctgtgcggtatgtaggtagggatggagaaatatctttggggtcctttggataaggtcccagattgccagttacaagcaataggtgatccttgtcttctctgcctttcaggtgccaaggctagctcagggaccacaccaggctggagaagccctcaacccacaattccccactattagactaaaagtttggacaaatcccctcactatgcaacttaaattagaattgactagcccaggccattgttaacttgatgggctcagctttattctccttgaagtgtttggaactgtaaattcacagaacttttagtgcttcttgtctttcttcagaggacaaaggaagaatcctactgtaggtgagggtcacaacacatggattagtgtttgttagactcgggaactaaaagaggagaaaggaagatggggaggtgggtcagcacgtctcttgagcactcccgtgttggatataatgcctattgtgaggtatcagaagatagaaacttcgtgtgtggtgtttgggaggtgaggactttgagaagtgattaagattacacagggttctcagggtggggacgcctgactgaattccagaatatcatcttcatgaccactaggtggcgagcacgccccagctcttaaggactatgactccaagctttaataagagaaggagagatgagaagatcagaagagatagatctgcgctccttttttcccccctatgataccttgatgccttacactttctgggaccttgtctagatgaaggctagttcagatgctgagtcttgaacatggagaattcataattatcaagccacaaatgttttactataacaacataaatggacatagtccttttcacatacaaaatatattcatccatgtagctcaacgttattctagtattaccagaatcagaaatgaaattcaaaatatccccagtgagcccgtggagtcaaataagttagtttcttctgaaataaaatgggaccagcttagaacagaatttcctttttaaaaaaatcagtgacaaggaaaaagtggtaggtcctacagactttcaaagtccagcattacaagcactgggacaacttgaggcttgaataccaccattacacctccctgtttctacagtcagacagggcagggtcatggatgtccaaggctctggtggacttcaaccccataaccaccagatgtcgatgacgcagcagccctcatgggctgagtccagtgcttgtggctttcccaggctgctgaagtctgtaataatgctctgctgatcaggaatcttggaaaagaacccctctttaattcctcgaaacatcttcctggtgggaacttcgcagtgttacaaccccaggctccaagaagcagcactctctggtgactccatggctgcctaggacttacctcataaagccatccctttaaatccaggagaatgtgccacactgcaccacctcacaaccagctggcccgagacatcatgacacaacatcaaggactttcagagggacagcagaaccaaagagtgccatattacaacgtgggggcagttgtggtatcctgagtcctgtagtgcactgggtccctcccttgaaactcttgtgtctgaggccttctggtgtgtgacaggcatggcaattgggataatctcttgatgactttggctcactctggcttgcagtaatgaatagcctctggcttcttgccacattaatctctttatcaaagcttacttttgtcacagcctccatattctttcctgaacatggggtttctttctttaacatggtgggggatttccaaaatcctccagttttatgctaactagttgccgccctctatccctccacctcccccctctctccttatggcaaataaatctgcttttgtgctgagaacttggtcttggggtgtcttgagctgactccagttgagtgtccctacaatttgcctttctgagcctagattacttcacttagcatgatgatctctagctctgttcagtgtcctgccaagacataatttcattcttctgaatagctaaaaaacgcccaccattgtgtacacataccacatgtaaagtggctattaaaacatcacaggacactttctccaaaatcgtccacagacttggacacaaaacaagtctcagctgatacaagaaaggtataataataacatgcatcctatgcgaccaccatggacgaaagctggatatcaacaacaacagagatagcagaaagcttatgaacttagtgaaactgaacaactattcagtagtgaatgaaaattgggtcaagacagaaattagggaagaaatcaagaacttttcagaattaatgaaaatgaaaagactcagacccaaacttttgggacacaatgaagggagttctaagagtcaagttcatagcactacattaaaaaataattgggcaattctccaactaatagcttaatgtcaaacttggaaactattgaagaaaaggaagagatcacaccattttggaagtagatgtcaagaaacaaactcatggtggaaataagtaaaatggagacaaataaacaaacaaaaaacaaaaccaaaaaatctcaaaaaccaaaaccacccaaaacatacaaacaaacaaaaatgaatgagaaaaggagtggttctttaaggaaatccacaagattgacaaactcttaaccaaattaaacatggagagagaagatccaatttaacagaattggaagaaaagagggatctaagggccaccaaggaaacccagagaatcataaggatgtattttgagaacttgaacaccaccaatttggaaaatctaaaaaaaaaaaaaaaaaaaatggataattttcttgtcatgtactatttacctaagtcaaatcaagatcatataagcaatttcaacagaaatatcccctgggacatataaacattaactaaaatctctcagtcaaaggagcccagggccagattgttttaatggagaattttactataattttgaaatagaattaatgccaatactcttcaatttccatgccacaacatcaacctaaataggaagagtctcaaaactatcatgtggagtgttgctactctgctttggctctctgtgggccatgtgcttctagccatctgcccaggaactctttggatctgtgaatgaaaaaacacacaaattagtttattttctaaatgcctaggccactcaagggctgggcagttctaatcttcccatggctagcatacttttccctctggtacttctggttcaacaccttctaaatctacctttaactttcctgccctgttaccttctgtgaggtccattggtcttcactgcacaagattcttgtggacagcccttctgggggtccactttccctttcctcctacattttggatgattttccccctacagctctaaattttatctgtctctctctcttggtgattctctgtctcattttccccagtttctagcctgtgcaaatctaaaggttccaccccatctccctttgctcagccactggccactgatgtctttattgatcaatcaaaaaccaactgggaacaaggacctttagcattcggacacacagattcacaaaacatttcatgaaagaacatgacaaggttgtccattctctctgtacataatcaatatagaacttgaagtcttagctagagcaataagataactgagggagactaagtggatacaaatagaaaagaaataatccaaactgtctttatttgcaaatgttatcatagtattcataaatgaccttaaaaaaatcacaccaggaaattcttatagctgacaaacagttgagctgttgtaaatttgtgcacttggtgtaagaaaaaaaatcaatttcatcttttctcacattggttcctaaatattcaaaaacaagatatgggaaatttctacggttcaccttctgccttggagagcttccatgtatttattttaaatatgtaaccagtgattttcaatacaaatcaattaaatgtggagagtaaaatgtggctttgggaatagttgtccccaggtatttgtagggatatggtcctaagattactctctgtggtcatccttctgtcccccacagatataaagcacaggaccaaaagtaccttagattacaacatttgtatacttatatgtatctccctataggaagctgagttattaaatgacttgtcatgctagatacaatgcacaaacaacatgaatcattatgctttactggttggggaattataacaagaactaaatatctgtatgtgctcaatgcagacacaaattaaaaatacctttcatctcaagttgattgattctatgatgtggaactatgtatatggggtaacagattgcactgggattagaggcatagataggtttctctgggaaatggatagatggtcttcctcatcagaaaacagggctcataatgtacagggtgacttctaggctttctgttctatccacttctgaccatccctacacataaactgtcctgactcatttctgcagaattagcctagaaggttttgcctcagtgtgtcctcttacctaatttgtcttcttgttagttttggaagtacttggtcttttctaagttatacaactattagctgcacttgccctgtttcctaggaaagatgtctcttctgtagctatgaagagacaccaggaccaaggcaattcataaaaggaagcatttatttggagggtgagtccatgactcgtaaccatcatggaggggagcatggcaggagcagtagcagtagctgagagattacatgttgagacaataatcatgggagagagggggggtttgcagtggcctggacttttggaatcccaaagtctccctactgacacagctcaccaacaggactgtacttaatcattccccagctatttcaccaactatggagcaaacgttcaattatatgagccttaggggctatcctcaaacaaaccaccacatagaggacagcataaaggagctgatatggacgtaacttaggttgtctagttccagatatcaaatagtgtttttgaactactggatca

SEQ ID NO: 378 - DNA, 3327 bp, Mus musculus
actaaaccttcagtgggaaaacagtaaataaaaagtttctactgtaacttgctgtatactgttgggtggtaaagtaaatacacactcaaattttgacaagattcataagtctttgctttcccttaacacatttaatttctgattatcagcaataatcaattataataaaattttgatgtttttggtagcccccaggtacaggttgagaattccagccttagcaacttaacaagtcacactcctctcaatctacctatatgtatttaaatattttaaaagatgtattacatttatatttacatgttttgcctgcatgtatgactgtgcattacctaggtgtagtgcccccagaggccagaataaggagccagatcctctgacctggtgctgcaaactgaaagaggaacctacaatagcagcaagtgctcttaactactgagccacctctccagctccttttgcatctttccaaggagtaacttacagaaaagcataataaaatcataagcagtaatacatggatgtagactaccacactaactttttaaatttgcttttcaaaagtaaaaatacaattttgtattatgtagccctggctgacttggaactcaaaatgtagaccacgctggcctcaaactctgagatccacctgtcagtgcctcctgagtactagtattaaaggtacacagcactacacccagagaatatacatttataaatgcctattgtactcatttcctgctcctgtctgctggaaatacctttaaggactgcctgccatcattttgttattgggatacaacggtgattttcagtttacgactattatatcagctagagataactattaagcaagtactttgggcgacaggtcctaaagtaaaattaaggggcacaggggagggaatcccttttattgcatttccttgagcagccttcggaattgaactttgtctacctgtgtagctcttgtgtgtttatgtcgaagccctttctccagcttcctaggcacttctggggtatttccacttcgttttagttttattacaaatattctccctgatgacagcatttctagttccgcacccagaaggccaaaatcctggaaagccaggttcccaagttccctccgcttgggttttactcgaaggcggttgtttccggtactgagcaggcatgcgcacgcgcaccacgcctatccaagcagcgccacagaaaggctcttcccagggaccgaagaagacgagagggcctgttgtgacggagaactacatttcccaaagttcaatgcgagaaattgccggcggcgattgggggcatcgggttgcggagtcttctgcccgctttggactacacttcccgacacgactcgcgaggcgttgccagctgcgggccgagggcgagttgacgcgggagctcaggacgtgaggcatgagcggcgccctccctcggcccgtgcgtgtcctgctccctacccgcgcgagggtcgcgcggcaccgggcctagcggcgggcatcggcgttctcaggggcaggtgcagccgcacgggcgccagggagggcagctgccaccatggaggtgagcgggccggaagacgaccccttcctgtcgcagttgcaccaggtgcagtgcccagtgtgccagcagatgatgcccgccgcgcacatcaattcgcacctggaccgctgcctgctgctgcaccctgcggggcacgcggagccagcggccggctctcaccgcgctggggagcgggccaaggggccctcgccacccggcgccaagaggcgtcgactgtcggagagctcggcgctgaagcagcccgccaccccgacggcggccgaaagcagcgaaggcgagggcgaggagggcgatgacggcggcgagaccgagagccgtgagagctacgacgcaccgcccacgcccagcggtgcgcgccttatcccggacttcccggtggcccgctccagcagccccgccagaaaggtcagcgcgggccgcgcgcatccccgggcgctggcggcggaggagatccgacagatgctggagggcaagccgctggctgacaagatgcgtccagacacgctgcaggactacatcgggcagagtagggccgtagggcaggagactctgctccgctcgctactggaggccaatgagatcccttcgctcatcttgtggggcccgccaggttgcggtaagaccaccttggctcacatcatagccaacaacagcaagaagcacagcataaggtttgtgacattatctgcaacaaatgccaagacaaatgatgtgcgagatgtcataaagcaggctcagaatgagaagagctttttcaaaaggaaaaccatcctttttattgatgagattcatcgcttcaataaatctcagcaggacactttccttcctcacgtggagtgcgggacaatcacgctgattggtgcgaccactgagaacccttccttccaagtcaacgccgcccttctgagccgctgtcgggtaattgttcttgagaagcttccagtagaggcaatggtgacgattttaatgagagcaatcaactcactgggaatccatgtcctagactccagccgtcctactgaccctctgagccacagcagcaactgcagctctgagccctctgtcttcatagaagataaagcagtggacactctggcttacctcagtgatggtgatgcccggacgggcttgaatggactgcaactggcagtgctggccaggttaagctctaggaaggtgttctgtaagaagagcggtcaaacctattctcctagtcgagttctgatcactgagaatgatgtgaaagaaggcctacagcggtcccacattttatatgaccgtgcaggagaagagcactacaactgcatctctgccctacacaaggctatgcgtggctctgaccagaatgcttccctgtattggctggcccggatgcttgagggaggagaggacccactctatgtggccaggaggctggtaaggtttgccagcgaggacatcggcctggcagatccatcagcattagcacaagcagttgctgcctaccaaggctgtcactttataggcatgcccgagtgtgaggtgcttctggcccagtgtgtggtctattttgccagagccccaaagtccattgaggtgtacagtgcctataacaatgtaaaagcctgtctgcggagtcaccaggggcccctgcctcctgtacccctgcacctgaggaacgcgcccaccaggctgatgaaggatttgggctatggcaaagggtacaagtacaaccccatgtacattttttttaaaaaaaaaaaaaaaagt

SEQ ID NO: 379 - protein, 601 aa, Mus musculus
RRASAFSGAGAAARAPGRAAATMEVSGPEDDPFLSQLHQVQCPVCQQMMPAAHINSHLDRCLLLHPAGHAEPAAGSHRAGERAKGPSPPGAKRRRLSESSALKQPATPTAAESSEGEGEEGDDGGETESRESYDAPPTPSGARLIPDFPVARSSSPARKVSAGRAHPRAAEEIRQMLEGKPLADKMRPDTLQDYIGQSRAVGQETLLRSLLEANEIPSLILWGPPGCGKTTLAHIIANNSKKHSIRFVTLSATNAKTNDVRDVIKQAQNEKSFFKRKTILFIDEIHRFNKSQQDTFLPHVECGTITLIGATTENPSFQVNAALLSRCRVIVLEKLPVEAMVTILMRAINSLGIHVLDSSRPTDPLSHSSNCSSEPSVFIEDKAVDTLAYLSDGDARTQGLQLAVLARLSSRKVFCKKSGQTYSPSRVLITENDVKEGLQRSHILYDRAGEEHYNCISALHKAMRGSDQNASLYWLARMLEGGEDPLYVARRLVRFASEDIGLADPSAQAVAAYQGCHFIGMPECEVLLAQCVVYFARAPKSIEVYSAYNNVKACLRSHQGPLPPVPLHLRNAPTRLMKDLGYGKGYKYNPMYIFFKKKKKS
